United States Patent Application Publication US 2004/0265849 A1 - sequence listing, part 7

SEQ ID NO: 6864 - DNA, 185458 bp, Homo sapiens
ttctccttcaacaacaataactagatgactagctctcatttcagagtggcttagttcccagaagatacagcatacccatgagatttttttccagcacctagaaatggcaagtcagtttagcaaaagctcacacttcatgatataaagtatgtccaagctcatttttgagtaaactagcttataccatgcaaactcttcaatcctttgatacagataaaagtctgtcaattagagtatgtaaataagaggcttcagtctaccttacagagagtaagggctcccctagaattgaactttttccagtgagaacattccagaagcactatcacaaatcatgcagattttcacatattaaaatatttcttcatatcctgagtatgtggttgctgcacagagaccctaaggaaaataataaattatgagatcatattgtcaatgacattaaactgtagccaaggtaggagccatcacagatgaaatgaacaaatgacatctggctgtatgttttgtggccctataagaaaatagaaaatgatgatgattcatgcctatttgtattattaaacaataaggaaaacattttctgagatcatcttaaatattataactgtgagttttcatttgtatactctgataagtaataaataatcaaataactttgtaattatgtttatccctgtacactcatcagataatggttctacagtcagccaagaccgacataatggctccattcatgctggaagtagagatgaaaaaagcatgaactttgaagagagaatataaaatctgggtttgcatcccatttctcagcaaatgaattgacctcaccaacctcagtttcatsatctataaaataaggagagctgtctattcatgaaattaagaaatcatgtatgccaagtacctggcacggatgtcactcaagataaaagctctagaataataaagactgcataattcttgaatatcatctgaaagtctttcttgaagtctctttctaaaggaataaaaactatgtttctgtagactaaatttttttacagatgcaaggcataaaagatccatgaaggcaaataagcttttagaaaatttccaaattcttttggctgcagttataaaactagttctgcaaattaagcacaaaaaagtccttaaaaatgtcccagtctgtgatgggccaagttttattccatagatcatttggataaacactaaattgaaatgattatcacacacagaagaagagagtgattgagagagactgccatattagcttctccaatctctatttgagttccctttagtatgtggtttagaaaggaaatcaggaaatccaaacactcagctaataatcctggtggatgttgaaaaggccaagcacttgtcacagctgatgactgactcccctgacaataagtagattaaggataccataatgtgctttttcatagctaaaaggttaacaactattggcagttcctaatttacagataggtaatagccctggcctgaatttggtttcttgggtgtaggggattatgtgatgcaaaagaaaagacagtatcctttgtgttttccagcataaggtcaaagcataggcaatattttgaattggacaaaacagactagatttttccttcctctttgtcaccctatttccttagtttctaaggtcccttttttcctgtttccagtttctcagtctgcctagaaattattcagggaagtttcacctggatcctatatacaatgtgcctggcatgtagaagttacttaagataaaagctctagagtaatgaagatttgttgcacaccttctgaaattcttccttaagatctcttgtgttcccaaaatcctttataatgcaaaataaacttctttcccttctcttccccccaaaaatcccaacaggatattaattttacaccaatcaggataaaataatttatactaatctgtgactcactgatagtcccaaaatcatgagagttatttgcatttttaaaagagaataattgctgccaaaattaatgcctaattagtagaatgtagaacagtgttacaaagtattgagtgaatataggcttatttttaattgagggaatgagaaaaaattattaggctttggacagatgagccctcagggtctgctcccctaaactgacctaatttttttctagattcattcccttctaaaattctgctaccatagattctctaagagctccatatattttttgtttgtttgcttttatccaggaagattcacatgacaacaaggtccttggcaatagaaacaaaggagccaatgtggaagacagcataatttgagactctggatatgcactagctaggggagaacacatttttcatctgaatattgataaaaatctacataattactattgcaaaaaaaaaaaaaarggggagacccagaattggggacatgccatttaatattatggccatttacaaaaacaaagatagatgtgaatgcaacttgtaataagtcaaggtataggaaaaaacacaagatagttttccagactcaccagaagcctcccattcccgtggaacttgaaaagattcacaggaggctgcatactgttgcatctatacagacaactgttaagatctgtcgccacaaccacagttcagaggaggaatcttcagctgtaagaggttaaatgtcatatccataggcgaaacaatactgaaaagagaatctaactcctaattcccacagcatcctttactgtagcctttccttggctaccaccatagcaatatatctcagcttttagtccatccattgctggtaccagaaaacacagatgtgaacaaaagcacatgttaaattgcgagcatttggatttgttctggtttgactctccaacatgggttcttagatcagtagttctcaktctgagtcagataataatttttaaaaagcttcatctctgagtaagccaattttgaaatttgactgattttagctaccaaccacacagctgggaagaacttaaaatattgaagccacaatgctactcactatctaatgattttgtgcagataactcaacttttctcaaattcaatgtccttttctttagaatggggatgatcacacaaacctattgaggttgatttctatgatttgacagtagtgttatttttcatgtggcttattgcaatagcctcatctccttttctcatcttctggcgtccactcttaaccactgttcatctatcagtaacaaaacaactgtagcgatcccgttaaagtattaattctatcactcttctgccctccactcttaaccactgttcatctatcagtaacaaaacaactgtagcgatcccgttaaagtattaattctatcactcttctgcccaatgtccctgccttcatgccttctcatctcattcagagtagatgccaaagttcatttgcttacattgtctgccacctcttcattgcctctctgacctgacctgccaccactttcaccctggatcattttgctccggccactccagacccctcattattctttaaaccttccagaaacactcggggccttggcatgtagtttcccctgcttgggaattcttgcctagagtattcacatgaatcactcccttacctccctttacatctttattcaaaagctgtcttctccgagaggtcttccctggctttctcacctaaaattacaacccaacctcttcctaatacttcctctacactgctttctttttccacttagcacaaactaacataccctacatttatttacttatttgtatattttattgtctctttcacactagaatataagctctatgttagcattttgttcacttattgactatgtgatgttgtggaaaggagaaaactcaacttttctagagtttattcatctgtttccaggatggtcctacaacaatgattgacacatactaggagcttaataattggttgttgaatttaagtgaactttgaaaatgatgacccttgacacatgaaaaaggtggacaagaaggagaaagggaaaaggaaaaagaagatttggggaaaggagagagaacaattttgtcagatatgctcagaccaccatgatatggacaaagaaaaccaagcagcaaaaggaaaacaggaaggacaccagtgaattataatgggaaagcccggaaagaaacaaaaggaagcccaagaagggagagccattcttcattgttcactcagtattcaccaggtttaagtagagttttatcacgacctggtgcagtattatcctcagaaacttgggaaggtcttctgtgtaagagcagttcagttattccctcaaggcagtcatgaacttgtgaaaaacctaatgcatatagagtgattctaggatgctattaatgatcagatcaaactattctccatcatcatgtttttcttgagaacctgatctgaacataagtgtaatgccaaggactaaaagtacaaggactaagcatggtcataacctagaaagttatacattatattcttcaaaacacacactcgagtacagacaaatatacctccttactacacaattagtagatacccaatcttcctgcaatgcaaggacctcagacttctacacttttattattcagatctcaatcagtggaatcctgtggatcaagggggaatttccagcacactagaggcagcttttctccattcatgggatgttctctcaggcttcaggagggtttctttccctcctcattcagcccactactatgattttcactttttttctcatgggagacttttcttctctagcaacccagtcttgcaaaaacgatgccgaatgtctggtaaatttgttctgagatacctttaaagatctgggctggggaaaacagcattcactttgcaagcttcttgggatttttacttaactagagtctcttcttcccaggatttaaaacatgatggaaactttagctcatgaatcaaaacaaccctccagagctaaaagccagctgtatttgcataacaatttagcagatccaaacagcagrgcaaggtcgggtgaaataagttgccaaggtcatggtcatgaagtagtattagactcagaaaggctgatccccagtgcttgctccaccccatggatctctcctaccctccttctaaacgatactgtgggataaaataaaattaatctactgtatatgtgcaaaccacaggcctgcccttaactctttccttaccttctagtttcagattattcaaatcatggaggaaaagattagatcacaacacgttgacttcrctgtattaccatacaaatgaaataacttagtacaaactgtgatctggggactcttgatctaaactgggaactgctgttgactgcattttaaactctaaaagtattttgaaactctttaatttcttgaactgaaaaaattgctttgaattcactttgttttaattctgagaacctaaaaacagggattctttaaaaaaaaaaatgcaaaggctcacatgccagaaagaaagaagctgaggagataaaaatgtgtaaataattcttactttaatacccttagctagaaaaaccttaaaagcgacacatccagaagctcgttaagtcacagcctctttgaacctatttcagtgaaccaccgaatttcagatccctcaggtgcgactctgaattcagaattctcaccggctcatagtcctattttccttcttaggttttagggaattttgcaaactatgacgcccagcctttgaggggagaggactttccaggggcgcgggatgtgccactcgggaatctcaccaacagtgggcgtttagcgcagccaagcgacaggcaggcgccagggctcagcaacagggaggcgccggctgaggcggggagaactttggcgctcggagcagagccaccctttgctggccagtcgcgttgctcctccgaggaagcaagcggcggtggcgactcggtggaaaaataacgaaagaaaggcagagaggaagtagcgagagaagagagaaaatgaagtcggcgctgggggagcctgcaggagggtggccaacagtggaggaaggtggatttggcttcttttccgcaccccgggcgtgaaagccctctccaacgcgaccccaggaaataagtgggtctcgcctgggcagraaaggaaaagaatccaggsgrgagcgcgtcgctcctctgtcactgctgcccccgaggaactccggctrcttctyatcccggccgcctcgcggggccggacgcagtgcccgaggcgccctgcagatggggcgggcagggaacgggcgctccagctgcgggtgacaggcgccggcccgcccgcctgcctgctcagcgcagtgaccgggcgggcagaggatgccaggcggagggacctgggagcgggatctgagactgccggaggcgcgctacgctccaacttgcatggcctagagaccgctccagctcctgggwccgcttcaccgagtggagtgaagctgcgcgcgggacctggaggcggagacctcaggcagcggctgcagaggggcgagccgggcgcaggagggggcgcgctttctccctgcgggtctcagtaatgaggagactgagtttgtggtggctgctgagcagggtctgtctgctgttgccgccgccctgcgcactggtgctggccggggtgcccagctcctcctcgcacccgcagccctgccagatcctcaagcgcatcgggcacgcggtgagggtgggcgcggtgcacttgcagccctggaccaccgccccccgcgcggccagccgcgctccggacgacagccgagcaggagcccagagggatgagccggagccagggactaggcggtccccggcgccctcgccgggcgcacgctggttggggagcaccctgcatggccgggggccgccgggctcccgtaagcccggggagggcgccagggcggaggccctgtggccacgggacgccctcctatttgccgtggacaacctgaaccgcgtggaagggctgctaccctacaacctgtctttggaagtagtgatggccatcgaggcaggcctgggcgatctgccacttttgcccttctcctcccctagttcgccatggagcagtgaccctttctccttcctgcaaagtgtgtgccataccgtggtggtgcaaggggtgtcggcgctgctcgccttcccccagagccagggcgaaatgatggagctcgacttggtcagcttagtcctgcacattccagtgatcagcatcgtgcgccacgagtttccrcgggagagtcaggtgagaggagcctggtgcgtggagtggagatgggcgctgctgggggccggggccattgcatgaggggagagaaaacggcttggtaaagtctgaggggagttgttactttataactttgatattgcttaacgattgggccatgttcgtaggtggtaggtagaaggagcttagtagaagtagaataaaatatttaaagcgcggatggaaataaaacgcgcagtgaggtcgcggctggaaggaaagaagtggggagaatatgagagaaaatcatattttgaccggctgggagaaatctagtagatgcccgacgggaagtagaagtcgaggttcaggaccgtggagagcggtgaaggttctgaagaactacaagagcagggtatgggggtggggtatccctgactcctggctaggtgtcacactcccaagagcaactctgacagcatgtgtcggaaaagcagcatctgctctctctgacttcttcagaaggtgtgcctgagccttaggcaaaggtgtaaggaagaaagcacatcgctctgaattcctctgggtaaatagaaaatctgcacctagtacagaagccataggtagagaagagtggtcaattagtctcggatattggaaagcattagaaatatataaaagtgtaaagatggayggggagatttatttggggattgtttctttgtccctactttccttctatgtaatgtggactcagaggctggtattcagttgctgtgttcagcccatttctctccccatcatctaagaattaaaaaaaaaaaggaattaaatgatttagtttcttattgattaaaaaagctaaacatattttcaatgaaagagctatttgtgaacttaacgttgacaagtaataatgaggagatgaatctttaagracaagacagagtccttatttagtaatgagttttctgccttttatatgttacttttatcataatctcaagctgtgttaagccttgcacaaagtatctatgaagcaaataggtaattggcatgggcccattttaacgactgagaaactgagaaaagtctggggacttgatcaacattggtcagtgtactagtaaaaaagtccacattctggaggatttctgactctacatcattttcactcaactcttgcagctggaaaaatwtgtatttccaatcttcttccacttctgatatatgtgccgagataaaaactaaaatgagtaagggcaatgtacaatgaaaagtttgatagaatctatgcataaattgtcaagggagtactaaagatttctttttctagaagaaaataaatcttacatttttaatcttaggaaggttgagtacaagccatattcagcagttgcccagaagattcctagccgaactacagagatttgatctgtagagtgcaggctaattaacttttatataaaatatttctgtcacctgaatctgaatggtgtaggcagcagatgggaaggcatggaaaacacagatacacaatgctgccaatgaccaaagtgttataaacatgaaattgcatccatagggtgcatcattattaatatacatgcagaatcagatctaacaaaatgcaggagtcagcatcacttgcttcttatcattgcttctttattacctaatacttcgtaagtggccaatagtggtcacagtctccagactccttttcatttgtagattgtttggcaagagtcttaagtagcaagaatttttcaccaaaattcgtgttccttagttagaagggaagttgtgttctagaacggatgtgtgcagcatacagcacattacaacaaggggaccagaaaaaccatgaagcagaatccagaatctgtaaacttcaaagctctaagaccggggtggggggtggataaagtcctccagggacaagctgacaataaaataaatacgctgtcaagcacatttgtttctgtatttcaactcagaaacatattttaaatcactgttgtcactgttaccttcatggcacacatcttgaaagggagagattattatattaactcagatctagtttgttcaactgactacattttctttcatctccctttttactttaaattcaaacatatctaatttgtcttacttttggtatctcatttaaatgtcattctataatattctgtattaagaatgttctgatcaatgccaagtcactgtaatatataattttaagatgaccgtaatctgctttcagtgaaaacaataactgatctttcccttgcttctctggaaaagtggaccttcctctaatgcagtgatgtgatttttaaaaactttctatatataaaaggatgtcaaactcattttacacattaaataaaattgacttaatctagccaccatcctcggagtctactgcccagtgacctaatttgttggttgtgtgccactccctgaataaaggattcgagaagaaagtggactttttcacacaaccaagtaaaataaaattgtgtctcttacttaaatcaaaattgctttcatagcaagagcagcaacagctgttttctctcactttattttgggctgctgattacattcatctgaaggttttaattaatgagcaatagttttggtaacatcctgccacaactcttaaatggaaagagctgccactgagatggacaaacccctgagaaaagcataatagttttatttcaatacactatgtattcaaaataagataatcacataagatcatcaccttctaggggatcagcttctttcaagtaggraaattcattaaaagtaagttagttaactacatacttttggaaaacatatgtwtattataactgcataayaaaagcttaataaaacattaaacataggatggggtcaaagcagttttccatcaaaagaattctgacttcactacaacactcaaaccccacttgaggctaacccattttattaaaatgattacttctttgttctaaattctattcttataaccttcaaataatgatgctgaatatgaacctaattccatttacacctaaattaaattcctgcagttatactttctttctctctccttcctacatgactttttcttctacaggttttgtgtagtttcttcaaagttaactccctaaagtttacctgctgaagtagtgacaagtacacattttttwaaaaaaatatacacctcaccttaacttcatattggttctattaggcagagttaatgatgtaatataattggcttagatccaaatccatgcaattcaaaagtgactgcacagccaggcatggtggcacctacatgtagtctcagctgcttgggaggctgaggcaggaggackgcttgagcccaagagttccagactaccctgggtgacatagtaagaccctgactcttaaaaaaattttttaattaaaaaaaaaagtgatcccactactattttcaacactctcgttgaatacaccaaccacaactttgcctgcttcatgagcgatatgtactaacaaattaatatatgcttctttcatggaaatacaagtgttttaaattgtgcattttctctgacagtacaggactaagcactgaagcctatttattagaatttggctaacaaagcactatttttgcatggcacagggktacctcatgaggggaccagtaagggatatttatttttaaaacatctgctctcaactgtgttggttttctttgacttgctctatgcaaatcacagctctttctcctctgggggaaatgtattctgcaattcatgatgaatagctgatagtcgcatctaattgttgctgacttaaagataaacaatttcaaattaaatgtcaagtgatgcaaaactttttaaagcagtgatcttttacaggttcctcttgaagaacagagacctggcattaacttggaagtattttttaatttagttatttacttacaatatgtattcgcttttctagataagtagagcaaaggagactagcaggcaccatttattgagcaattagtttgtctctcccgctttactttgtgcttgccagaagagtatcacttaatccatgaagaatatatttgctcttgattttgtctgaccattatatcttagagttaatttatgatcgaatcagctgaggtatctgaaractgatgccaatttctaattcctcgtgttttatcttctggtgctgcagaaggcaccatggattttgtaccattagattttattttataaataaccccccagtcaaattccaaccacaatagttaaaagagcacaatgtaatgaaacgcatatgaaatagtggccaaaatgttcccaatctgcctctttcgttgcagatgttcccaatctatctctcactarccatgtaattttgggcaagtgactatctctgagcatctacacttatcagaagtgtagatcaaaagaaggtactttaccaatctgacaaagatgttgtgaatcaaatgagaaagtaaaagtactttggaaaagttatagtgttacccaaataactagtggagaggtgttggtcattatctggtaagaatcacttaagtgttaaagttcaactaattttcttttcgaaattactaatcaaaatgagatatgattcacatgtaaaatgtttgcattccccttacaccttcctctttaccctctccctcatttttttctcttaaaaaaaagtgggcttagaaataaacaaacaaacaaaaaactaggttcctaagtaggttgcacacttgcctggaaaaagaagacatgccacagtactgtttctgtattaccagcaacttttaacctatggcacatctaacacagcttctagagccttaagtcctgccatagaaatatcattaagatgcccaagatatttgagaaatgttggtccttcacattgctcataagttttttctataggcaaactatcattcaggaaattatgaccawacagagtctaccccactctcactcctattccgccaactacaccacaaagcaaacatccaaattttttcatagcaaactttcttgataaggaaagcagtgtgttgattcatactgacctaagctccttatctcatcatggatatataatttacaaaccagctactttgagtcccattgccctagataactgtatactctcttaggaaagtattgctcattttagtggcaacagtaaatatagagatgagaaatctcattgtcttttyttctgctagctctggctattgccacatatacacaagaatagaggacctatgtagcaccagaaatatgatgccaaatccataaaactaggcaagaagaaagaacatctcttagcatctgccatattactttttgagtgaatgtttgaatgacaaactcatagaaatttttaacctctcagttgtcttttgctgatattttctctatgagatcacaggagcaaagagcaatggggaagaggtgagctaagagtaagccaactctctccatttccttctcctttcctcaacctgacacctcagccaaattctcagatattttatttaattgtgtaagattcatgcactttcagggagactgtcaactgtatttgatctcctgccttgaaaaagtgggttgatccctgacctggctggcattatgtcatgaggagtaaactttgacattgaaaggctggtgtctgattggccagggctggtttgttaatggagatgagcctgcaagggttcatgtggtagagaattaagcaggatgactcctttttcagtcaggatgaattacacctcatygttattcatttgaagcatagatttaggaagaattttaatcatattatatttttgcagcatttatgtttttcaaggctttttcacaaatatgtttaaataatctcctaacagccctgtaaagcaaatgactatgtatagacaaaatatggagaaatagaaagaactatgcattgtaggaagtgagaagccatccagaagaaaaacagactaatagcaccttcttaacttcgtctatttgtcagccttcaaccaaagaacagattggatccatcacagcttttgtaatatcccataagaaaaggcataaaagagagaagtatctacttccaggttggactattaaaagcatattatataataatgttcaaaatgatggaaatgtaattaattgaatcattttttaacggagtacaatgtactcattcaaaatgaggatatatttattgacacagaaagatagaaaaattttacaaaaatgtatgtaaagtgtgaccttgttcctgtaaaatatgaagtctagaactttgtttataaaaatcttaacagggattatagagggtgaaaatctacatttttctctattcatgcatctatttttctaaaaataatcatttttacctacagaattaaaaaataataagagaaaaaagataagttgtctttatactttctcatctagactttcaatacttcagtatgaaaatacatattttagaaagaataaattgtagtgtatgtttaaatgtatcaaagccctctctcatctcttttataattttttcctcacagttactttgtgaggagagccagaaaaatattattaccattataatgtaaatgagataattataacatatgatggaggaaatataaggtgggagttaagagattacatttttgagaagttcagagctatgttagaatcttggctgtacaactttttagacatcctaccttggaaaacatacctgatgtctccatgtttcaatttattaagtcataaaatgtgattatcttataagtttatggtgaggactgcaccatatgtacctagagcagtgtgttcttatgatgttgataattgttcttttagcataaagtgttgacgtggcaagattcataaaaactaatcagaaaaagaactcaaatattctaccttattatgcattcgcaatgtgtctataatattcaggcttaggacttccagctccagcaaaataaccctgagaaaaatgaagaaatctgctgttttgaagtcccacttagagttctggttcactgaagtgtacccgcaatttaagtgtgtgcaaagtaggtcagcaaagaagtgaactttgaagtccagttttacctagttgctcctttatatgggttcagggtggttggagttttgcagcagttacatcaaggttaagaagaagcatgttttggtctattaggtggtcttagtgaggaactcataagtctttcctaactattgctataacttctcataggaggctctgaggaactaaactcagggaacaatagaacagaaatgacagtttcattttattaataaatgcattaatgcccagtgccctgctgcataggtctttagaaaaaattgagttgggacatacgacttgggcttcaggtttgtgtggcatttcttaattctaaatcttgatcttccatctaagcaaacaaaagaaagaagtggcagaagagatggaggacaacagatatgagcttatgaaacaggagtgagcttattttggtgtggtagggctgagtacctgraagagttccaaatctgaatcctcaaaacttgtgaatatgttattttttatggccaaaaggactttgaagatgtggttatgttaagcatcttgagatagaaagggtatcttggattatccaggtgtactcaatgtcatcacaaggattcttataagaaggaggcagaagaagtcaaggtcagaggacaaggcgatgtgacaatgtgataaaggaagcggagactggagtgacacacattgaagatggagaagaggccataagtcaacaaatacaggcagtcactagaaactcaaaggcaagaaaatgggttttcccctcagaggctccagaaagaatgccacccttgactttagcccagcaaaacatatttcagactatgacctctagtcacaagtaataagagaataagtgtgtgttgttttaaatcactaagttcttggtagtttgttacagcaacaacaagaaatgaatacaattgcccacacagacttatgcagggaggaggtgacaaaaagatagaaagggatctggcccaccttatccttggaaggcaggttccatttcagcttatacactttgcatctggagaaaaatgtcgagaaaggttaagcttggtgattccactcactgctaagtacaacccagttggtatttggggattcttgttagaaagggcagagtctacctggacgtggattcaaggttcagcagtctcccctttttcatacgggcttcatctgtatcacagtaacaatatggcttacattaacccaaagattaagggaaagtagcactgctataggccagggctttcagaaatgggacacctcatgaagcaaaatctccatattttactggatgcggactatatcaaaattgatgcacacaacttcatgggactttctagatgcatattgcttttctgattataaaagcagtgcccatgcactactacctgtgcatttacacagattaaccctgagtcgcatttaatgctttttattctttcaaggataatggttgaaattttagtaacagtggagtacaattaagaaaaaccctgttatcactctaactgggcactggcatcaaagaacaggagaaataaagaaaaaagtaatttttaaaaatttttctgaaaatgcagatttgacatggcttttgaaacttgagcattatgctatttctatttaaaaggtgagattttcctttgtgtttgcagtctatattttcatcacactgcaagtggctgagtctctacggttccaaacaatagctcaacttgtacctttcaaaaacattcttaggaataacttagaaatgggttgtcactcctctcctcaccgccaggggtggtcattagctgaacttactgaacatttggggcagtagcaagcactttgatggcagtacaacctgcatgcaatctatgggtgtttttggacagaaggcctcaacyagaagccaaacagaagttgtgttaatactccccagattaaaaagaaaagtttttgttttcgtaaagttcaacattcagcatgtctttgtctaacagaatcacaatctggcttagttgtggagtgctattttttcagtcccaaccagacattcttaaacagagattcctttaaacaaataatttgcttctayatattgtaaatgtaataatgggagcaaatatatacacagatccacacacagagagatgttattgtgttgctgatacaggaggagttaatttgagtcttttcacacattgtgttatacacataaagaaatgcttcaatgtgacctgaacatgaatgataaatctagatccgaatttatctagtgtgccttcacctggccacagacacagagagccatctagtggtctccaaaatacagctttaggctgaagcatcctaggaatccagtctcacaagacaagaaaggattccaagcagctattacttcattcctggtcttttgactgtggaaaatgtagattaattcaccaaaaagatcttcttctgccttctactaagaagtttcatcaacttctgctgtactgccagcctatctataattgcagttaacaactataaagtaagatatctcaaaatgtgtccagtggggttgggagaaaaatgagataaagtcttactaactttagaaatgtagagtcattaattcttagtagctgtatttgctgtcactttcattcataaggaaagataaagagatgcagccattttattgtgctaagcacatcatttattcctttatttctgattataaaaaaatctatgctctttgtggataattctaagatttaataaaatgccaaagaatccaaatcacctataaatacacaaccaaaagatctactcatatatgtgtgttataaaattggggccatcctactttatggatttccctaacatattcatacattataaaccgcttctcatatcgcaaatatttttctccattatttgtaatggctagatagtttgcytttgaatgggttatttcttggtttgtttacctagcccttgctgtttaaaatcagatttgcttccattaaaaaagaaaaaacactgttaccgaagggattttactacactcatcttarcatttttgtagttacttgtgctgcagaacaccctctacttgagttttgtgacaccgtcattgttttccttgtttttttcccctgtcctttcattgtcttttactgattatgcttcttgtccttgatcccttataataatcaccattgtactgtgctgtctaatattatagcctctacccaaatatggatacttgaatttaaawtaagattacataaaatttgagtcagtttctcaagcacatgaatcacatttcaagtgtttaaaacatcttatgtaccccataaatatatatgcctactatgtacccacaaaaataaaaaactttttaaaaatttaaatttaaatttaaaataaataaattttaaaaayataaattttaaaaatttttaaataaaatatttttttaattttaaataaaaatttttaaatgggaacatatgggtagtgacttctatattggacaacatagatatagaacattttcatttccataggaagttctattggattgttatgtcaaaggatgttctgttgcaaaggaagagaaactcccaccatgaagctcaaaagcagggaatttgtgctgaaatcttacaggaaaatgacatgaaatagaaatgcatgaagtatagctgagctgtaccaccagaaggtgtttgggtagcacctctctttttcccttgctctggggcccaatggctcttctctcagtttctcacttcacatctgctacaaactcctctcgggataccagctgattcttctgccttgccatagcttctccatggatgtggttcttatgataggacttagcctgactctatatgactttacaactctaatcaatttatctgactacatttcttatatctcttagttcaaattatccagatatctgattggtttaacccacattggtttcccctcaccccaaattatatgtcctcccttaatccaatcagaaaggcccagattcttaggttgcatgctcaatatgagactgactgaaaatacagcagtaaataaaatagcaaagcccaggctctcaaagaactcccattctagcagggaagatagaaaataagacatgcaaacaaataaatacgtaatatattattattagacagagacaagtgcaatggagaaaaatacagcagaatataagattagagactgactacagatggtaaagtaaggtctgtctgaccatggcatttgagcagagaatgaagtaaggagtgacccataaaatcttccaaggaaggagcattgcaagccaggccaacataaaataaaaagaccctgagataggaatgagcacagtaataaataattgttgaataaggggactattcttagtactatccataacacaatttttagtgggcactgtttcaaaggaggtatcaatagtgaaccaataaccagatctagtacaccctttcatacaggccttttccatagtgtcaactactgaatttatctctttgtgtgtggcaaggccaggaatttctaacttgaaattgtggttatatctccaattctcaccttaagytaaaaatacttaaagatgtcttgaaaaagtgtttttctcttacctataacaagacttttcataacatctttgacttctcccttttcttgttaccaggttctgttgctttccttcatatatttctcatagccccattcttccttcttattgtcacattaccttcttgcatcaattcttttgaatagccttttaatatctagcttctttccaccagaccattctgcwcactgctgctagataaattttcttaaagcaatttttattctttcattcattcaagaaatacttatcaaatataatgccctgagcttcatgccattcccttgctcaaaaacyattttactataataatattccctttctttttccatgacccaacacttctgtggggtgaaatacacaccttaataacaatgactcactacagcattaattcacaaaattggagtggggtgtgccacactcaagaaactgtattaaattatctagattttgagagtataattcaataaagcattccatctcctactgacatgccgagattcagacatgttccccataaagccagagaaatataggttaataatcatcagcaagttatagaatctggccctcaaggccatccacaaacatgtactgtattagttcattttcacatgctgatgragacatacccaagactgggaagaaaaggagatttaattggacttacagttctacatggctggggaggcctcagaatcacagccggaggtgaaaggcacttcttacatggtggcaactagagaaaatgaggagaaagcaaaatcagaaatccctgataaacccatcacatcgtgtgagactcattactgagaggtgacagcgtgctggcagtcctcacagccctcgctcgctcgctctgggcgcctcctctgcctgggatcccactttggcggcacttgtggagccctgcagcccaccgctgcactgtgggagcccctttctgggctggccaaggccggagcctgctccctcagcttgcagggaggtgcggagggagaggcgcgagcgggaaccagggctgcgcgcgcaggtcagctggagttctgggtgggcgtgggcttggcgggccccgcactcggagcagcgggccggccctgccggccctgggcaatgaggggcttagcacccgggccagaggctgcggagggcgtactgggtcccccagcagtgccagcccaccggcgctgcgcttgatttctcgccgggccttagctgccttcctgtggggcagggcctgggacctgcagcctgccatgcctgagcctcccacaccctcagtgggctcctgtgcggcccgagcctcctcgacgaacgccaccccctgctccatggcgcccagtcccatcgaccacccaagggctgaggagtgcgggcgcacagcgtgggamtggcaggcagctccacctgcagccccggtgcaggatccactgggtgaagccagctgggctcctgagtctggtggggacgtggagaacctttatgtctagctcagggattgtaaatacaccaataagcaccccgtgtctagctcagggtttgtgaatgcaccaatggacactctgtrtctagctactctggtgggaccttggagaacctttatgtctagtccagggattgtaaatacaccaatcggcactctgtatctagctcaaggtttgtaaacacaccaatcagcacccagtgtctagctcagggtttgtgaatgcaccaatcgacactctgtatctagctactctggtggggccttggagaacctttgtgtccacactctgtatctagctaatctaatctggtggggatgtggagaacctttgtgtctagctcagggattgtaaacgcacccatcagcaccctgtcaaaacagaccactcggctctaccaatcagcaggacatgggtggggccagataagagaataaaagcaggctgcccgagccagcagtggcaactggctcgggtccctttccacactgtggaagctttgttctttcgctctttgcaataaatcttgctactgctcackctttgggtccacgctgcttttatgagctgtaacactcaccacgaaggtctgcagcttcactcctgaagccagcgagaccacgagcccaccgggaggaacgaacaactccagacgcgctgccttaagagctgtaacactcaccgcgaaggtctgcagcttcactcccgagccagcgagaccatgaacccaccagaaggaagaaactcctaacacatccgaacatcagaaggaacaaactccagacgcgccaccttaagagctgtaacactcaccgcgagggtccgcggcttcattcttgaagtcagtgagaccaagaacccaccaattctggacacattactatcacgagaatagcatgggaaagactggcccccatgattcaattacctccccctgcgtgcctcccacaacacatgggaatccaggaagatacaattcaagttgagatttgggtggggacacagccaaaccgtatcattctgccccagctcctctgaatctcatgtcctcacatttcaaaaccaattatgccttccctacagtcccccaaagtcttaactcatttcagcattaacccaaaattcaaagtttcaaagtattatctgagacaagacaagtcccttctgcctatgaaggtgtaaaatcaaaagcaagctagttacttcctagataccatggggatataggtatgggtaaatacagccgttctatatgggagaaattgtccaaaacaaaggggttacagggcctatgcaagtccaaaatccagcagggcagtcaaattttaaagctacaaaataatctcctttgactccaggtttcacatctaggtaccgctgatacaaaaagtatgttctcatggtcttgggcagctctgcccctgtggctttgcagggtacagcctccctcccagctgctttcacaggctggcgttgagtgtttgcggcttttccaggcatatggtaaaagctgttggtggatctgccattctggggtctggaggayggtggccctcttctcacagctccactaggcagtgcttcagtagggactctgtgggggctccgaccccacatttcccttctgcactgccctagcagaggttctccatgagggccctgaccctgccacaaacttttgcctgggcatccaggcattactatacatcttctgaaatttaggcagaggttcccaaacctcaattcttgacttcagtgtacccacaggctccaacaccacatggaagctgctaaggcttggggcttccaccctctgaagccacagcctgagctctatgttggcccctttcagccacagctggagcagctgggacacggggcaccaatgcctaggctgaacacagcacagagaccctggcattttcctcctgagcctctgggcttgaaatgggaggggctgccatgaaggtttctgacatggcctggagacattttccccatggtcttgtggattaacattaggctctctgctacttattcaaatttctgcagccagcttggatttctccccaaaaatggatttttcttttccactgcatcatcaggcwgcaaattttctgaacctttgtgttctgtttcccttttaaaatggaatgcttttaacagcacccaagtcacctttcgaatgctttgctgcttagaaatttcttctggccagataccctaaatcatctctttcaagttcaaagttccacaaatctctagggcaggggtaaaatgcctccagtctctttgctgaaacataacaagagtcacctttgcttcagttcccaacatggtgctcatcttcaactgagaccacctcagcctggaccttattgttcatatcactataaaaatttttgtcgaagcctttcaacaactctctaggaggttccaaactttcccacatttttctatcttcttctgagccctccaaactgttccagcctctgcccattacccagttccaaagtcgcttccacattttcgggtatcttttcagcaacgccccactctactggtaccaatttactatattagttagttttcatgctgctgattaggacatgccccagactgggaagaaaaagagttttaattgaacctacagttccacatgtctggggaagccttagaatcatggcgggaggcaaaaggcacttcttacatggtggcagaaagagaaaatgaggaagaagcaaaagcggaaacccctgataaactcatcagatcttgtaagactcattcactatcactagaatagaatgggaaaactggcccccatgattcaattacctccctctgggtccctcccacaacacatgggaatccaggcagatacaattcaagttgagatttgggtggagacacagccaaaccatatcatgtactctttccaattcatggcattctgttgagatataggtacacagaaagcacagaatttcttttgttttacttctattttaagttcagaggtacacacgcaggtttgttacataggtaaacttgtgtcacaggagtctgttgtacagattatttcatcacccatgtattgagcctagttttcattattttttctgatcctctccctcctcccactcttcaccctcyagtaggctccagagtctattgttcccctctatgtttccatgagaaagcacaaaatttctagaaacagaaatgtgtgtatgattttttaatcaatacatataaatcattatattaaaaagcatttttctattatatatctatatggaaagacggatatatacccaagttgtcacaatttgcagatgaattatgctctaattcaaaattgatttttccattgaaacaatgttatctgttcttgttaagacctcaggccaggcctcaaaagcctatttgacccattgtatagcagagttctggtattaataattctatagacactaaacatcatctgtaacagactctttctgtttgagaccaaggggatatggagtcgggaggagaaccagagacctgatttcaagtttggttttagaatcatctgtagagctttgggaaacttctctgagcctcagtttataaatagtcattcattaaactggtttttattgagagcctactgtgccatttaaaaaacttaatacagacttcagtgaattaatacacataaaagcactttataaattcaaattttaaaaatagatgagaggcattgttattgaaacatcttcaggaaaacatactcctagcttcaattctggaaagttaggacctatcttccttggtactaatttggcaacaggaacaacccacccttgtttcatcctcctgcaatggaccaacacagtcaaactgtaacttctaaatggtcagcagcagctggaaggggaggaaaaaagagcagggtttcataattcccaaacggggacttaaaaagtgtgtttatcttggatgctcccatggtcagggagaagaacccagggtgctcggctgttcaccttaggcctgaggaggaagaagggaagttggggagccatcaggataggaggactacagccagaacacagatgagaataagagacacttgggaagtcaagtattaaagctaggattgctagtttatattcataaaaatatattagttaagatttaagattgcatcagtttctaaatagtactgggtagtgggttgaaatactggaaatgatcatatcctattcataacctatgaagcttacttcattccaactctgtctttaacacttgcagggcagcagccacttaaagtcctttgcatctccagctttcagaactacttcaggatttagccctgagctcaagccaggggaaccattaggttctccttgcagaatgagagggggaagtaactctaggagagatcagtaataaatcagtaagcttaaccatggccataccatctctgcctacagtatttcaatggctcctaactgacttaagaggccattgaaacactgaaatttaaatggcctcctaacccatcctttaccaccttttttttttttttttaagatggagtctcacactgttgcctgggctggagtgcagtggtgcaatctcagctcactgcaacttctgcctcccaggttcaaacgattctcctctctcagcctcctgagtagctggaattacaggcgcatgccaccacacccggcgaattttgtcgtatttttattagagaaggggtttgactatgttggccaggctgktctcaaactcctgaccttgtgatccgcccgcttcrgcctcccaaagtgctgggatttcaggcatgagccactgcgcccggcccaccacttctattctcttgtcccagcttctgtcagaaaragaatcggtgtactaacctgcttaaacccctaaatggcagcagtatgtcccaaacttcaggcattcagttactgccctcataatttttgccatatctctgcatcatctactgctattaatgttttaaattaacttgttgttttacctaaataaattcacttttaaaaatcttttcatgacaacattaatgaaataccagtaccatttgccataaatagaaattaactataaaaataaatacacaataaaaactaaacagttctagctaggtacccttgcctgcctgaggtctgaatctgagtacttttttaaaagaggaaatttctaggtgctataaaagtgttaaagacacgctgacaccaaactgaggctttctgcttaagtaaacagatggattaaatgctaattgaaaaggaattaagtttctcactatgtgattcagtgttatattaatgtaaagtttctgaacaacctaaaatcatctcatgaatcacctacactctgccaaacagtaacctataaggtgaattctaagcagcttagcgtagcattcaagacccttcattatctgatcctcacatcactcctctcctcatttattcttcatactaacacttgccctttgtactttgtgctccagtaatgcctaaatgtggaatactattccaagcatatgcacatgttgttctcactgcttggcataccattttcccttgtgtctgcctgaaattcaatcttcatcctttgctcttctgtgcatggtacactggccactctctccctaccatgattracaactttcacttctatgtgacttttctacggtcatctttctagatctgtcatacagttatgtaattatttgttaacatgtgtctctctcctcctctctcactagaccaaaccctgtgctcctcacacaatgtctggctcataatagatgctcaatgactattggttaaactgaattaatggtccactttcattcattctagtgtaactgctaaatcacacctgtggaaaacccaccatatgtcaaggtatggtgatgggaacctaaaagagtgcaaggccctgtgaaaragggtcctcattcactgcggtggacagaactcctgaccacctagaatttaccatgttataagatgtagaacaaagctggaaaagtaaggccttggggaaattgattttgtaataaatagaaaacctgtttctactaccctattaaacttttcctacttccttcattctccctaaatcatttccaatttgccacagaccacaaatgacagaaagtgacattgttctcacatctttgaaccactgctttcccaactcctcattcacctcttctgcgaatttctctatattttgtagccaaasattcttgacatttaaaattagagaaagtcaaagttgatgaaaagtaaatttactggaaataatcatcagtgagaaaggaaaagcctggaactgtattttaccttgttatctcctgtcaaacaaagtatcgggaaatcagacaagagttcagatcttggtmagattagccaagtctattcctaacttcctgttttactcactgctcatccgtcattaagtacgactctttaggtttcagccgccgggtgtggtagccatctgtttgttagcagcacccagataatttcaaaatgtagattcccagatttatcaaatcagaactcctgaggttggagcacagaaatctatttaaaaagcaaacaaacaacttcacacacgatctgagtatcatttgttttttgttttttggaccacattatcctaagagtgtcatccaacgtgattttcaaaatgtgaccaggaaccacctgggaaaaaaaaatcacatttggtagtttttaaagtatagaattttarcctcactgaattccactatattatatgctatgacctcatatatctgttttctttttaacaaactcctccagattattcatatatgcacagtacagtttgagaatcaatgacctggggcagaggtctccaactcagatgccttctagaggccatgaaggtaatggaaatgtccaaaacagtcccaaataatacagtagggagtagtgatatcgtatgtcactgaagagtgcctggcctttctacagcagccagccagctactactcagctgcaaccagctgttactcacagggaacattgccagatattctgacttttcaagggaagccagactggatttttttaatgtaaaaatccccttaaatgttgacaacttactcactttttaaaaaacaaactgcatgcctgctagtgctggagggtcaccagttcaacaccttctggactaggaaatatcaagggatttgtaaagcagacaagtattagccagaaacgcctcactgcctggctgagtaatggaagatggcataggataggcctgtaatcataacarstacagttcctttaaggtacagctagaaagagctagaataagtatataatgtaaaggacaggtggataccctcatgtgaaagcaagagacaagaaagaaaaaaggctctaaaagataatgaatataatccattctattcataacatgcccataaatgaagtttagaaaaccttactcataaaatagaaataatgagataatgataactactcatagtgtttgaggtattaattaaatagaatagcttatatcaagtggattaatgacagcarctgacatgtaatatgtattcawtttttttaaatgtgagttctttattttctgtttcctcaggcttctgttccctcacactaaaattcaagaggcactaaagaaaagcaatctcatggcaaaaagctaacacactttcttaatttccatgtgtgtgtttaaaaaaaaactgacatttctatgtgataattaacaagattgtgatgacaaagccattcagtcccctcattgtcctttcctcyaattctgctcttccttccactctttagtgtttccaaattccatgcgaaaaaagttgctaaataaatggacttgagaattcttctggatgatttggaaaaagtggataaagtctgggctacattgctctagaaagattgctttcattttattgcattcttgatatatctacttttttaaaatataataatttgtatataaaaacaatgtaatggtgatgtttaaaaatgtatttacaaggcaaaagattcacagtttcaccaccttaacatatatttccttccaatttttgtttttctgggaggttattgttttctgttttatttgccrttgtaattcaagggtctattacactgttttgctcatagtaatcactcagatatttgttaaggaatgaatgaatgaactcctgaaattgtcatgtacaactgactttgttttctacttgctcactttcattatgtcatgaaacttttatgagtctccacagacttcaaatgaatcatatctctctacctgttttgctgattttttttctaatgataaaaatcaaaaaaatgtgaaactttagaaaagaaattttaatcccactatccagagacaatcactcttaatttgttgagatattttatcctagcatttgttacataaaactttttctttaaacatggagaattttgaactcctagccttaagatgctcccattttcagcctcccaaagtgctaggattataggcatgagccaccatgcccrgccttaaacatggagaatttctatttagattatttcatttaatatggcattgccagtatttcccatgtaatgggacgcccatggtccacccacaccattattttattaactgcttattattccaggctcttggatatgcatagaatgttsacattttctttttttttttttttttttaccatttttgtcacaaaatgtcccatgataaaggtctttattcacaggctcttatttccttatcatacattcctggaagaggaaaataatactagttgattgaagaatgtccaaggatccttttcatattgagtatatgaatggcatattttccacatccttatgtattccagcctgtctttgttatttttcttaaaaataaaagacagattgacagggcataaaattctttcccaaataaactcacttagatatcactttatgatcattggacatttaatgtagcagaactgagaagcccatgatatttacatttatccctttgaagatcacctttttagttttctttcttccaaaatatttgacagtttttctaattaaaacattttgtcagacatgtctatgaatagttcatttgcattgattttgtcaagattaatttgggtccatcaaattgacattttttttaatcccagaaaaaaatttatcttgatgtatttttcactagcacttctgtttttgtaatggcttctttcttaggggcataattcttaggttggggttctcttgtttatcccctatacatcaggtggccaaatagtttatatccaaccagaaaaatttgaaaatgaaaagggagaagtgctaataactacaggggacaataggaataaaagaggagctgtctgagttctaactgacacacacagccactttcccctcttttctctcactatttatagttgttgatcsttttgttctatatcctgtaagattttcttaattttgtcttccacttcactaattcaatgtttgcaatatttgccaagctttttatgtttccaaagcataatttgaaatctattattggatttacttttcctgtttctttccatatcacactttcttttcattccatcctattattgtctatctcagcatgttctctagtgaatttttcatgtttcataaaaatcaaattatcctgcttgttatgtaaatgtcagggtttttcttttccaattttcttttggcttctaaagtaaatcgttttcataatgcgtcctttattttctttgccttgttctacagcgtttagtttctttgcctttttctataccatttgtaagggcccatgttgcttccttgttttgtttttaatttttatttttcagaaacaggatcttactctgttgcacagactggagtgcagtgccacartcagaattcactgaaactcctgggctcaagggctaattttttgtttttactttttatttttgttttgtagagatgggggctccactctgttgcccagtctggtcttgaactcctggcatcaagcaatcctcccacctctgcctcccaaagtgctgggattacaggtgtgaggcaccatacccagtcttggttttggttttaattggcgggaagaattcttattctaaaaacaataaggaacccatccataccctctgtttaccaaccaataggctacttggactgcaccgtctaacttaggattcacttatgtgctagctaaatccccttctaataaatgcagatagacactaagttaccaagcacattgcctaaaccaaatcccagttgtcagcagccatcaggcatgtggtgtgattctggtaacccaagctggaatttatttatcctctgctgcattgctttctgatacacagttcctctacctagtcatcttttactgaatacatacctaggctctatcctagacttcctggttcaaaatcttagaaggcatcagcttgtgtatgtaacaaatttcccaggtgtttctgatatgccctttttgctgggaatcactgatctgaaccaatcaagtacatttaaaaataacacagctgtcagttccatgtctgctggggtgaatgtctaattcttctacctcctatggtgtttttcctgtgggaattaaacctctcccaaacacgttcttcttggagatgcctayattaaataataaaaatgttcatcagggcggagaagtgattgaatgtcattctgactgccccagaaagcagagcccatgcagtagaggagctctagtgacttttccaattgaactaaatggccgaaggaaagggatggaagtctttaaaggaattaagagccagaagacccagattacctgggtttgaatcccatctctgccaattactagtggaatgcaatgattaagtcacctaagctctctatgccttagtttcctcattcacaaagataggaatcttaatcttaatcttttctcatcccataagatagaaataataggatctgtctcattgagttttaataaggattaaatgaaataatttctatgaagtgttaagaattgccttgtccataataagtgtttccaggaatattagttatatcattgttacatggaataacgatctcatattttttattctgtttccactagctggtagtttgtgcaatatccttctgttctagcaataagctgattattagtagatgtttttagagtggtgagctttcatatttttgtgtcttatttgatattttactgggaagttgagaggcacttcatcagatcagttcctgcattttattggaatcttatggatgagttctagaatggtgatccatcactgtaatttggggttgaacaagaagtcagtcatttcatttccatccaggctttcccaccatttcctactcactgccttgtctacctcatttgttcttccacttagttctgtaacwttgaagcagctctgaagtacagtgaaacccatgacctggtttgaagctagtgaagtccaggaagaattgcactctgtagttcaaaaggctcttctgggtgatagtcattaagagagaaatttagtgcaaaatcaagatctttctaggttttccaagtaattaattaaaccatcagatagtaagtgtattggtgagacttagtcagttatttgaagagtgaaattttaatgaaaagaattgttaattaagtacaaacttgtcaattaggtagttggaaggataataggagaactttatgatatcgtgaatttaaattctccaagcagttgccattcattgagctgaggaaagaacaagagactggaaatagaaatatttagaggcttagaggggtagccccataaagctgaaattcaggcatctgaggaaaaggggtgttgctcagctggtgatggaatcgttgagctccaaggagggamcctaaagagctcaggttcagacctttaccctgctggttgatggtatctccgagggcacggaataaagtggttctacaaatattgaaaaatagctactgtctctcattaaagattttttgaaagtcgagacttggagccttaattatcttagctctctagtttccattcacccacccctactctgtccagctttccaatgctcatttcgctatcaattatctccagttttgaaagacagcactagattccgccactgccctggaaaagaaccactaacaagttgaagaagtattgctggggtgatgcttacaggaacctagagcagtcaggtaacccacagaaagcaaatcaragacagaaaagacagacaagaagcagcaaaccctttctcttccttcagtcttgcagtctccccctagtggcctctactggcaaagcccaccagaaccagaaacgtaatgggtggaatacagtagtctcccctcttcaaggttttgctttccaaggtttcagttacccatagtcaaccgaaaataaacaattcataagttttccattggacgctattctgagtatcatgatgaaatctcccaccgtcccaccctgacctatcgggatgtgtgaatcatcccttcggtcagtgaatccgggctgtatgcactacccgcctgttggttatcagcatcatctgcccctgacatccaaccatagatgtcatcatggctcgatgatccaggatctcccaaagcagatggtcctcctgacatatggtcagaagttcagtagtagcctaatgctctgtgacaatgccaatgccattcacctcacttcatctcatcacatagggatcttatcatcttacattatcacaagaaggacgagggtgagtacagtacagtaagatattttaagagagagaggccacattcacaaaacttttattacagtatattgttatattgtcctattttgttattagttattgttattaatctcttcaattaatttataaattgaattttattatatgtatgtatatgagaaaacatagcataactgctcagagctgtggagactgcaattttccaattcatctgaactaaacagtcaaaatcagacaattcaaactttagaagaaatctattaatgtgaatgatttgctttagccatctgctttgtcattcagagtgcctaaaaccatgtctggttgccagtcaactctgtaccacataatgttaccataattgtttggcaaaatttctacctgggatacctcatcaccagaggttgacttttctcagtcgtccctcccttaggaaagcaacttgagtaaactgattatataattttgccataaatagaaatccctgagttacaacatgaatccacagaacagggtggaaattggaaggtatcagcctattgcagatctctaaactagaggagatctccatccaaacactaaattcttacccttgaatatggacttggggcatcagtcatctgccaaatcttaatatatacattgatgccactgatgtctgcaaaagattaccagtatttgcatatacttgacattctctatacaacaagtgaatttttatgttaatttgtrtgtatgcatgagactcagtaagaattctccaaaatagaaagatttgttggaataccaaatagctactatctgtcatttaagattttttgatagttgagacttagagccttaattatcttagctccccagtttccacccacccatctctaccctgcctagactcccagtgatcatttacctataattacctctcctgttcttaaagactgaactgatactgtccatacttcaaatctaatctctgtattttcttctcccggaccccaaaatcactgagattcacccggagttctctaaaacaggatttccaggaaaaacaatttagagaataacagtaaaagagaccaattttatgtagaataggtttacgttcaaggcatccaagcaacactttttgaaatgttctttaagccatcatgttgatagatcataaaatgacatctatcattctctgagwctttcataactgaaaaaggaataaatgcagtgtagagtcaggctagagtgtttcacttccttggggccttgggtacttgtataataatttttaaaacatttttgtacttgtgtaataaaaataatcactcaccttgatatgcattttacaatttgcaaagtaatttcagtcacttaaccttgcatatacgtaaaaacctaaaacaactttgagaggaaggyattattctcccaaattacaaatgaacaaactgagcgttgggtaatttattttaccgagcaagtaaaaaaataaaattttctgattttaagtccagttctctctcctctaaatcactacagatgcagaggtccttctgagaacttagacggcagcgtgagctgctacaacatcaactatggaattcgtaggtcctaacttccctcctgacacattaataaccaggctctgctgcctccacaaaaccaagtgtattctaccaaaggtcccataagcagaaaattgtactctgtttcaataaatggtatattttttaaagctgcctttagattacccccttagcaccttgaaactgtatttattatcatctgaagctggtgacatagataaataatgaatcttatttcttaccagaaaaggtcatttgaattttctgagacctatttgacctcaaatacacattaacatatttatcattagcttcctttatcatgtccggcctctagaaatgggtaagcatctcatcttcctagaaaaattcaatttcaaaagagaagaaaaaaaaaacaaagagttagaatacaggttatggctaggaaaatgtgagcaggctgtttaaagagtgagtccattgccaagggtcataggaatattttgaaattgcctgtgtgttactatcatttagaatcctttccaaaggtttctgaaaacatttacaagagttaaagattcaatcttgagctttctactattgtgtgggatttataaaatatgtcctatgacatattcatatgttggaggtttactgcgaaattttatgtgacagtctgcaaagttactttgaggacttttgataaacatctgggagatgttagcatagaccttataatgtgaaaggtagatgctcactcatctagcataaaaatgtcaggctagccatagaaacgcataagacaaatcactactccattatttctgaagatttatgctttgaacaaagatgataaatttaattctggatctcttagccaaaatgacccattaccatacttctattatttctataatataaacagaaccctatcatggtagggatcatatacgtatttcctagaccacattaatatctatgaccttgatctcatttggggggttggccacaagacaccatctctcctttcatatagtgctttctactactatggcttagcaatgctacaaaatagtcccctagtgccaatggaagaaaatatgctgtaattggctttatctataaagctgtcacaaaaaccacattatcttattcaaaaagatacataaaagacgtataattccagtctcctcaacactggacaacacattgctctgcataaataatgttaaattcctgagaatcatgaagtctaatttactattcaagtcttaaaatcaagatcacattagttacttagtgatccattgactactattagcgttcattcactgacagggcctcaggacccttctgattgaaaaatattttattctcagcaactaactcattttgcactcttcatctaaattgtagcattgttctcattctccttttttctaagtctattacatatgtggtgcttccatagactggcccttaccccccacagacctttttgcaatgaggagttctctttttttccccacttgataatcagcagggtgcaatgagtcaacattaaaaggaaagcctcgccaaagaactatcaagggagaagtgagcaacttcggccttcatgctcctttccactcccctccctagcagaaacattaagcttgaagaattgtagcaatggcctttcccaggasaattctgaaagggagtattccaaaaaggaagccaaacttcgctatccactaatcccaaatcctaattccttaactgtggttgcttgccacaattaagggtacaaataattgtctcaatattgtcttaaaattttaggcatatatagtgttagaaatgtctctgttattactgggaacaatgataaaaggctaaatcaaaacaaaatcaatgttgcttaaactatagagatgagtgtattaaaaatagtttagctttaaaataatatgacccccctctatattcatttcttacttctcagaagctgccaatctggaatacttcagaggacatatgaagaaggcattaccagggcaaccaaaagggaggtttttcttgactgtgccaaatgtatacagcatcagataataaagtagccataaagaagagcagtcaaatggatgcttttccgagttggatttggattctatcatttaagcttattagatataaacaataattggtgatagtaaatttatccagccagcatgtctgcagttcagttcattacaccattatcatggacaaagaagtacagacatttctgctgatgtagctacaaccctggggctacttacagactattgtgcatactgctacactccataagaaaaaatacttactgctgggaaattttgcactacatttttaacctgctgtttgcacagttgacatttcaacatcatgattgtttactctcctgggagatactggcatcttttgcaaattttagcggctgttgaataattgctgttaggatgttttttgcttctcatttgctgatttagtctcaccacctcrttacaagattgtggtttcttttctgaaatctgtgagtttcatttgaaagtgagaagggaaaaaagggagatcaatctccctgacttgagagactataaaacctggtcatttgacaacacattcactctcattatttctctccgtctcccttgtgtgcaacgttccacatttttaggtaagggctggggtgaagaaagaaatctgtgttcaaggaacaaattgaagcttcctggtccatctgagaattaaatgaatggttgcttgaaaagaacctgtgatgacttcctctggtagcacactctagtgctcaccacctggacaatgaggaagtttctcctaatgaccagctttaaaaggggaggcactatttccctgaaatggtttactatgtgtcataaatcaaatgcagtaatgtcagtctttccagcaccctgattgcataatctgattctgatattcttaaatacctccaatccctttctaaacaatggctttatttgcaagtgactagaatgggtcacaaaagaatcaatactaatattgttcacatcttaaggttactattgaagctgtcagaaattcatgttcctcctgaagacagaccatggccacccatggaagtcatttaagtgcatctgacccatatgcatttgttctggcttcacattatgttaagcaacagcagagattgattacattgcaggaagtggaaaggtcataacaatgaattaactaccaaattgtcaatgaggcacctctatctgtatttctttgaaaaggaagttcaagtagtattaggtagggcagaacaaggctgaagggaataaaatataaattcattaaatcatttccatctcagttctgacatctaagaaaatcttccctgattccccagactaggtcgcttcttatatttcttactttaggtccatggaacttattattataattatgaatttacttgaaatgattcttgcttctcgttttttttaacagtctcaccagacagtaaaatgtaatgattgaaaatattgcctgtagagcttgattttgaatttcatctttgcttcttaacagtgrtgtggttttagtttcttcctctgcacaatggagcaactagtagttactacatcatagagttgtgaggattaaatgaataaataattgtaaagcacttaggacagtgtctggcacaccataaacatgcatccaataaatgttagctatttttctcactctatgaatgtgaaacgagagagaaatgttagctaattttttcactctctgatccccctttgcaggacgtgtggcaggggtgtggcttgtctgttcggtggccctgttgctcaaacccctgagacgagggggagcacgcagatgaacaggtgccggaacccaagtgagcgtgtgttacagtgtgctcctttagccttgtcatccagggacggctgttaacccccggattcttggccggcatcctggaccaatcagatcacacgaactgtttaaaaggtgatgaatgtggagactttattgagcagtaaatgtggctttcagcgggatggggagctggagtgggaaggtggaggcgggagaggtaatctttgcctggagttccgccgttcttcttggcggtcggcttggttcagacacctcttcctccttctctgcggcgctgccctactgttctctgcgctctctgcctccctcttctgttctctgcggctctgttcctctgctcttctcaacattcagccgcttgtgtgtgtgcccgctaaggtctcaggtttatatgggcacaggatgggggtggagaggcatggtaggctagagtggtcttggaaatgcaacttttgggcacaaaaacaggagtgcgtgttctcatttaggtctatgggcacaggcccaagggtggaacccttgccagggacctagcccttctctacccagcatttccctgcccccccttccttatcaaatgtattatcttattaatatctgcctcccttttgagactcaggaagacagagaacatgtctgttttgctcattcctgctgcattcccaatacagacgctcctcaacatacaaaaaggttacaacccaatacacacactataaaatacacataccataaaaatacacacatcataaaacatcttaaattaaattaaaatatcttaaattaaattaaaaatgcattyaatacacctaacctaccaaacatcattgcctagcctagcccacgttaaacatgctcagaacacttctatcagcctataattaggcaaaatcctctggaaagattgcagagtattaactgtttaccctcctgatcgtgtggctggactgggtgctgcagagctcactgctgttgcccagcatggcaaaagagtggagagtattacacctcatatcactattgtgggaaatgatcaaaattcaaaattcgaagtatagtttctactgaatgtgtattgcttttgctacatggtaaaataaaaaaaacattaagtcaaatcattctaagttgagaattgtctgtatatgtcacattgcctagcacattgtggggattcaatgcatattttcagaacaaataaataaatctaaaatatattgcctagaaacatgagttaccctggaagtgaatatgacctcagacatcaaaggattgagttgggcctctgtataacatgacatgaagacatggaatggactagccctattttaccaggaatcctaagtaagactattttaggaaasatgatttgatctacaggatatccaattttgcagtaaagaactgtcccataatgatttttttttaataacagctaaaacgtctcatcttttgaagacattaactaaagcagcaagctgcttggatatgatgataatggtttctaatgcttagtaaataccgttgtttgccattattacgctcattttaaaggaagccctttcgcttgtgtttaaacaaaagaggaatacaaaaataaagcctcaaaggaactaaattagataaagatattagagaccaagatagagataagatcaagatggagatgttgatgaagagacagtagtggaggcagagggagtatcagactgggattgctcgagacagaggcagccaaaaagacagatttctacaggtcagccaaaacgaattaataataaaccccagagtaacgataataaataataagcccccaaaacaattccacaaggacaatttctgagaaatgcrttatcaatcaaaatgtgagctcttcagtagaaagataaattttaatgcatgatacagagacatcctgagtcagtaagtcagccaccaaatgccactgaacrttttcctaggtcctgagattatagtgaggaacaaatgtctggaccctctagggacttacagtttagtagtgaggaattgtttagcaaactcatgaagaactaagtaagataatttcagctattgactgtgctctgaggaagataaaatagtgtcataaaaagaaaatatgcatttgatggtgggtggtgctgtgaggagattgctaatgtcagggaggacagctctgaaatatgagctgagacctgaatgtgaagaaagaatcagccgcatagtgatctagaggaagaargttccactcagatggagcagcaaccaccagggtatgagacaggaactagcttgaacctcaaggctttgggaccacgtgggtggaataagtgaggtgagaacagtaagcaaggccagatcatttagggcagagagtaaagagcttgtattttgctttagttgcaatgaggaagctattgaagtgttttaagcaaaggaaaaatgtgaatttagatttttttctaaaaatcactctgcctgctgtctgtgtgtcaaactaattactgaataggcagtggtggaggcagggataccagtgagtctgtcacaatagtctgtcaccgtagaccaggtgatagacatggaggcttactgtacaagcaaggagatgatgaaagtgattgaattcaggatatattttggagtgaatgggactaactgatggattaaggagtgacaagaagaaaaagagagattaaaagctgatttcttcgtttttggcctgagcagttggtgtgagtgatggtgcagtcatggtgacttgagaagggctttgagagaagtgaatttggcaggggtatctagagtggggatagagaaaagaaagtaatacatttgtctggacttcttaagtttcagatgcctaacagcaaycctaaaggagatatcaagaatggagtccaatatataagatctctgtattgaagaataaggggtatagatgatatctaaatttagtgagagtgcagataagaagagaggcaaagacagtggcctgtggcacaccaaacttagagaaatgacagactgggaagaatcaactgctgagatcagaaaacaaggcctatgagactgagaagcctagaggatgaggtatttcaagagggagtgaacaactgtgctgaaaggtatgtagaggtgagtcatatgtacactgaaaatcaagcttttcagcattgatcattgatgattgttataaaagttgtttggatggatggtgagtttcaaggcctgattggataagaaaatgtaaagtgaataaataaaaaaatttttttttggagattagagtctcactctgtcaaccaggctgaggtgcagtggggtgatctcagctcactgcaacctctgcctcccaggttcaagcaattctcgtgcctcagccacctgagtagctgacattacaggcatatgctaccacacctggctaatttttgtatttttagtagagacagagcttcaccatgttggccaggctggtcttgaactcctggcctcaagtgattcgcccaatttggcctcacaaggtgctgagattacaggcgttagccaccacgcccagcgaagaaatgaagattttaagtatacacaaatctcaggcttgtactgaaaaaaaaaatctgtatggaatagaagctgaaggaggaaagtagatgatactaagaatatctgtaagctgatgggagatctcaggatagagagagactgctgatacagattccagaacaaggtcattggggaggtaagagagaggaatgaaaaaactcctaatcatctatataattgaaagtttgcaaaaattttctcctattctgtatgttgtctgtttactctgttgatagtttcttttgctgtgcagaagctctttggcttaattaggtcccatttgtcaatttttgcttttgttgcaactgctttyggcatcttcatcatgaaatctttgtctgtgccaatgtcctgaatggtattgtcaaggttttttgtctgtttgtttgtttgtttgttttyctagggttttygtagtttggggttttacagtgaggcttttaatccatcttgagttgatttttgtatatggtgaaaggtaggggcccagtttcaattttctgcaatggctaggcatgktctcacttacaagtgggagctaaatgatgagactacatggacacatagaggggaacaatacacacagcagcctactggagggtgggaggagggagaagatcaggataaacaactaatgggtactagacttaatacgtcggtgatgaaataatctgtacaacaaacccccatgacataygtttacctatgtaacaaatctgcacatcctgcacatgtasycctgaacctaaaagttaaaagaaagaaagaaagttaccaggcacttcagaaactaattctgggcccacctcacttagattcatagtaatctgagctttatttccctgtgaaaaaaataagcatttccaacatatacccttagtggcaaatctggggcaagaagaggggagaagtttcgcggtagttgtccatgtttccttctcccatcctccatrccatgagtaattgtgtctctaactccaagtaaacagagacctaattgctttctcttttatgcaaaatactaaggtactttctaggatccataatgataatagatgtgttattttagcatttaaaatcttgataaaacttctgacatctttctttgycttttcctttctcttaacattttcttctttatttactgtcatttctatttttacttcattaggataccattctatgtggattactgaaatttcagttatgtctccagttctataatggtacctcgctttagatagcagataaataactgaaaagttgacccaatattgatacattcttatattgaattattttaaatatatatcagtgttgagcatttaaacaaattctattttgaataattcataataattgtattatgaataatttataaagcacaataaatattttccacccaaccatctttagtataaagtaaatgaaggacacacattgagtttgcacatatcatgatttgcctgtatttccagccagtgcctcagacatgtatacacttgagcaattttgtgaattctttcagcattcaggtgccagttttctgattgacatcagaaaagatctgtgccacctgatagaatacgattttatgggaaagcaaatcataattactcttgcctctaggtagaaaccatatttgtyaacttggaaggaaaatgactcataaaaaatagacatactcttcagccaaaggtcagccttcttcctgtaaatctaaactacacatcaccatttacccatttattcattcaatcagcaaatctcttctgtgagtctgtcattttctggacactgttatttggaattttactatataaaacagcatctctgtcttctgaacagtccagggaaggagagagatgagtagactaataatgactataacatgtaataagttattgggggttgtacagagggtgatggggcagaagatgaagagagacaggtaatacaccttgagaatgaggcaggaaagggatgtttaaccgcataagaaacctgaacacagccttgaaagttgactgggagttgacgatgcaaaaaaaagaggcaaagcaagttctgggcagagaaaatgacttacctgtggatgtagaggcaagagaacttggagcatttggggaattccaagtttttttggaatggctttgaaggtcatcagaaactaagatatatttagacaatttaacaaacaggacaagaaacaccactgttgttcttcaaagaagataagcacracagctagaatacatggggatatataacagtctgctgtgatggctcatgcatagtctgggaagggaggcaagagatcctgagtcttcaggatcatccatgacccagacaagaaagatataaaataaatcatcagcattatgaatttagtgttttgagatgctagactatgatataagggctggttagcaattctctctttatccagaaatacagtcatgtgctgcataacattcatggaccacatatacaacagtgattctataaattataatggagttgaagaaaacctattaccaagtatttactataytgtttatkgttattttagaggttattccttctacttattttttttaagttaattgtgaaacaacctcaggcaggtccttcaggaggtattccagaaggcagcatttttatcatgggcaatgacagccccatgcattgtcattgaagaccttccagtgggagaagaggtagaggtggaagtcagtgatatggatgatcctgaacctgtgtaggcctaggctaatatctgttcatatctttatttttaacaaaaagttttaaaaaataaaaacaaattaatacaaaaaaacttatagaataaggatataaaggaagaaaacatttttgtacagctctacgatgtgttttatactgtgttatttcaagagtcaaaaaggttttttaaaaattagagttacattaaactaaagttaatttactattgaagaaagaaaactttctaataaatttagtgtaggccaggcgcagtggctcacacctgtaatcccagcactttgggagaccaacgtgggcagatcatgaggtcrggagattgagaccatcctggctaacatggtgaaaccccatctctactaaaaatacaagaaattagccaggcgtggtggctcgcacctgtagtcccatctacttgggaggctgaggcagaagaatygcttgaacccaggagcyggaggttatagtgagacaaagatcccgccactgcactccagcctggctgagagagtgagactctgtctcaaaaatamataaataaataaactttgtgtagcctaaatgtacagtgttcagatatgtttagataccattatgttgtaattgactacagtattcagcatagtaacatgctgttsaagtctgcagcctaggagtaataggttatactatgtagcctaggggtgtagtaggttatgccatctaggcttgtgtaagtgcacgctatgatgttcatatgatgaaattacctaatgacagtaccctcatcgttaagtgacgcacgactgtaataaggatctctcaaggtccctgctttctttgtcagtctgtgctcactggactactctaggaaatgtaataatagtctttggaaattctttccattttaaattctaaaagcttttgatgtaatatgcaagcatctcaaagaaaataacaccaatagatgctaagtaatgctaacaaaatgaggatattaaatagcaaacaatttcaggcagaaataatttcaggattcttacagtaaatcttatgtaaacccagaaaatgtatttgactagatttggactttttttgcattaactatattagtaattaatgtttctgtcctcataagacatgtgattgtatgtttgtcacagtggagaagaaaaattagtaacttcataaatcagtgtgttctttattcctctcttataaatggcaattatgtgtggcttaagcattacagagaggtgttggagtgtgcatgttttagctaagccagaatctttcctttaaaattcaggaggtaaaattaaccacaagtatcatttatacatattaaaattaagtcatactcattaaaaattatattgaagatggatgatctcaactcaacaaattattaacctttataatagaaagagaaatgcctctaattcactcctgccccttaatttgtggcattctataaactgtacaagagtttgatataggtgagctttaagttcccttccaaaccaaatgacaaagtcataagtgcactaattggtttctggtggactgttgaaactaaatatttctgccctttgtgattatactgggcttcagtggatgcaggcaatgatttgacaagtgagtttacaacaagggccagatgaaacccaaatgttatatttgaaaagtagccaaccagacatttttttcatttcttattccgtaacaatgctcacgtagaccttcctgaaagacacagacctgttcatttaggattcatggtcctgggcctgaggtcatcagagctgcttgaagagcctttgagtttgattactaattcatgggaaagtattgcctctgtgaccaaagactttaagaactaaattcaacattctcaatgtctctttactttcaaccatgatttgaaaggtacaaagagttaactatactgatgtattccacaattaaagtgaaataaaatgtcattgcagcaaagtgtaatcataattaatagatcacaagttttgaaataaggtgttaaaatagaaatgtattgagatactgcttaatgtyatactaatactatttctagtgttaagctcgtcaatgtcaggtagcaagcaatgaatgtgaatcaataaaaagtgtttgaattctcaaatgaaataagccattatacagtaaagctgatttaataattatgaaattattctgaagygataaaccaatatatataaaaggcatattacatcacaattagttgaactgtgattttgacatacaaaacatccttatatcaatgttttaaatgtcttgagagtatggaattgagagaaaaagtttatgtcaactatggtatcagttctagagggtctttaaaataaaaataatcagcrtttagctgagttttcattcttaatgcaataaagcaaattagcatgtgacatatgccatctcttaataatagtttcaggctgcattgacataaagtaatcaaatttctatagggaatttaacttgcatgctagacagtttaattatctggygcatatttcaatagttcccattataagaaaatatgtccaagtttgtcacagtgaatgtctgtaacaatgatgttaatattcaataaattttaattatcttgtaaatcatctgcctgtgtatgttccttcagatgttacttaatttgaccaaaaccaaggtggtgaattaggaactaaaatcagtcctagagcaacatctttattccaaaagttcttaaaattcagcaaataatcttactctttatgatatacagattaagaagttggcatcagatttgaaaattatatctagctttaacatcctactgcagaaatgcctctttcatccctgactgggttattgattccactattcctactgtccaggaaacagataagcaaatgcattatgtcttctatttttataatattctccacttcataaagcactttcacatgcataatatcatgtggtccccacatctctctgaagtagttgtttgacaattagtattattcccctttcaaagttgaaaaatgcaagtccaagttcctgacaagagtccggatctctaatccggtccttaccctcctcagtgctgctaatgctggtctatttcgcctatgagatagtctctgatgtattttactctcatgaaatgaaattgtaacatgctaggtaggctttctctttagctcaaagcatattaaaagagagtgcaagggagtaatgaaggtaggcacagtgacatagcaaaagggatagcaagtacctaacactggcaagaaagagagaaaatgcattttctaaagaggctcgagagctccagcatttccaaaagcttggctccacttgattcagtcaacatggaaaccagttgtctctgtagcctctgagcacattatggtctggcttccaggcataatgactggtgttgacatcagaatactacgagtcattgggaaaggatcaattacgtcagcacaaagaagtttgctaatgataattaacaatagtaataataaggctaatatttatcaagcagttactacgtgtcaggcatgtgatgaagcttccttaattgtcaggttctgctgtcacatttccagccacctcctctctttccactcatctatggtcctttgacctccacctgcggacttggtcttgctctagtaaccagggctagtctaaaatgtaggctggaatgaagatatttgtctcaaatctaaaactcaaaaattacatcaccattccttttagactggctcaaactgggggccttatttcttgtctgctactgtcttattcctaatctattcctcaatttgtttcttggtgctgataatactgccmcctagattttaaaatcctgaaagaaaagaccgtattgattattttcactactgtagtctcagcaatcagtagccagtgcctgacacaaaataggtactcaagtgcttgttaaatgaactgaatgcaccaccactctagctcttgcacatcaggtctcttagtgtaaacttcctaatctcaacatggtcaccatcattataaactaacactttctgggtatgactgtactgatgctttgcatacatgctattcaatctttacaaaagttataaggtaaacagtaccattttcattacgcaaaagaggaaaatggttttcacaaggtctcacatatataattggtaaatcgaagaacaataattcaaatgaagatgtgagtgactccaaataaagccrcctctttctagacgctcctgaagattgcagtgactctctgaagttctgaccaaggttttggatttcattgcttactaatagtctttctttatgtcaaatgcccacatttctaatgattatctgttcttggattacccttccccatgttggaacatcttgcctgaacagactgccctcctaagtcaccatatgactaaatatcttctgtagccatgccctttgatcaaagctctctcattcccaagtatgttggtggcattttttaagccccaaaagttgtatttgtgtggggcataatttatatgagtgggctgggagaataggacccagagaatgagtgagtcaaatgctttcaagattaccawggtttgggtgagagaaacaaagtgtaaccatactgaacaaaaggcagaaatgggatgatgtgtagatgaatgagttgggtatcaataattaggtggaattatcatgggaaaaaagtccatgattagaagcttggtgcaggtagcttgagtgattaccaacaatcaacctgttatgccygacactcctttctgtaaatcatcctggggctcagaagaattggttagctcaaagaatgtaatatgcatgctcctgctatttcttctgcctgaagacatgcaattctttacccatagcctggtataaaatggactttaaaataatttgttgtatgaataaataagctggctgtctttgaagacagtggtgttgtgcatgccaacactttcttctaattgtgtatactctattttaagaagtgggccctgttccagatcaccaaacctttcagcctttccaacactgctgcaatgaaatagaccatacctagcattgccagcaatattatgtcaactgcaccatgcagkgataatcctgccttctgaaacattcattatattgtactgctctgttatatattctttaatatatcagccactcaaaaatcctgagagatatgtgctaagatctttgttgacatccccatatgtggtgttgaacatagtctagaatataattttgaccatgaaattcagtagaattgaaatgaaaactttaggtgagcttttccaaacttgcttactctaccaaacacaaaactgatgtcattaattatgcaactatcattcttttttaaagtgttgttcatgaagaaatacaagtttcatcatttcacaagaattgctacatatgggaggatgagcraagaaaacagctgggaagccatgtgcacactgggcagcaggctggagactccctgactcccatggcccagaaacacagggaatgtcattctaactcatgcctcagacaccttacaagtggctttattccatgggcctttaggattactggcaaataattggaaattattaaatctacaaatgtcaaggatctactgcacatgttgcttttatcaagtagagggaacagtatagaataataggtaaaagcacaggcttttgagtccaacaaattgtggttttgaattcaggctctattttttttttcttttagacagagtctcactctgcacccaggctgaagtgcagtggcacaatcttgactcactgcaacctctgcctccagactyaagcaactctcgttcctcagtttcctgagtagctgggattacaggcacgtgtgacccctccgtgcaatatatatatatatatatatatattttagctgagatggggtttcaccatcttagccaggctggtctcaaactcatgacctcaggtgatctaccacctcagcctcccaaagcactggaattaaaggcatgagccactacacctggcccaagctctatttcttagtagctgtgccaccttgggaaaattactcactttttctgaaccttgattttgtcttctattaamgggggatgatcattgcagtcacctcatgaggccattgtgaggatgaaataaaataatatgcataakgcactagggacatcagtaggtattagctcttcatttgtataattattattaaattacaatttctgggcagggactacaccttatgcttgtctgtgtccttaatgtaaccataagaatagttaatttatttaaaagcctgggctgctaaaggaacaatctttaattttcagaagaaaaagtcttctgtataatataggtcaaatgagatgtgagataatgagaaacagaaaacctcctgcagcctctttggctgaggagaagcgatagctgtgtagaaagcctgttctgagcctctcaaatgtatttagtaatcagcagacggatgaaaggaaggaaatttcatctctggtaaaagcagtggaaacattatgttcacttgagctttttgggctttgacctagctcatttggttccccttgcccaggaaagagctgagagaattgcatcttttctcttctcttaaacccagccccatcacctcttttattcagtcagggaatatctcaaagctctgtggcaaactctttcctgcaggcaatcctgtttttgaaactcttactaatccacaaactagcagaatctgtgctctctgagagaacaaagactgatgagggatctccaggagttggcaccaagaattccttaacttgcatgctgactggtactggagcttgttactaaagaaagaagagttgggggtgtggggaggactctactgtaaacatagtatctcccaaataaacagcctctcccaatatgttacagagcacttctgttttcctgctgagaagttggtgtaatttatgtttgtaaaagatatctattgctgagaccattgtwtgaaaatagacaagaaaaaggagaaggagcaaaagcaaagaaaaatactgtattgcagtcagtcacttccaacagtgactaaactctgtaagtcaattgtaacaactactacttatgggccctcactctgcgccaggcactttccatgcattctcacattcttacatttaattctcaaaatgaatccataagttaggaagtagcattgtcytcattttagagatgagggaggtatgactcagagatactaaatgacttacaaaaggccacatggtgcataaatcatggagacagaacttaagcataggttgccctgactactaagtcctaacctctatactgcttctcaaaagaggacagaaaagcccaactgctgaagaagacagtggccccrccagcaaggaaaacttagaacttaaggacactgtagaacctgctgaagaggacaatgcagaatcgcacaggaaatatagaagcagatggtggctccaaccatttatctgagactaggaagacagtacccagtcaaagaagaatggatggtcaaaatgagactacatttttagttaaatgtgtttacttttataaatcattatatatatttacctatatagtgatcaattgttttcaaatacatctcgtttttttcttaagtcccaattaaagaacgcttgtatagtacaaatactcgtctctcccaacccctacaaatcataattactaaattaatatttcctagtttcttcttcctctcctagttttgctggaccctattatttcatttacagtaattttcatgacttctagttataggaagtgtttattcatatagttagttacatattgtctatctctcatccaccatagagacaayaggaaatgccatgcagaggtcatggctcaaggtaggagcttaaaattatttttcatgattgaataagtgttcagtaaaggcttctatttccttattgactagtaaatgttttatacatttggtgaacattaactctttgtctacccaatttattactaatattctcttgtttttcatgttcctttattttttatgataggtgtttaaaactaaaaatacggtgtgctgtgataattcaatgttttccttttattattgtaatttctgatacatatttaccttttggtctatcttttaatgatttgatattgtacttttagctctttaatggcctggaacatatttttaatatatgatgtaatgagaaatttaattgttatttttctaactaatctattttctcaaattctaatatcctatttccttccctatttctttrttattttaatttataacacagtaatttaatactccattagtacctattagtacctattagtgcttccctgttttaattattattgctttataaaaatgacattttctaatgtgttctaatatcctccaaagcaaggcctatcattttctttttccaaatatttttaccactcttgcctgatttttctgtatatggaactttaatatttacagtctgatccatagcgggttaagcaatcttctcccacaccmctgaatgattctttgatgctttgaaccaacttcttggtgactcctctctccctgcagctctgcacttacttgggatttcattctacgagtgcatggcagcacrcacattccccagccatatttcctgccctattcttttggaaatttcaggctctgaaacaatgtctaaccagattatgatggaacaaaacctgcaaaattaatggagtagagtggagtttcatctccactagaaatgaagattcaattcaaagtgtagaaaaattacattttaaaatcttttaaattacctatttagcttgacatatatggttttgtgtatacaatatgaaaaataatatagctacattaaagtatgtgataatataaataatataccataatataataagtagcacacttatttaagggaatgagaattatcagtactatttaaattcatattttctccctcccacctctctcttctgagcctgtttattttaatatagataaattgaatgtacctataaggcagtttcactctatctgcatgatagagacaggcttcctatttcttgagttgttctgtttctggatctctgatttaggagaaaaacaatatggaaattacttttaaaatctttatatcttctttcaggccatgagcttgctcttttgcaaacaacaaaccatatgtaagacacagattttccttttcaattttactcaataggtcttgtttaatttttgtcctggattttgacaaaaattttactatcaggcttgaattttagtgttataagttttcataatctttgtgtgtgtgtgtgtgtgtgtgtgtgtgtgkatgtgtgtgtgtgcatgtgtatgcatgtgcatatgtgtgtgcctttgtccttatatggggagaaattggaaaacactgcatctgaggctgctaaatcaataatatctcattagatgcttctaaactatcatttaataattttctgaagaaatatgtctcaagtttgtgtaaggattaatttcaacatctggaatttctcagtagarttgtttgtaggggtgagtgtgattatatgaattaatcattatccattgtaggggtcttcatttcactcccatgtctctctctctcatgcctattggatttgtttctctgtctaatactaaatgctcaatatgattagctaattcaacttcctatttagcaagaaagcaacaatttcatcygtgactcttaagccatattattgatttttaaatctgtcctatgggtgattcggaggttatggtgcaggagaatgatatggtcatatttgtattttaggaagaaaactggcaacagaatagggagctgaagccaagaaaacasttaggaataatttgttcctgctagctaaatgtggagcttgccttccattgctttttgcttctaaaagaggattaagacagaggaggaaataaaaaggaagaaggaaaggaagaaagctaaaagaggagggcaaaagaaaacacaggagcaatttatacawatcaaaatgaggagtgaggaaatgaagcttccatttctctcacctcaagatcctgctggcagctcaagcctggacacccagagctacctattggatcctgtctcctggtttttgagacctttctctcttttgcctctcacatctgatcttgtcactaaatcctttttattttattctattctatttttgagacagagtctcactgtgttgcccaggctggagtacagtggtgcaattttggctcactgcaacctccatctcccaggttcaagctatttctggctaatttttgtatttttagtagagacggggtttcaccataacagccaggctggtctcgaaatcctgacctcaagtgatcctgcctcggcctcccaaagtgctaggagtacaggcacaagccaccgtgcctggccaatcctttttaattttaaaaagaccatttttcattaccctccctaccatgaacagcagtagaacacttagcatgtaatcaagatcttgaggggcttctaattccccatccctgttgaatgcttcccagtgatgatttttccaacgctctgtttttatcattacaagctttgctcaaaagcttaatttggaaagacaaaagacaaattctcagaacaaattttaagaataaattttaagactccatcctacctaccatcatgagtagctacagtcatagttttcctcctgtaaacctctgtggagtcctcactttttattctacatgtatcaaagtcatttaaatccttcagagagtttaaagtgcagcataaattctatttcctrttacacattttttggtacgtagggacaggccacacttcttygtttcatacaagggcttgagattttactgagaaaggcttcctcatttcttaatgcatattattgaatgttcagcaagctcttaaaagcaatccaatagttcccawaataaacatagttaattccatcaatatttattgtgcccctaacgtatataagacattgtgctaaacattgtcaggatgtcagatgcttgctcttgaggacaacaattaacaaatgtattcattggaagactatttccacttcaattatatgactgctaatttgtgacttttcaaataagtttctcttcttccatgaagtttgtgaattccacaagtagataaaattgtgatacaagttacataagtgtgtttaatggcacagatttcacttttcacagcaagaatccaggttcagaagatacagaaaagtaatcaagcctttaacattgcactacacacttagtcttgatgtatgtattgaaaattattctttacttattagaagtgtcttcctcaaggggctggaagtttaggaaactatgatgcatccatctttcacatcatccttataaaaatacctgcattttgctaagatttcctgccattaattttraaaagaaacaaaagtaatttcttctccttattgcgtatgagatcaaagtttaacaaatgaggtcttaatagcrataccaagaaatgggaagccataaatgagactgcctatatggcagtagacaagcttgacaaaactcctcaaccaaatgtatgattgtgttacttctgatattcacaccaagaaccatccaccctctggtactcttagcaaaaattattaggaaatcagttgttaggaatcaatagttccattagacaggaagcatagttttccaaactatgggaattttatcccagaactakgtatcacagtgaaattaaaggattaagcctcataagaaagcaaaagtaccctatgttaaagtctttggccaatgctttctaattcttctttttcatatctttaaatacagaatccccttcacctacaactgagtttagaaaattcattaagttctgatgctgatgtcactgtctcaatcctgaccatgaacaactggtacaattttagcttgttgctgtgccaggaagactggaacatcaccgacttcctcctccttacccagaataattccaagttccaccttggttctatcatcaayatcaccgctaacctcccctccacccaggacctcttgagcttcctacagatccagcttgagagtattaagaacagcacacccacagtggtgatgtttggctgcgacatggaaagtatccggcggattttcgaaattacaacccagtttggggtcatgccccctgaacttcgttgggtgctgggagattcccagaatrtggaggaactgaggacagagggtctgcccttaggrctcattgctcatggaaaaacaacacagtctgtctttgagcactacgtacaagatgctatggagctggtcgcaagagctgtagccacagccaccatgatccaaccagaacttgctctcattcccagcacgatgaactgcatggaggtggaaactacaaatctcacttcaggacaatatttatcaaggtaggatgcaaggtctyggttatatccccattcatagggccatgacagagagtaaaattcccctatctgtccgctttgcagaaatcttgactctgagtagctttaaactttaataatatttcttagaggatttctggttatataggctagtatttcatgatctgctatctgtaatttgatctataaacttgtaagtacatggtatagtgggagtgctcaatcctgcctttaaaccttggtttagcttcttactagctgttgtgttcttggaaagttatttaaaagctccaagcctcagttttccaactagcaaaatagaataatgaatagcttggtatagtataataaagataccatgaaatttatatatgaaaagtacctaataccatgcttagcttatagtagatgcaaaataaatgtttcttttcctacccactcttttccatatcaataaaattaatcaagtttctctaaatctatacaaagaaaaaattagtcaagcaagaaatggacttttctccctcctccctggccttgatgcttaagacagtatagagtagtaaaggcaaagactcttgaactcaagttcagaccgtctgaacttgaagtttagcactgccacttactacttgagtgacttaatcaagttacttaacttctctgagccttaatttcctttgttctayattcatttatgtaaaatggatataagagtagatcctattacccatagaatcattgtgattgatgattgatagatagatagagataatagatgatagattggtagtagacaaacaggatacattaatagaactaagagttccataagagtattatatatatataaaatattatttatttgtttatacattcataattatatttgtttatttttaaattaaatacatttctgctccggttcctcaatatgattcagaaactagaacgaaaatgtccatttaaaatagagaacaacacatcatatggaaatggttttggtgattcccgggaaagggggaatatccttaaaggatatttcattagggcttagactttcttctgaaaaaggaccacctgtagtcagagaggccaagtcagaagattattatttcttcaaagacgaatgtttccctgtagactaggccctgtttttaggccatcctggaacagtggtatctgactatgttgaggactacaaggcaaactcataacttcttacctttaaaaaagacatgataatgggcaacacagcgagactccgtctcaaaaaaaaaaaaaaaaaaaagacatgataaaaggtcaaggggtgcaaatagttgtacatttaattttacatatatatawgtatgtataaattgagcacctactatgtacaaggcaatatgccaaatgccatatgtaagggaaaagtgaaagactgaacacaacctgtaaactccttaaagaatgttgttaataaaatttttcaaatatatttactacaaatctattagtaataaaattagatgttctatcatcmtctgaactttccctttttcccatattataatttccataagattaaaatccatgcatattttattttatagccactctccagatttaatctactgttggcaagctcgcacataattaaggttcagaattttatctaagacaagaaacattctcctttacaacaaaaatacaagcaaagttttgatttataatttcaaatagtcattgttttggaaggacagtcataaacagcagccaggaaaaaccacttatgaaaactacattgagttccttagcatctttttgtctcatgtaaaaaggagaatgcaagaaaagtgattctgtttgaatcctaaaaacgtttagaaactacagagaagaatatttgttgacttaagttgtatataccttagggtctcattttaccaagatcagactgatctttctggctcctcaagatttaatttatattaaaattatgttcttccttccacaaggatcccatggcattttgtatataaaattayatagtggtacttggcccattctatcctcattatttgtctgtgaatctgagttctgagctagaatataaattctgttaagtggagacgctattattgagccttatccaatgcctagcctatagtaggcacttaataggtatttattgaaattgacatagaggccaggggcggtggctcacgcctgtaatcccagcactttgggaggccgaggtgggcggatcacgaggtcaagagatcagaccatcctggccaayatggtgaaaccccgtctgcacaaaaaaaaaaaaaaaaaaaaattagctaagcatgctggcaccgcgactgtagtcccagctacgygggaggctgatgcaggagaatcgcttgaacctgggaggcagaggttgcagtgagccgagatcgtgccactgcactccagcctggcgagactccgtcacaaaaaaaaaaagaaagaaagaaagaaagaaagaaaaagacaggaagaaggaaaggaagggggagggaagggaaggggagggcaggggattgacatagaaagaaagaaaagtaactttctgttttatttacatcctacattatctgttgctgtagaagaaatggatagatggtagatattgtctaaattaagtactttttaaatttacataaatactggatgatttctgtttggttttctttctctctcgctctctctctctctctctctctctctctctcactgtctctctctctctctccttatggtgggatgttaggttagtatataacctctgccctcgtggctatttattccacaaactttgaagctgtaaaagaagattgtgaggtttgaagcccagcagtaatttacaccgggtcagtgacaatattttcatcatgatgaatgtgtttgagaaatgaacccaaagaacttcaggaagtatacctgagactttttaaactcctgagggatacaggaaaagagaaagtttgaaaagtattcaggaacaagtcaagggaaatgagcaaaacccaggaaggagactttataatgaataactgaaaagctgccttaagccataaaacatctgtggattttccatcatccttatttattttgtttaatacagtctttcagaaagtaagttattctcagtccataagtcacatctgcatacagtaattttcttaattgttcttaaattttgtaaggctgcccccacttcttcactgcataatgaaagtcgggaggataatgagccatgaatagtggatgtcagagttacgcaagttttcatttctcacacagtcattttcagtttgggctgacagaactgttaacatcttaaaatgttaatgaaatcaccaaaaacakggcattttcagctaggctttcagattagaaaagtcatttctcatggcagactacacacacataattacaggtattagagattttattcttcctaggtccccacatgccagagcaaatgtccataataactaaatgtagacaaaacattcagggaccaagttcatagcatgatcttcaacaatcttcaacaatatatttacaagttttgttttgttttgtttttgtttttgagacggagtctttctctgtcgcccaggctggagtgcggtggcgcaatctcggctcactgcaagctccgcctccctggttcacgccattctcctgcctcagcctcccgagtagctgggactacaggcgcccgccaccacgcctggctaattttttgtatttttagtagagacggggtttcaccgtgttagccaggatggtctcgatctcctgacctcatgatccgcccgcctcggcctcccgaagtgctgggattacaggcgtgagccaccacgcccagctacaagttgtttttttaaatgttagttaattggagcaattattggtggaatattatyttgagaatacctttataagcgcatttgaatggatgtttttgcctagccaatgaccatgtgttgaactayggtcgggtagacaaaatgaagacttgaattctgacatttaggagctgacagtctagtgaatgaggtcgaaatgtaagtaaatggttataaaacaatgggatgtgtgatttataagaatagggatatattcagatatacagagggaaataatgaactcttctcagatatttggtgatgagggaaaaacactggacttggatcctgtaaatgaaaaggggttttaggtttggaacaaattcacagacaaaggaaatgacatatgcaaattcaccaagacctgaaagataaatttagtatggctggagcattaattgcatatgaaaaggatttgagatgattctggaaaagtagtcaacttgataacataccacacagagtttgtatgccaagctaaggcatttgcattttatatgcagagcggatgtcaactgaatggcagaacattagccctgacatatttataaaaatcataatcctgtaacaaattaaccaaataaagtaatacagtataaaagctttgcaagtaattttttttaaacattaggatataaacattgtttttatttctcaaaattgcttttagccttgcccacatttactcccttgctgcattctgaacatcggactctggggaaagtgaataggagtttgagaatttacctgctgttcccaggattatgatttgcccatgcttgcctaaaggccctaagtgctaataaattcattgttcctgcagagaaagctccatgggttggtcataatctggtcatcarcacttatcttttctttaagaatcccaagagtctggacactgacagacacattgttgttcttggcctaagaagtccctaaccctttgactaattagccatagttctgatcgtttattctagcttctaattgggatgtagaatcctccttttcttctttgaacagcttctgcagttctgttctgtatcccttgagaattgaatcaagtagtcagtgattaattcgttcctttgttcacatgtatttgctgaaattaactaatataaggtcaagcccttgtctggagacagaaggaatagaaggtaagaggccgtgctgtcaggaagctagcaacccccttctgttcttccaccaggagaagacatgctcatctaattattcatagttttatccattttccttgacctggctgtttggttattattcttcactgggataacaccctttataccagtgattatactctgctggtgctagcatttctaggcctccctcctcagttgaccctgaattatgattcaacacactagagactcttttctcttcaaactatgtttatctttatgcttacacagtcaagcaatrtcaatactcactggccttttattaataataaatgttttcattattgattctgcatatattcttaagaacctattatgtgccaggcattgwgaagaattagaaaatcttcaaaaaaatgaatcaaacaaatgtccattcaaaaaacccaacatataaattgataatcatcacaatttattcctgaacattagcagagttccagaagaacttgaggctgaatgctataattctaattttggatattctgtccactgtcaccataacttagtggcattgtgaccatgttaaagttatttaaatgtcataaactttaatttccttaactataaggatacctgtctcaaaaagttaagtagtatgtctaaggtcattcagctactactttgcaggggaagatttaaaccagtttatctaaattcatattccaggctctttcagaattagtataagccttccttaattgggatcctattactttttaatttatattctttcagcctgaagctatacaaatcgcatctgcatacagtaattttcttaattgttcttaaattttataagcattcttgtcctaaggacctctaccaacacaaactggttaacccacrtatttcaacatgtacttaaaagaaatgcagttgcattaaacatggaagccaggggttggaggctgcttagcactagctccctggagtcccgagaagaacacattgcttatggctgatccagtatacctaactcttactcctaggttaactttctctgctagggctactaaggtgttgatacttctagaaaagacatgtttgggttcatgaatctcagggatcaacacttaaggtctgtgtgttcagatgttttcagtaggaacccttgtcagccgaatgatctggctggaattctttgaaattacctctactccaggtcacttaagtcatgccaagagatgagtctaaaattttcyctaagtcactgcggggcrgggtcggggggactcacataaggtacactggaaaatgtatattccctcaagactctattttgatgaatacagctcaaatttacttaatctaggattcagcagattttaaactgtggaatatttcccaattaggagagcttccaagcttttatgtgcccgagaaggaactgtattcttggttgactttttcactttatatgcatctactgtaaaatctggaaatctgccaaaaagtatgaaactatgcagagtaatactgaagctctactctgattttcagatttatctctcaagaccacttcaatctgcataccctacaacccttaggatagatgtttgactggtaaatactgcataatgtcttattgccagggctatgccaaggcaatacttgaagggacatcaacaccttggctagcactggggccagatccaaagagccagaatgaattgagttgtgatgtttcacagtgtgaccaggaacagttcaagggctaggcagagatcataattgtatagaagagtcaaggttcataccaaaaagcaaaaggtaaggacaatgatataggggtatggaataaatcaaactgttttaggtaacatatcagagaagaaaacacagagagaaaaaagtgccagcttgccagttacaacacatggaagcaagaaaaagagattaccatgtctgtgtgtatgacttcttgatgtagcaagcccctcatacacaccaatagtaacacagcacaagacatgtattaaattatgaccccaccacatagattagtattgttctcttcttggtgaaaacttcaagaaaggtaggagctctccttccaccctacagtttcacctataagtaattgaattttgcagatattgacaaaacatagacccaaatgattcatatatgtgtacatatatgtttaatatattactaaattgctgttgaccattaactgatagaaatattttttaaaagatgagccttgtatgcaattttaaaagatgacataatcagggattatagcgtgcagggccttctgttctgaggatggaaatttagcaatttccaaaccctattaaactccttctcatcagagaggttccccattgaactaacttcaattttttatactctccattattcaggaggaaaatgtattgaaagtttaatccttcaaacaatttgcaaattacaaatgcaaatgtttcctgacttaatgagccccattcttctggcaaagtgatgaagatcactgtaagagatacatgtctgatttgagcagaagacatgtgtttaattgcatttaccccaaaacattactgagcagttaccctggccaagcactgtgttgtgcctaagagtcaaagatgactcagtgagataggtacttagataaatgctgaagcctctttcagcttgacagcctgcagtgttatgaagcagagcagtggggaagggagaacagcaattctgtggaagatgctgctctccaaatctggagtaggtccaaacccatgcctttgagggccttatagtctaaaaagtcaaagatgagataaataaactgccaaattcttctactttaggatagtaagaggagagtcaaggagtcatttcacatgtaagctcaagaaatcacgcacatttaatgtttaatttggagaactgtcccatatrtggagaagaaaatcaaacagaattggaccacaggtaagctctgtggctaaaatggacaaattcatgttatcataaaaggaaggcagataccacagggctcggctttggtgaaacaagccacaaaatgaaagctgaactagtaacaactcgccatcaagtacagaaaggttccctagggccgtaagaaaagggaaaaatggtaaaagagacataaaaaaataaagggaagtaaatagatggatctcagaaggcagtgggaagggagctggaatggcgacaaatagtaaattaactaacgatggtcaaagagctgctttaagacaagatctcccactaacaagacagaatattggcatttctgctatacaaaaaccactaaaaagaaaagggggagagggagggagagagaaaaacaaaaaattcagaaaaaataaaataaaataaagagtattaaagaaacaatgagccaactgtagattaacccacatgccagaaacagtgagaatactggagggaagggagccagaggaagaggtgtaaaatgagaataatttaggaaatcagagagtttaggggaaagccctgaaaaaataagaaatatacacatggaaaaatacaaatgtaaactatgtatagtaaataattcagataactggaggtctatggacattgtgaaatatcaaaattggctgtaagagttctraaagacaatccaaagagagaatagcttagggctcttgaatgaaaaagagcagaaaaaaaaaaaagactacrtaagtgtgaacttgtgacaaatgcaaaagtgtagaactctggagaatgtgagtttttaattagaagattcgtcgtagatatgaatcacattaagaaaagataggattactgaacatctatgtcaagtttctctttctcacagaaaaaaaaaaaggaaaaggggaaggtttaagaatattcctttgtctcaaatgataaggactttattgagctgggttttctactacatgccaatagttggtagatcgcaagctaaattaaaagtaaccaagaagcaaatatttaaattccatgtataggagcaagtaatcctgacaagtaaactcagtaaacctaacaagaattaggtgatcctggtaggaagggagtttgagrgaatgttactagtaataatattcttaaagattcctaatcaggcaaaagcaaaaaatcaaaatgaagttctcacagaaaaaaaaaattgatagagctttatgcagcatgagtaaatccctcattcctcgggggaaatatcaaatatgatgagatgatcatgggaaaagaacttcagcttagttttcaagatataagagaaagaggatattgatatgtttaatgatacaaagacagttcccagggggaaaaattaattttaaggccttgtagtacaaaatagatattcacatagacagatatgattaatggaaggcaataaatagggggaaaaagaaaaggtaatagggcaatttaaaagaaaaaaaagagaggtagatatacaaagagacaaattgatgagtgaaaaatgattgaagtagaaataaatatatggtctataaataactaggtcatgaaagaagacacttgaggatggtgatgcatttaaacaacacaaaagtgataatatgtagacagaaatgaaggctgaaaacaatggagttatttcasagctatttccacagccagaaaaaatacaaattcataataaacataaaaacataatactaataaaacttgatgtgtcaaataagacaagaaaaatcaggggggcaacaattcttaaaatctctaagaaaagggcaacattatttgtagtggaagatttttatttaactttagcaaattttaggcaagttacaaaaagtaaaaatagcacatgactaatgtaattaatacattaagataatcaatgtattaactgcagttaacatttcacagagaatgtacacccattttgattagcacatagaatatttacccaaaatgacagtatttcagcatccaaaacaggctataaacttaagcagcagatttttatatgtgaaaaatacaataaatcaaagctcaaaccttttaaaattacaaaaaaaaaacccctcctatgtcaacattgtgccaggtctaaatcctacacgtattacctatttatcatatgtattctgtctccttcaatagaatataagctgcatagattgtggtcttacttcactactacacccccagcacctaggacagtgcctggcacatagtgagtattgtggaataaatagatgattgaatgtgtgatgtgttgctcattttatgatgaataaataagaaaatactttaattaggatgtcaacattttgcatgcaaatatggcttctaaaatayatattaaatatattaaatattgatcttgcttatactgtgaactgtctcaaaaacattttctaagtaatttgcaaagtgcagattttatctcagctgttatgcaaattacgtattcttaattagtgacatattgggagattttaataaagaaaaattcattagtaagcctcattcttttaaggagaayggtatcttgggaggtttgttgayaaaaaagatgaatacctgaactactttgttaaacactcactaaacaaggttctcactcatggagttagatccacgcccttatcaaaccatgacaaagatattgtaagtggtctcttagtcaccatttttctttcctatatgtgcattttacttgcctccagaccaatattaactaatgtagatctctgttaaagtcattatgctactcagtaatcttcatggttccccttttcctactaaaataaaatccaatgtcataaaacaggtacatgaggcctccatagtctagtttcaacctgctttccctatgttattttctaatatttttctaccctgctctccaatccgattattatgcttactacctcctcttacattttccaccttcttacctttcttcataacattcctgactctggaagatttgtttagagttcatatccaggctggagcagttatctgatcagcacagagaatggtagtattactgttccctttgatccaggctctaaatttttattaaaggaacttaaggttacttttttatacccacattgctatatgggcttacattgagtttatattcaactaaatactaacaggtcttatttatatgaccttctgtcaagctgagttccacacattcttagtaaagtttgcaaccctgtacatttggccccttaaatcactgctttcctttttgaaaacaaaatatctcttgattataccatctcctctccatttctgctactgccttagcccttaccaccttaagccctttatgagactagcagagagagagtaaaagaggaagcraaagaaagaaggaagaagcattgttcctcacatgtggacttatgttcagtcccctcctccttccaaactatgtcctatataactagcaaggaaaaaaatcattgtaaaattaaatcgaatgatcatgactccccccagacaaattcccctcaatgcctccttgttgtcttcactgtagcctcagatctgatgtaattcatttcctatcctcatctccctccttatttttcatctcttatcgtcaaacagctcacactctctgtctctggcctttgtatttgtatttccttgagatgacaacatcatttcccagcttctcttcctggcttactgtaattccttcttcaagactcagctctggcacttcctcctctacgaaactttccttggcaccctatagtagaatgtgcaggtgctcttgctctctgttccagtgacaccagatttacctctatcatgatgcycattatgcgggtctgaattgcctgctcactttctctctccccagaattagactttgascttcttgagctccttgagaccaatgagtttgtctttcatccctgtaactctagagttggaagagtgcccaggagtttgtcagtttatggtgccagtaaaactattcctgatttttctccttgtttatccaagaagagtaaagggcaagataaaaaaggaatgtgatggaattcaatttaagcaaaatcaggatttcagccttttgatattttaactaatttagtgagcatttatattttgctatgcattgtcattccattagtacaggtgactataattaaagctttcatgagattattttgattcacccttatcgtaagactaaaaatgaaacagacacaaataatctgtcataaatggtgattctctgggacccaattttttggagccagtagtgaaacaagcattggattttctgggctgggaaaactggagatattcaggtccctattgatttgccttctttggaaaatgactggctcaaagacaactgggccttgtccctctatcatggccatcttaaatgttatttaataccaataatcagtaataggttttactggaatgacagagttgtgtaatctctggaaattttctgaagatttctagtgccttttkctgatatggtttaagcatatatytggtcaaagstastctctcaagggtccatccagttaagaatctatmatcattaagcctcaaacattcttaaaataatgaagggttcctctttccacaacttcctctttactttcctgatcagtaaattgaccagaagaaattaacctacttactactaactgtttatttcttatatcagcaagtatgtatatgtgtgtgttttaacaaatctaaaagtagatttcttataaacaagtgtatcagctttcccttatagtacctaggtaattatcaattgattaatctgtatattttaatgatttggctccttctctaaagaagcagaaaactacttcaaaatctaagatagctgagacttcattacttgttgcaaaatagaatttaagtggtagaatcccactggggagtactaacatgaataattaccattacaaacaatcttccaaaatgaacagtttcactgcattgattgatagtagcatcttcaaatgtgatttacatttatatctctaatgaaaattagtacgtacttcacactttctgatttttctatgtcccttctgtggcaacataatgtcttatttmttctatttgtatttgtaaattatagagtaatatttgtgacaggcaatgggtgaatatgttttgctaagagcctacacttacatcatctgatttttcaaaatacctactgyrttccactctrcatttcaatttaatttcttttaatttgaaatgtgtcttgagtaactgccatggatttatcataatgcaatactttgtgtttcccacttttaaaattktattaaaattaytggaaaaagtaacctggagacagccttgactgaaaaaaacttgaatgacattaagtcagagttaccatatctggaatatttgttccawgttagatgtagcatgtgctttacataaattatttccaactcttgtaatgaaggaagtattttctctattttgctggtgacaaaactaaagcatagagttaagtaaattgttcaagggccatgttagcaggtggctagaccaatattcaaatgggggtggatctgatgccaaagcctgggcttttattctaacacaaggccacaagccacattaatctttattattgccattaatatgccacaagcttatatgttacctcttactgtctaatcttcccagactcaaaaaagacataggctaagaccaagccatattagtctagtttttctgtctagtccatatcagaacatatactgtaagtgccctagttcacagggttaggaatcactatattatttagttggtaattttcctttytgtggcttctggcataagctctctctagaaccagggccaattgtttctctctaatgacttggagggaggctagcctgaggctatccttaaaagtgcaagttgatttatcatcttttcctttgttccatggatgagatccaacatgcagcttcaactagcctcacggggacagwtatgttaactgatttcattccacaagaagaaacattggtaacaagatttggctattttctaatgttatgaatgcagtgtttaagcaattattaaagtatatgcatactttttaatctcattccctgtgccaaatatctagatagatcgatagatacatagataaatagaaggtgtagttacaattgaacatagtcaacaatagaaataggatatgttaaagatgctgaaaacctccatagcttgaaaagttgtgagaatatgcaattaacagtttacaacagaaaatggttaacacatctcttaactaggaattaaaacatttggagtaagactaagagtcaagcacctggctagaatattagaacctgagagtgaaatctcatttgcttagtgcaataggactttactcctataatagagaatgagtccagcttattaacatttgaagaaattataggcactgtctttttaaataaaaattcgaatttatttttattaagacaaggaagcaaagctgaacactgcttcctatcttwggcctcactgcttttcttactttttgcctttgctcctctttcccaggtttctagccaataccactttcagaggcctcagtggttccatyagagtaaaaggttccaccatcgtcagctcagaaaacaactttttcatctggaatcttcaacatgaccccatgggaaagccaatgtggacccrcttgggcagctggcaggggrgaaagattgtcatggactatggaatatggccagagcaggcccagagacacaaaacccacttccaacatccaagtaagctacacttgagagtggttaccctgattgagcatccttttgtcttcacaagggaggtagatgatgaaggcttgtgccctgctggccaactctgtctagaccccatgactaatgactcttccacaytggacagcctttttagcagcctccatagcagtaatgatacagtgcccattaaattcaagaagtgctgctatggatattgcattgatctgctggaaaagatagcagaagacatgaactttgacttcgacctctatattgtaggggatggaaagtatggagcmtggaaaaatgggcactggactgggctagtgggtgatctcctgagagggactgcccacatggcagtcacttcctttagcatcaatactgcacggagccaggtgatagatttcaccagccctttcttctccaccagcttgggcatcttagtgaggacccgagatacagcagctcccattggagccttcatgtggccactccactggacaatgtggctggggatttttgtggctctgcacatcactgccgtcttcctcactctgtatgaatggaagagtccatttggtttgactcccaaggggcgaaatagaagtaaagtcttctccttttcttcagccttgaacatctgttatgccctcttgtttggcagaacagtggccatcaaacctccaaaatgttggactggaaggtttctaatgaacctttgggccattttctgtatgttttgcctttccacatacacggcaaacttggctgctgtcatggtaggtgagaagatctatgaagagctttctggaatacatgaccccaaggtaatacttcattttactttagctttcttgattgtccattataattccrtatgttgtatcttctgctgtagtatgctcatgttcttccatctaacacaggaatattctctcagccaagtatagagactagtccaaaagtctgttgcctggtttaactaaatattycattgtttgtttcataaaygaaacaaaaagactgagaagttttggggagtgtcttttctagagtaggtctttctgatagaaatatctattaatgcatcttttccttgtattatttgaccatctgatagatagcacacctatcagggaatggtcttataaggtattttcacccaaagcacaccttaaaaactgatgaattacttatcttgggaattaataaaaataaattggaagatccatattttaaatagcaaagaatctttttcatcactaaaaagtgatacaatggaaagaattaaattttattataagcaycaaagtcaactgctagggaactcactgagtgtagaacaaggagtatcagactaactgagatggcagaattagctaaggcctataaagtaaggggagctgctcagctgactaccttgcatagaagggagagtgccagcagtccaaggacattcaagaagattttgtctatccagggtacccttgatatcctagacatctgaccctaagggaagaaggaagaggaagtgtagagtgcaggtaaacagccaaagcaggtaatrcttaggtaaggacagccattccatgttctctctggattgaaccagggcccctctaagtgagctggggtacagaaaattagtccagcccaataggactagagagaggggactgtcaaggaccarggcaattagaacagagctcaggggagtactgcagtcctgatgggaaacagagtgcagatctgaagctgcagtgcattccaacatgtaggatacattaagtagagattggagaaaggttcaattcagcaggcacactcaggacataccatgtctaaagcaacttaagctaagctgagcctttcatattataaaacattcacaggcttttccaaatgccccttgtcacaccaagtctcaatgtattgawctatttactataagttactattaaacatttaaaattaatttcatagaccatcaacaagtaggacatttgtagctatctttactaaatgatagaatgccccagagggctggtggcagctttaaagatttttcatagatggtttcarttggatgtaagttctgttttgcaaccaaaagaatgtaagaaatttgacccatatattgcaaaccttctgataagtgacatgaacctcatgagaggattcagccaacaatgcctcattgactaggcaagaaattttgtaacttctcaatgaatactcagggctttatgttaggagctggaattcagtgaacacaaataaaatcattagcataaataaaygcatcaccctaaagggagatgttggtgatgcttctgcattcacattctgcactggcatcagcagcctttgtttattctttgccccaggagtcctgtaaatcttctgaaggttttcagcctcactagaaacttagattatttgtgagaatctcaacaaagtgactcctaaattattagctcaaaattaaaagtatttagtctgatctagtaaaaaaaaaaatctaatatatgcctgttgtggagatttcaggccattatcttatgtaaaaagatgaacacaatactaactagagctttatttatcagaacgagtgattgccaaaattaagccagggatgctatgcatgaaaaakctstaagagtgattatgctaaagtattaaaaataaaattataaagacaagctatacgcagcagtgaaattatttttaagcaaaaagaaataatcatttcatctctgactctaccagaataaagagtgaaattttttaataagtctaacccrgtccacaacacaaagccagyagaactggacaaagtcaactttgcattacaactagtgagttcttaatgaaatgggacaaacctaaatctaaactattttcaatttgrgataataaatgaatttccactaagtttcctaaaaatgtgcatgtgtgtactagcgttgtttctacggtaaaatatctcttttgtaggttcacttctttccataaaaagacacccagattacttagctaagcaatgyttgaccccgggatttaggaggaataattgttgtgatagaattttttagttttcatccaaatatgtcatattatgtggactacataatgtcctcactctcaaacagagatacaagataaaaattatttccacatccctcagtcactcagaatgtactcttattataccgtagttactcacatgagtgcttttctctcctrttaatgctaaattccttgaggagggcctataccatttcttatactaaataaggtagagcaattcagaggtaaatgagtcaaattgtttgacttcaatcaattagggaagaaaagacataaacaaaaggagaagcaacttagraggttacaaatacgccaaagtttagcaacagatgaagtactgtccaagttcaaggaaagaatgatcaccttcaactcattacaatggaagaaagtttaattaataaggtaatatttgtgcctattcttaaagaatagtaagaattcagaatgtgtgtccagggaggagaaatggacatcctaagtgaaggagcagaatgaattgcttggaggtaatactttatattacctataaagtatacctattttgtaatataatgtattacctccaagtaattcattctgctccttataatataaagtatataggtatatagtataaagtatataggtaatacgaagtataaagcacaggcaagatatgaggaatctaatttagctacagcataggttacaggagtggaaggagataagatccaagtctggaaaaagtaagcttaattgagataacagaggatctttgatgtcaggctaagaagagtgaacttcaatatagatccatggccatttttgaacaatagaatagcacagtatagtggtatccatttaggatggctgcttcagcagcaggcaaacaagattacaagagaaagaaaatgaatagagctgaaattatagctttggtcactgatatagatttggtcactgaagaaaggatgtgagaaatattgcattccaatcagyaggacttggcaattaattggttgggagaggcaacaaagagtcacaccttcagagctgcaggcctgagtgtctgagaagatgctggtacattcaaggaagcacagaaacagcagttcacgggctagaaaatatggtagtcagttcagtttcatgcatggcatattttaaacttttaatttaagtttaggggtacatgtgcaggtttgttacataggtaaacttctgtcatgggggtttgttgtatagattatttccttgyccaggtattaagactagtacccatcagttgtttttcctgatcctctccctcctcccaccctctaccctcctataggccccagtgtgtattcccctctatgtgtccatgagttctcatcacttagctccaacttgtaagaaagaacatgyggtatttggttttcccttcctgtgttagtttgctaagagtaatggcctccagctctatagcatacgtggcatttttaaatctgttttgaacatttaggttaaatccaacagatatttggaaacatggagccagagttcaagagagagattgaagctagtaagaatcctggcagagggaggccatactgtttattaaagccctaggggagtatgcgatccccaggggagaaggtgatagggagaaaaatttctgtttgaaggaatgcaccatgaataaggagtcccaggatgttggtgtataggatttgtggagagacgaggtgaaagatgaagaggaaaggtgactcataaattcatgcagytccacaaatgccactctatactttgaattctaattttctgaggtgactatgggaatcatatgcctaccttcttgtcagkggttatcagaaaaaaatagaggcagattcatgcccagaacaaaccatgagaattagcatgcatgcayacatgcatgtgtcttaatgtctgatgaaactattaagttggtgcaaaagtaattgcagtttttgcctttgaaagtaataggtttatgtgatttaattttttgagtatttttcaaaattcccttttcayttttcaaattcactttgatagcattttaattttaatcagggagaatttagtgcctatggagaagtcatagatctctgtggttcttttgggacatttgtttttctgccgtaagccgaaaattcccccaatctyaatgggaggtgacattttatatggagtaatggccacactctaaagattcttccaccactgacttaytatctgctttatttctcttcatatccttttatctactggatattaggatggttccccttacaccatgttgccattttcatcccgttttcactacataaaactcacctcagtgaattcatctcaagaaagttttgctgtrcttcccyrttaatgctcttgaacacctgcctgctgtgcttccccattaatgctcttgaacacctgcctcctttctcctttaactcttctttggttatcttgagataatctctccaagtctttctgttataattgtgygccctaaaactttgaaaataatagaagaattttactgagaaatgtgctccaaggaattgatgtttttacctcttagaggcgatccagacaccccaaatctaaaaatgaaactccccaaagttctatctactattttcttaaaactacatttctgttgcatgtaatattttaaattataataacagtgttttcttacttktgtgtaaatagtttatatttctagctcaaaatttaagctgtttttttttggtattagtcttggaatctaaacaccacttataaaatatttatatgggaaaatatgttcggatgaaaaasctattgacttacaaggtaagatttgtgatcctctgtatttatacaccgtctgtctgcaagttgagccctggctacgtatctgtaaccctgatagcagataacttacaatgaatgtaatagctccatttttcttcttgatcctaattgtttagaatgctggctatatatttaacacaattaataaaactgttaagaattaagagggtgaatattttatcaccattttagggcggaaattcattggctttaaccaactactttgaatcagaaataaaattaaaagcaagagcctgcgcaagaaagataaacttatgattcactgcatgttgcagcagccacaggaggttgaaattttttttcctgatagggggtcagaagaaaaaaataatcttgtwcctggctgctcttgcagataaccccaagagagaggaactggcctgctgtgcaaaygaggttcaagaggatgattctatcctcacttaactctttttgctagaataatttattttacaataaaagtaatatatgttgcttctcacrgcctcctaccaactcatctgggaagcaagctccacgcttcagagtgggtgggctcttgaagcatgagaccatgaaagcaggaatttrtgagtgatatatttaatagaacttatttggatatttcctcaatgtaaaatagcactattcattataggcaatgcagaaaataaagtagagagatggaagcaagcatctactacctcatcatccaaatcatgttattttagcatttggggatgattgacaagtggatagaaactgcagcygtgtttttatccagtgaggtttctctttgggtctgcagtctaaggagtggatctgggmactcacaggacatttcagccattggcatatgttctgctggtatctaagatgggatgagaaaataacttcacagaacataaagttcactggaaaataaagctccacttccccttatggagttgaactggctcagctgaaaggatacatgaacactcaaaattagctatttgctgattttagtggactttctagtacttcttttccagcttctccccttttagccctgagaagtatctaataaaaaaaaaaaagaaaaagaaaaattcagctctgtagagggaataggaagctagtatcattgttgtacaggcaaatgacagtactgttttagaaacacagtcctggcgaacattcaagtaaatattaaaaattaaatagacatgctgtgagggcaagggcaaactttaaccaaaaatatttaaaaaaaggacattggcagagccttagtaggaaatgagaagcatttcccaaaataagaaaaaacgcctttattgattgtcatataacagcttgtggctgcccaataaaacatatgaattcatataatgaaagctgccacaaagaagggaaggatgccataactctaaggcaaacaagacactgaaatggaatttgaggtgaggggaaagaaactgagttacaccaatccactcattcattctttcttaattcattcaataacagcaacttctagcccaagcaccatgcgaggtgcctgggaatttaagagtaagcaaaatagacactgtccttgcaacatggaatttagtaggaaagaraaacattaatcaaaggagcacataaattagtcaatgattgatttaagccatgctaaattactgagaagtaaaatatagcataatctaggagcctggcaggagacctgatctgaatggggaaagaaggtctgtctaagatctgaatgagataaatgagttaaagggamgttgatgaggatgttagagaagagcattttagggggatggggctgcaggtgcagaatccccgaggctagacagaggggagtgcaactgtctcatcaactatgacattggaaagccaggaaaatgggaatgagagtcagacaagtaacaagatagagggttttgatcactagacattctagataaaccatttctcagaagaagaaaaatccaargaatgtcatactgtagggagagctgtacttcctacaggctccatgtacttccaaatagaaaacataataggagaaatatcctattcagtgtagcaacaaaagttcatgatagatcatggaaatgtcctctataaaaattgggttaaaagaaaaaatttgttaatgtaccamcacataaaagatagttgggataaaataactaccatattaccaagttgggagactgaatacttaaagatgtcaaaattccttgattagtttataggtttgaggcaacttcaatcaaaatcccaaaggacttttttgtttctttgattaatattttaaaaacatatattagtatatttacatataatatattaatgttaatcttttcaaaaaggctcaaggtatttacttttctagatattgaaatgcttaatattggtaataataaaagaaaagctaatattcattgaccatttcccacatgccgagcactattttaaatgaagttaaatagcactcccacctccattaactagttacagagattacattaaataattcaagtaaagcaccttgcatagtgtctgacacctaaggggcacaaaataatagtaacaatagttaaaatctcttcgtattttaataccaataattatatttatcttgaacaatcattccccccacccattgtcaaggtgaacacggtgacaagattcccttactgagctaacttatagagaggagtttggagacaaatttcttgcctactaaaaacagattaattgtcattgtggtatgcattttaagcatcattcctgactttgtattttctttcttagttcactctgttttaatttttgctaccttgtatgttatgcgacctttaagctgccttaaatcttttcgggaagatagcaaggtatatataagtaaccttaaaatcaaataaataaagaatagtaacagtaattcaggaaataaataaatgcgacaattaataaagaaatttaaatcatacctgtaattaaagaaatgctaaattaaaacagaaatgagacatttttgcccatcacattagatttattttagtgatatttctcaaccttagtggaagcacattaagatgagcaccagcaaacactattactgggaagctgggtttatgcaatgctcataaatcattttggccatttggatcaagagccttaacagagtttatgccctttcgcccttgactttcacttctaggaatctgtccacataatatagtatgtggacaacaacttattgcaaagactcactgcagccttacttaaaatagcaaaaacttggaaaccatgtaagtgtccaatatgtagcacaattactaacttataatattccatatgctataaaatgcagcctgaagaaatgatattgaagagccttttaaggtgtcaaaaaatcaaaatayaatgttaagtgaaaagtcaggatacaaaaccacatactacattttcaattttgtaatatgcatatgtacatgctataaagggacatgactggaaggaaatatcacgcaatgcatataatgcaacgtatataaaatatcacagcactgttacctgggcagtataattaaggaaatatttattgtattatttctacctcatattttttacaacattcatgtattatttatgtaatgggaaaatacttaataacccaagtaagaatgagaatatttcagacatgagacaatagtggtgacaatatcacaatagcaatatttgctccacatgtgctgctgctgtctgcggcctcaagtgagatgagtacctcaatgagtaccactcccacacaaaaatttttacattttaaagacacttatactgtccacagaggctttcaggagcaaattttcatttccacccagtttattcccctcctaggacttaacacaatctgtaattgtcatgcaatctgtttgttaactgtcccactttatcttgcttaacactgtatcctcagaacctagcagagtgctgggtgaacagtaaatattcagtaaatgttgttcgactaatgaatgaaaaatggcagcatcattggaataagagtatagtgctctgacgtgattastttgaaatcaacgtttttgatatgacctttcaaaatcattcttatactagatgctgtggaacaaataggagaaaaacccctgttgggggcaatgtggtatgctataaaggacaatctggcattggacagctctgtttggtgtctgattccattacatattagttttgtgaagctctgcaagttacttagcctctcatggcttctgtcttctcatgtgagaagattaaagaggataatggatgtgaaatatccagctgaagttcttattctatctaccactggactataaactccatgagagtagagactaaatctttcttatgcaccctgttcctagggcctaagcaaatggcaactccccatttggataattattgagtaagtaaatggacttgattatgacatctattgaagcagaggtggccaayatgagaccagtaggattgaggtagagggtgggagcacctctcatttgcagttgaaattatgtccaaaggtgacccagagtgtttgagccaggacattgtatataattattgtatgtattttgcatagatcattgtatataatttgctttcattaaagcaaataacacctaagaccatgatgcccatagtggaaccgagtctcagagatgtaggatccttgagtaggaagacactgtgagggaatacgagacagatgatgctgccccagcctaggtggttttggatccctggtggtatattatggagttggattagaatcattcagtgggtcttatatggatcakacacacagtrcacracaattagtggaaattggcagggtggggggaatggtatattctttcccttcctgaatgttctccaattcaagaaaccataggaaaatcatcaaggctttgctarttcagattgataagtcaaaaactgaacaaatatacatgtaacttatttatttattttctcacctacttctaaaataattttgaggtggcatctttacagaacttttaaaataactgcagttgtattactttcaaagagatacagtaattcatattaaatacagcaaagtgttttcaattagataccgtgctgagtttgccttaatgaaagtctaagatcatttcctttattttaatacaaacagagaatatgtcaaatttttgccaacctttctcttaaattaagggaaaattggcttatacctttgtttacgttattaaccttcttagcaagtattaagatatttgctatmccaatacatagatactttctatgtataaataaatacatagatactttctatgtataaataaatacatagatactttctatgtataaataaatacatagatactttctatgtataaataaatacatagatactttctatgtataaataaatacatagatactttctatgtataaataaatacatagatactttctatgtataaataaatacatagatactttctatgtataaataaatacatagatacatactttctatgtcaataaatgtgtcataagatatctataaatatttatgtgtgtatttatatacatatatatcttgggtaattataaacaattatcagcatacatgtctattaactctgtgttcacatagacacattaatattattttaaaagttcatgtaggttaaatggactcacatttggaatacagagaactaagttaatgatggtttgctctgtgaagaatcttattttcatgctcaataaatatttatctgtgtatgaagttgcaggtagtcccccaagagggctccttttgtgtctaaaatatacgtattttagctccacaggcacagtgtaaataaattaagttgaaagttggatttttatgatttagcctcaacttgatattttgatccctaatcagatcagaagctagtgtgattcaaccactggtgtatccagtggcaagccaagaatcttaacagagttcaggtctgttgtgaactcagtatgggaaatttggccagctaggactcaattttctcaatcacaactgaatacaagcctactccagccaattgcatggatagatacatagatagatagatagatagacagatagacagatagatagacaaataacatgtatataaaatatatgatgttattcatagcttactttcagaatattttgtcagaatctattaatatttttcaaactcaagaagtgagtttaccatgatattctatcaaaaaactgctgcctaaaaaatgcmaaaaaacagaaaattttaacaatgccaaccaaayaaaacctatcaatgtttccttaaattatatttcaactaggtttttttctgtgcatgacctgaaggcatataattaatggaggtaaatcaattggcaaataagaatgtaaatgaatatgggtatatatttatctcctatggtttstgttttaaatgatgattaaccatyagcctaaaggtgataaaagacttatttcacttcatggtaagaccatagatataatttcaggaacagaaaataaaaatgtcaatgtcaacaaataayawwattaacatgtattacatacctgctatagtctagggactatgctatctgctttaaattgaattttcctcacttaaactttactgcatccatacagatgaggaaattgggctaaaagaaggtagatgacttgtccaaagccatatagctaataaaaggtaaaggcaggattcatacccaacaatatctgatgataaattattcmtactcactatttcattaacacatgcagtaaaaatgttctcccctacctgatttattccaacaagtcctttcctcacctctggacttaggctgcaaaagctgctcataccacaaacatgactgaagagcagagactgctgctaaggctgtgatatttgaatctttgcacaaatggtacaggattcagtctgggatgaagaagcraaagagacacagatgcaggcaggaataactcccacacctccaccaccattaccatcactactccctttcccaaggaagtactgtggcaagaatatatcctctggatacttaataaactaaaaagaagaagttgcttatctgcatagtgtcttccatccaccacctctgtggcatgctgtcagtctcagatgctgccccactctcctgccaccaccccctgtgaaatggcagcttcccttccttctctttctcccctgcagttagacatctccaaatgaagctgtagtgtctcagtatgaactatggtgacaattaatatycccactgttaaatctcttcatcgttactccactctaccttcagcactgctaatgcttaactcacataaattttgctcaaagcattaagtccttccctgttcattgaaatactgtttacattattgaaaggctagaaataatccatagtcaccaagagtagctgggttaaataaagcaaagtacatttcttcatcggaatatggtattagtgttaaggaaagaaattgagcaggttgtgaattatcaaattaaaaagtagwttgtacaaaatatgaatctataataaaattccacataaaaccattgtactaacattttttgttttactgaattggcactcatgaaacagggttgctcaccactagaatataaagatatcagaggcacctcaaatcttcttcctgccacatattctggaagtacccccaacagtcatttcttggaattaagaaattttttctccagaaggcccctacatatactgcttacatttcaacgtaagacaaacgttatctgaaagagatgatactcctgttttctatatgggttaytaatttagacgagatgattttgcttacatagrgaacaaggggaatatatatcactgggcggtttgatgaatttcagggagaagacacaaattatcagatctatagaagaagaaaccagaaaaaaaggcaactggcacagcttcctgccaagattcaaatccctgtcgctctctactcctcataggtgaagctgcttctccctcattttcaagcactgactttttccttgtstttccccaacaaggctcaggaaccaatcctgttctatcttagggagaatttaagatgctatatctggatcctttctcttcagaagtttggttcaaggacaagcagttctggcaactccaggagcttgtcagaaatgtagaatctcagacccaatstcaggctctgccctagacctactaaaccagaatctgcattttaacaagatccctaggtgtattctgcacaatacaatcagagaagcaaagctataggtcagtttccatatgatccaacatcagatcactactgctgctggccccactcttatctttcactcttgaatctgtgacattctaggactacgtctaayaattggttctmttccctcttaacaagcttaatgttccattgacttccatactgtcatcctgcttagctctggccttctcccagcatctgggagatgctttgactcagagtcctagcttgccagctacaattttagcccagctggttgacatcttggataatggacctacacaattatctttttcattgctcacccagaattctcccaccccctgctaaactgatctatgctacctttgtgcmaaaccagcacaaatcagtctatcctctaaagaatttcagaaaaaattccttttgcaagccttttacccttgttctttcccctgtggagatagtaagcagctttatcagcttctttgttgaaccattattaacccatttctcactctgttcttcacattttgtaaatcagttcacaaatcactcttcccagcttctctgaagaaatgaaaggtgctgcccctgtattcacataattttatcatctgcacacttttacacaggcctctcatctgcaattgaawgctgttaagtggaaaaagtattacatactgaaaatacaagtcttttatcctaatcccattattttcttttcatttttacaascttttagaaaatgactattttgcttcactaatatgacaaataattatgacacacatcatttgtaaagtccttcattgcctcccaaacactttcacttcatcacctcaattgattccctacatctttgtgaagcagaaaatgcatctgctgttggaggagactgaggctcagaggagttaagtgatttttccaaggatcaagctgctacttraacccaagttttaatttcagatccatcataatttttgggacaatgtgctgcctcatattaaactatrttcaaaaacatattaagcatacaatgatargaatgcttacagctctcaaagctttgctcagcattttgagagtgtagtttgagaagaacaattatcagaaaaagaaattcataatatgctcacttaattactgttcaatgcacatctagtacttgtgaattaccataagtttttagatggtttaactttcaaggagctgaatatcttgcaggtcaaatatgaaatcaagtagtcagtctactgagagccaaactgaagtccaaaattgcagaatatattttgctttakgtcatgtaccaaatgactaataggcagcgaaggttttcaggattataattttagcccaaggctctggtaactacatgaaatctttgagtggtttatgatatcttaagctgaaattatagctccccatgggcaaaagttgttgaaatgctttcagccattgagtactgtaattaacctgtcctctatagcaattataggaaaaactatattgaatgcctagtcatattgactaatgactttaagtatacaaattactttttaaatgagaatggcaggaaggaaattcattcacccatcaattccataaatatatatgtcaccatatrtattttgtctgtttgccattaagataaaggctaggaatacaatagcagacaagtcagatccctacccgccatttccaaaatcttacactttagcaagataattagaccttaaatgaccatacccatgagatgagtgttacgatgaagaatggaatattatcccaaatatattaacagraacctggcaaactgggcttgatgtgaggaacacagtcagagaaagcctccttgaggaagaaaacatgaattctgaatgatgaattaaaattatgraggaaaagaggagaggaaayctctcttaataggcagataaagtaaatgaggaaaaaaaaagagaccttgaagggagtacacagggaatcagtctccctctgaatgataggaagagctgtgtggatatatgagaggaaaaagtgggaaacgatcagaaaataatttgtataaaataacatagactagacatcaacaagaaatatgtatgtaaatttcacattatgttacacatatatatgatatgcatatgttatatacrgtatataacatagagtatttgtatatcatacatgtatatattatgtataatatataatggaaaatataaagcatgtataatatagtacwtatgtatatttgatatgtgtgtgcataggtatatatawgtgcatgtgtatgtaccagagcagaatttgtaatgataaaacataaagccattttctataaaatgcctcctcttcagtcacaagaaaaaaaaacttaagattcaaagactgtaagataatattcaaaaggtaactaattaagatgacaaaatcagataagataataaaacactgtattgaatgaaaaaataggtacacaattttaaaagagaccaagaggattcaatgtgaaatatttacctgctaaagatgtaattcattttggagaatacaaagattgccaccaaatggaaaagcccagaaagagctcctaaccacacaagtcagctctaaatatttcaatattacttcaaacaattaaattatattattattttcagcgataatacaattttcatttgtattacacttgacaatattttttcagcttagtgatgaggtacacatacaatagagttttagcatagttaaatataarttatcaatcatacatataaaatggaaaatagatacaagaaagattatgtttcagaatatcaaattgtatcaataataagtggaaggtgaaaacaaagtrgagacacaaaccaagagaacaaaatacttaaatatgtgcctaaagttctaaatagcagttcttagatacaggaaaaaatggtttttggttttagggtgagtattaatcattccactccctaaaagttggttttactaggaaagcaacattattttaaaaagtattttatctgtcacaggacagagaaaataaaaaatgataggatttttgaagtttcatcaatgtgcaatttacaatggacacacttaaaacagacgtaagctaaaaaattaaaagcttaattaacatagttcaataagtatagaaattattttgaaatgtattttgtcactttagagttcatcataaattcaaaaatagtaaaagtaatctatttattttctctgaaaagctctgtgctaagtargcattacaatgatattatgaaaataatgaaaaattctaggcatttttgcactaaatgcttcaatatagttataaaaagaaggaagctagtccttggcaattataattcttttaaatcttgctcagatgaaattcctgacacaagtggcatgtgatgactgaagttttaataaccattcatacttggaacattttatgcattaataatacttggagtaaaaatgaacagcattttccaaatacaataactcaaaaataaatggaaacrtttgtgaaaatgtttcatttttgaaaatctccttgggctgagtcaaaccatggaaaattttagctcaaacgaaaattcttcctctttcccagcccccctaaaaaaaatcacaaggatgtgaaaacaggattataatggaagctgtcttgcaacattaactgcaatgttcattctcataaaagccataattcatggctgctccacagcccttttctttcagcaattatgcatattagaggaaagtttgaatacataaaamccaaatgctgatagaaaagcaagcctcataaaagacgcatttactcaactagttttcctcaaaggaaaatgtgaaagctaactaggctgcaccagtccaagrtgtccctagttcaagggagttggagaaagcatgaaaactacagctgcagggcattatacagggcttactgcctgggattttttgtcaacccattggcagtcaactccatcaccagaggacagcacctttggtggagggaggatgttgggacctactactggctctcctgggaatttaatgcaaagttgctcttttgaaaggagagtgccaggagagtacctcaaacacactcttttttcttcattcctttttttcttaatccckgtttcttctaactttcatagggtgtcatggaaaccaccacatgagaactgcccatgccactttgatgaccttcctatttccagaatctagtacagagactggcacttgataaacatttgctggaaaaaaagaatcaaagatttctaaatcctgtttcaagtcagaaatcttggttttgaattttgtctctgttccataactgggtttygtgaccctgggaaagttacttatactctgaacctcagtctcctcacctaaaaatagaaatgaaaattatgactcctcatggcaccgtccccagacaattatgaaataatgtatgtaaaaccttttagcacagtagctgacctgtttaaatgttctgtagttatctgttaaatccaaattcttcattttgcctataattccagagttgtaggagactaaatgaatgaaaaagacagatcttatcaaatttaagggctcagaatccactctagtgattttttctgatacttcttataataggccaaaactaaatgcatccttgacttctctaggaagaattacagccaacatttatagcattcaggatttatgctttgatatatatctttaaaataaagcctattgccatttttaaatgggaaatctcagaagaagctcagaaatattagcaagaattacaaaatttatttataaaatttacagacttataataaccctccaagcaagtagcaaaaattttaaaatctgaaagaatgaccacacacacacacacacacacacacacacamaatggatttattgcatacatcttcagattaacaaatcaaccagcaagctactctttgtgcatagggtctgtggaggatacaaagaataatgcacacaatcctcatcctcagaaaatatgtaatcaaattaacattaaaatgctgcaataaaattaggaaaagcaatgtgttcaccakagtatcaaaaaggtatgttagtatctctgacgactctttaacaaaagtagccttcccacctgactttctatcrcatcatatcatttttccgttccttyctttaattttgtattatctgtaattatctggtttgcttggtgttgtttttctccacaggagtagagacattttctgtattattcatagggattatcaactgatacagattatatattaatggggtctttgttcttgaaactatcactgacccaaggaccctaactaaggtggcagttaagaccaaatcagaaatatgcctgaaacatttcattaaaaaatcattcatttattcttccatgttatttttatatcaattaatataattccaaatatattaataaggcactatgacagattctaaaagacttaaaagaaacatatttccttgagaaatacacacaaataaacaaatatttatactacatcctgactcacgaaataaaaaatagataaaagggaaacatagtacccacaaggatggctaactctttcttgggaagatcagagaaggtttgagaaaaaaggtgatacttactgagttttaaagaaataatagcagtttacccaggaaccaacctttgagaaaacaaaatgtgtgtgggggggtggaattccaggcagaggtaacagcatgtgcaaatgccaaaaggtaagactggaccaaatgacatgagtgctgagattagtgacagaagatcttggtttagtttctggatcctcacgtatagttgttaccactgtatcagtcacctatttctatgataatattgcaaaacaaacaaccataaaatatcggcatacaacaaaaagcatataaatagctcacaagttttgccaggtttggttgacctggtccaaacttacttacctattttgggatcagctggctgttggatgatacacagtggcttcaataatttgctgtggtgatgtggctctgttccacatgtcttatcctccaacacactcattcgggcatgtccttctcatggtgataacagagggctatggcacaagcaaagatgcaagcactttgctaagactgtgcttagaacatgtttgctaacactccagtgactactagcaagtcacatggctaggaccagagttagaggggaggagcctaatagtgacatgacaaagggtgtgaaacagaaaggagaaaagagttggagccactaacatagtcagtccactgcacctacttaatctctagagtttgggttccttttctacagatgaagaacaaaacaattcctccttcctgatatgctatggttgttgggaggaaatgtataggtgttttagaagtattttagctgaaaataaacaggtaagtagccaaaaagttgtcatggaaatctgaaagaatggtgttactctgttcgtggtttgcacatcagctagccacatatttaagtttcaactcctattccatttctgtaaacagtgctccactctttgaatccaactcactccaggtggttcagccatattagcactctcagagacaaaacagacaaaatgcactacacttgtttgagactatgttttgttccagagacaagggtcgtacattttctagactgcagtcaataaaagacatctaggttaagccctggtgtgcatcagtgacatcagcaaaacggcagaacagaaagtttcccagcaaaactctcccaacaaaaatacagctagaaactattcaaaaacaagaatacctccctgaatacaccagaactcataggagaagcacaaaaatcccctgggcccacagaattgagacaggctgcaaccaataagagaaatagttatttcagactacaccactcttccctcgagccagcataacaccattcagagaatttccctagatccatggttgctgatgtgagaggagagaattggaggcgtagattcattctccccaccggtctggaatcttcatgaaaagcccactcttgccctgtctcatgggaaccactggggatgctaatatggctgaaccacctggagtgagttggattcaaaaagcagggcactgtttgcagcaactggtgcacagatcttggaggctacttggcactctaatcagcaaagacaccatgtggctgatgctaccgtgctgcaggggaaacaataggcagggaggcccaaaccctagccagattttccacaaattccatgtgctcacatggagaactctcctggcctggaaacaattataaggcaaggattaagttccagtgctcattttagtctttaccrgactgtgaaacaatggcaggacagcaatatagttttatggcagcttttgagctctggtgcttttgataagtcttcctcagaattaagaacaatggaaaggcatcaatttagttcaagagtagtatttaagttctggtttccattatgtcttcctctgatggggaaacaatgacagggcagtgagttaagttcaatgcaatgttttagttccagtgctcactataagttcttcccataatgggaaaaaaaaacagtccagtgtttaagtctgacattagaagtaaagttctaacaccaccaaacaacacccacaaaaactggaagagatggctgtctcctcaaatgtacaggcatcgaagtaaagattcaaggattgtgaaacttggggaaatactacatcaccaaaagaaactaacaaagctccagcagtgacaaaaaaggtcattacataatgataaatgtgtcaattcagcaaaaggatataacaattgtgaatataaatgtattcaacactggagtacctaaatacataraacaaatattaatagaactaaagggagagattaatggtaatactttaatagtagagacttcaggatcccactttcaccaatgaacagatcatacaacagaatatcaacaaggaaaaattggagttaaattacactctagaccaaatgaacctgataaatatttacagaacattccatccagcagctgaagaatacacattttcctaatagcacatggaacattctccaatagagaccacatgtaaggtcacaaaacaagtcaacaaaattttagaaatcaaaatcatattgagtatcttttcttaccatgatgaaataaaactagaaatcaatagcagaaggaatgttggaaactgtacagattatggaaattaaacaacatgctcctgaactatgaatgagtcaataaagaaattaaaaaggaaatttaaaaattccttgagactaacaaaaatggagacacaacacatcaaaagctatgggattcagcaaaagcagttctgagaggaaagtttacagcaataaacacaccaaaaaagcaagatttccaaataatgcacctcaacgaactagaaaagcaagaataaaccaaacccaaaattaatagaagaaaaaatgataaatatcagagcagaaataaataaaattgagactaaaataaaatacaaaagatcaacaaaatgagtagttggatttttgaaaaggtaaacaaaattgacaaacctttagctaaactaagaaaaaagaaagaagatgcaaacaaataaaaccaaaaacaaaaaaggagacattgtaactgataccacagaactacaaaggatcaacagagaccgttattaacaactatactccggcaaattgaaaaacctagaagaaattcttggaggtatgcaacctaccaagatcaaatgatgaaggaatagaaaacctgaacagactaataataagtaacaagactgaagcagtaacaaaaagtctcccatcaaagaaaagcccaggagctgacaatttcactgcggaattcaaccaaactttaaaagaactaataccaattctactcaaactattttgaaaaaattgaagagaaggaaataattccaaactcattctacaagatcaacagcatcctagtaccaaaaccagacaaagacacaaaaaaaaggcgaaaattacaggccaatatttcactgatgaatctagttgcaaaaatcctcaacwaagtgctatcaaaccaaattcaacagcccctgaaaaagatcattcaccacgaccaagtaggattaatctcaaggacagaaggatggttcaacacacacaactcagtaaatatgatacatcacattaacagaatcaagaacaaaaaacatatgatcatttcaagagatmctgaaaaagcattcataaaattcagcagccctttatgataaaactctcaacaaactgggtatagcatgaacatgccttaaaacaacaaaagccgtatatgacagactcgcagctagtatcatactgaatggggaaagactgaaaccccttactgtaagatctggaacaagatagggatgcacacttttaccacttttattcaacatagtactggaagtcctagtaagagcaattaagcaagagaaagaaataaaaagcatccaaattggaaaggaaaaagtcaaattatcctttttcacagatttttttttatatttagaaagccctaaagactctacaaaaaaaactattagagctaataaattaatttggtaaagttgcaggatacaaagattagtagcatttatatgtaccaacagtaaacaatctaaaaaggaaattgagaaagcaatcccatgcgcagtagctaccaaaagaataaaataggaataaatttaaccaaagaaagatctctagaatgaaaactataaaacactgattaaagaaattgaagaggacagaaaaaaatggaaagatatcctatgctcatggattggaataattaatattgttaaaatgttcccactacccaaagtgatctacaaattcaatacaatccctatgaaaatacaaatgatattcttcaaagaaatagagaaaacaattctaaaattgtaatgtaaccccaaaaggctccaaatagctaaagcaatcctaagcaaaaagaataatcctggcatcagcacactacctgatttcaaaatatactacaaagctatagtaagtggaagcacaatactgacataaaaatggacacataaaccttgcgtaaacagtgtatattgtttcaatgcatattgaagagacagtctcttcaataactggtactaggaaaactggatctccatatggagaagaataaaactagacccccatctctcacattatacaaaagtcaaatcaaaatggtttaaagacttacatataagacctgaaactatgaaactactagaaaaaaacattgggaaatgcttcaggacattggtcttggcagattttttgggtaagatctcaaaagcacaagcaamgtgaggaaaaataaacaaacaggactacattgagctaaaaggtttctgtaccacaaaaaaataaaaataaatcaatatagcaaagaggcaaaataagagaaaatatttgcaaactattcattcaacaggggattaataaccaggttataaaaggatctcaaacaattmtgtagccaaaacaaaagcaaataatctaattttaaaatgggcaaatgatctgaatatrtatttttcaaaagaagacatagaaatggccaacaggtatatgaaaaaatgctcaacatcactaatcataagggaaatgcaaattgaaaccacaatgaggtatcgtttcacccagttaaatggcttttataaaatatatgtaatatataacatataatatataacatttaatatatatattttatatatataatctatatatatgccatcaaggatgcagagaaattggaattctagtacactcttggtaggaatgtaaattagtacagccactatggaaaacattattggggcctctcaaaaaactaggagtagatctagcaatccgctgctgatccagcaatcataccataagatccagcaatcccactgctgggtatatatccaaaagaaaggaaatcagtatatcaaagaaatgtatctgcatctgcatgtttcttacagtgctattcacaatagcaaagatatgtaattaacctaagtgtctatcaacaaatgagtggataaagaaaacgtgacatacacaatggaacactatacagccataaaaagaacttgtcattcgcagcaaaactgatggaactggaggtcattagtttaagtaaaataagccaagcacagaaagacaaaaatcacatgttctcactccaacatgggagttaaaaaaatcgatttcacggagacagagagtagaatgatggttactagaggttaggaagcatggggggaggggtgatgaggaaaggttgcttaataggtacagaaacacagttagaagaaataarttacagtgtttggtagcacagtagggtgactgtagttaacaatagtttatattatatttcaaaacagctagaagaaaaaattaggaatgttcataacacaaaaaatgataaacatttgagatgattaatatcctaatcatcctgatttgatcattacayattgtatgcatgtctcaaaatatcacatgtaccccataaatatgtgcaattattttctattaataaaaaatagagggaaaagggacatctaaataacaagctctgccccagaaaatgggggtatagagaaagtgagatgaactcaaaaatactcatgatgaccactgaaaaatcaacaatggctacttctgaagaaggcaatagaattagagaggaaaaagagataatacatttgtttatgctataaaacttccgtttgagttttacagtgagaatggagtcacgaattacttgtcggattaaataaatgagtatgattttgaagaatttttatgaagtagaactagttaagtttttccataatttccatttcaacagttcaaacattgatacaaatattcagggttattttcattccattttacctttaccacatacatatctatgtattcacactgtgttttttttttttttttttgagtgactaatgtaatttcaaggggccaggaactaagttctgatcccaccttttcaataatcaagtctttgatcttgaacaagtcctaacatcatcaattccrgtttcttcatctgtaaaccaaagatttttaattaaggtgtaacatcactttaaggctaacattctataattctaagaagaaatagtctacctggaaatgagccagtttatctgaaaattatcggaaaatgatgaaaagaaaaatgaagagttgatttggagtttaataagtaaacaaatttaaaaatcaatttttattcatttaaaaaatgaaaattatatgcatttaagttttctaacatgttttatatatgtgtacattgtgaagtgatttttaactatttacatatctataaccttatatagttacttttgttttgatatagtaagaacatttaataactactgtcttaccaaattttatatataccatatactattattaactacagtcaccatagtgtacattaaattcccagaacttattcatcttataactgatgaatatcccgccatcctctccacagtccctggcaaccaccattctactctgcttctacaagtttgaatttttttttgattccacatagaagtggaattatacagtatttgttttcatgtgtctggcttatttcatttaacataatatcctctgagttcacccgtgttgtcataaacagcattatttccttccgtgttagagctgaataatattcgtgtgggtgtgtgtgtgtgwgwgwgwgagagagagagagagagagacatttaggttgcttacatgatttagctactgtgaatagtgctgtaataaacatgaaagtagagatatttcttcaagttactgatttcagttcctttgaatatatacccaggagtggaagtgatggatcatatagcagttctatttttagttttttgaggaaactccatggtgtttcccataatggctgaatcattttacaataccactgtcagtgtacaagggttacattttctccatatcctcacaaacacttgttattattcaacttttgataatagtcatcttaacaggtatamagtgataactcattgtggttttgatttgcgttttcctgatgattagtgatcttgagcacttcttcatatactttgtggctatttgtatatcttctttggaaaaatatctattcaagatccttagcacattttaattgtattatttgtttttgtttgtttgtttgctattgagctgaatgagtttctaatatattttgtatattagccccctatcacatatatcagtggtctgcaaccttttggcaccagagaccagtttcatgaaaggcaatttttccacagatggtggggaaggatggttttgggatgattcaagtgcattacatttattgtgcactttatttctattattattacattgtaatatataatgaaataatttctacattatgatacacaactcatcataatgtagaatcagtgggagccctgagcttattttcctgcaactaggtgatcccatctgggggtgataaaagacagtgacagatcatcaggcattagattctcataacagaatcaytagattctcataagaatctaatgcttgccacctagatccctcgcacgtggggttcacaatagggttcatgctcctaagaatctaatgctgctgctgatctgacagcaggcagagcttaggctataatgtgagtgatggggagtggctgtaaatacagatgaagcttcattgctcacccaccagtcatctcttgctgtgtggccagttcttaacaggccatggaccagttggcctgctggctgaggatatggcttgggtatatggcttgcaaatactttatctcatttcataggttgccctttcattttgttgattatttactttgctaggcagaaactgtttagtttgatggaatcccatttgtttaattttacttttgttgcctgtgcttttagagtcatattcataaagtcattgccaacaccaatgtcaatgatcttttcctctgtgttttctggtaagatttttatgttttcaggtcttacatttaactctctaatctattttgagttggttttaatgtatgctgccaggtaaagggcaaatattattcacttacatatggatattcagtttctataacatcatttattgaagagactatcctttcactattgtgtattcctgggaccttcattgaagattagttgaccatatatgcatggatttattttggggttctctattctgttccattggtcgatgtgtttgtttttatgccaataccatactgttttgattactatagctttatagtatattttgaaatcaagtattatgatgcctctagctttgctcttttttctcaagattgctttggttatttgggttctgttgcaattacaaaatcatcaaytttttagttactttttaaatgaatactgctgtaacagatgatgattatcaaacaatcaaatagctaccactcacagttacttttttaaaccaatgaaatacatttaagtgcaattgtgtaaactaacatcatgaagttttagtttctaagtcaactttttttttattgcatttcgkttttttttttaattttattgttattatactttaagttttagggtacatgtgcacaatgtgcaggtttgttacatatgtatacatgtgccatgttggtatgctgcacccattaactcgtcatttagcattaggtatatctcctaatgctatccctcccctctccccccaccccacaacagtccccagagtgtgatgttccccttcctgtgtccatgtgttctcattgttcaattcccaccaatgagtgagaacatgcagtgtttggttttttgttcttgcgatagtttgctgagaatgatggtttccagtttcatccatgtccctrcaaaggacatgaactcatcatgaactgcatagtattccatggtgtatatgtgccacattttcttaatccaatctatcgttgttggacatttgggttggttccaagtctttgctattgtgaatagtgccacaataaacatacgtgtgcatgtgtctttatagcagcatgatttataatccgttgggtatatacccagtaatgggatggctgggtcaaatggtatttctagttctagatccctgaggaatcgccaaactgacttccacaatggttgaactagtttacagtcccaccaacaatgtaaaagtattcctatttctccacatcctctctagcacctgttgtttcaactttttattttttttcttttcctatgctttaggcatattcattcatccaacgcttagtaagaatttactgatactatctagtcaccagagagacagttcataaagctggtctgctctttcagttttcacttagcctatttctccacatgaactgtaaactccacatttcatgtttagtctgtgtattagcctgttttcatactgctgataaagacataccgagactggaaagaaaaagaggtttaatgtacttacagctcaacatggctggaaaggcctcacactcatggtggaaggcaaggaggagcaagtcatgtcttacgtggatcgcagcaggcagagaaggagagcctgtgcagggaacctcctctttataaaaccatcagatctcatgagactcattcactatcacaagaacagcaagtgaaagacccactcccatgattcaattacctcccattgggtccctcccacaacacatgggaattgtgggagttacaacttgagatctgcgtggggacacagccaaaccatatcagtctctttgctataaggattacacaaggtagtggaaacagaactaacattctggttatgtcaaatgtatgtaagccatagttccacttcactgtctaatcttggccaaattgcttaatctcactaatcctcatttatctcaactgcaaactttacaaatcattccatgtgttttttgttactgatgcatgaaaattttctcaaatttgcaaagaaagaagaaggaaagtgtcttttttactcagctgactgctgccttcagatgcttggctcacaaagcaaaatgctactttagttgtgctgctcttgtgattcatgcagcagaagcaaatgtgctgaacagaaaagaaagataagcaaacactagattagtcataaactgggagattgtctcaagtgtaaatgctgggtagaaagctacaggctttatactatacactatatagtatatatggtatatgtatactgaaggaggcgggggagaagggaggcatccactattcctaaakgtagttattcagaatatatgcctgaatctttgagggttcctccataataatggctcactcactgattctctgagcattccagaacaaagacaaattgactatttagccatgacaaacaaaattatgagataaccccaagagctagcctaagagaaaaataaagcaagaggaaaggatttttctttttattgttattcagtagtttatctttctgtttgtctgatgatttgcttttaggagcctgtgaggctggtttcctggggtctatgctgtataacttcttacctttaggttaaaccttctactgatatttttgtacccagcccatcttgaatgaaggccagattggacatgctttaatatttaatccttctgagttatctaattaagtaaaaactggcattttaaaagttcctatgccatgaggatttgagtagctgtgccaaaaggcttayatcactagactggaggtaaatttatagctgtttttattcatttgcatttcatcagcccaaaattgctgactctaggtttggcaaggaccttactgcctgctcagtctgcagggtatagtacacagctggtgatgggcaatgattcaagagagaagtttgagttccacagtccacaggtcatttttcaccttgaagtttggctgtatagcaagtcaattatataaacaaaaagccggggttattctgatgccataggcttaaaggcatcctcctttttttttttctgtaagaagccctatagcatcagttctggcctcagctgacctagttcagccccagtcctgacaattacagtgaaatcacatcttaaggtraataatggatctaaggtaattatattatgatcatacttacctttaaaagtctcatgtaagacagtatcgtacctggtagttgggttctagaatcagcttgtaagtatgcataacaactgactccaacaacataggctgaagagcctggagaaagttatctcatgtctctaagcttcatttcactcatgcatgaactgcagttattaacagagcctacctcgtagggcataggaaggctgaaatgagatgacgaatgtggagggccaagcgcataaaccagcacaatcaatgatagctactagtattaacagattgttatgggctagttaaactcctacagtgggttgttggctacatgtacaatggctgaactctttcaattagccattttgcagataagggaactgagtctaacgccaagcaattaaggggatagctagtaatgccaaaaacttgtttactgtgtactatagtaatccaggtcgtatacgatagaaccagctctgcccagttttgtcatttactgtttccataaacttayagaagttggttagctattctaaggattttaaaagttcatacatataaaccattcaacagtgcctggcacatggtgagctacatcatgatcatcatcaccattatggttattaatatcccatgctttgtgtggaaacaccaatagtgttggcagcaccagtggtgaaataatttgtcttacacataagggagaaacagacttaactccacaagattacttaacataaaataggatttgaagaggattttcaataagacaattggaagagcctcagtgaactaaaaaggatagattgctccagatgaataaaatgagaagacatggaggccagggtcatagaagaggcaaaacaaaatgacttgcatgaaaagaaagggaaagaaaagaaacaaagagatagaacctttgcagcagaatagcaatgattcctttgtkgaaattctataatttgttggcttggtctccatagtatctaaaagtagacagatacttcagttggagaccatgatgataggctctacactttcattacaataaatgagacagaaaaataccgaggtacatccagaggctcaggaaatgagtactgcagtgctatttcacagatgtggctgagcaaatataattcagaaaattattccttagaaaagaaaataaagactagaaacttattttataaatagtagatggggtgcatgttgaacataggataccagagagaaacaaggagcaattatttttattagccatattcaggtggggaggggacagattgtatttagccctgagttaggatttttcaagctcactcttacatcactttttgtgacctggagcaagtcccttcttcacacttattatgggcctaaatcaccttcctgcctagatcaggaagtagtacagtataatgtttggatacaaaggctctggaattagatttggttcagaactctcctttatgcctatttcctgagttatctgggacacattagttaaattcaagcctcagtttctcatgtgaaakttggagattgtaacaaatattgcttatttagtattgttgttagaggtttaaatcatataattcacgttaaggtgttagcaaaatgcttgaaatatgggaagtacttaataaatgggaaatatttaatagatggaaactacctgtattgttatctataaaaataaaaggatggactaaaagatctgtaacatctcctccagttaaccattgttttctctagcccatgctccatatttttacagcctcccaactttgacatctctcttctagtttatgccctagctcccacctgtaaactgagtggaaaaaagaaatgttaaaatgtccagtgctttgggaagccgaggcgggtggatcacgaggtcaggagatggagmccatcctggctaacatggtgaaaccccatctctactgaaaatacaaaaaaattagctgggcgtggtggagggcgcctgtagtcccatctactcgggaggctgaggcaggagaatggtgcgaacccaggaggcggagcttgcagtgagccgagatggcgccactgcactccagcctgggcgacagagcgagactctgtctcaaaaaaagaaaaaaaaaatgtccagtgtagaagcagaaatgtgtatgagggaagaaggagcaggtctcagtcctcctacagccaccactaagattgctagaagttgaatataaatgtttgaacccccaagggcacataaggaatgtcttgttttagaaaatgtagccgatatatttagcttgttttttcaccttttatgaatgaataggacacagaagccatccgagtgtgacttgtgaatgaaataatatgcgtggatgcattttgtaaacaacactgttcaaatggtgctgttgttgctgccgttgctataactgtgataagcatattgtttataaacccaaaggtcacgggctatttgtcttttaattctataaactggcactagttttttggattaaattatcattaggtttgagtaatgcctatcttatctacagcttctctaagaagaaaaacctttcctggaggcagttatatattagagaaaaatttagaataatatactcgagataacaatatatactagaggtaagtaaactagagattaatagtgcaagttctcaggtttctggattcatgtccttgatctgccatattccagttttgtggccttgagcaagttgcttaatagctccaagtttcagttcctccatttttaaaacggggaaaacaactgtatgtaccacaaaggatgccgtgagcattcaacaaagcaatgaatttaagatcctggcacagtgcctggaatgaaggaggcacctaataaagattagctattatcattattaaaataatagaagacataatatagagaaaataaatatctccactttaatgatatggcagatacacaaagtctggacgaaaaggatgtggaatggaggaaagtggcaaagaagaagttggaatgaacaaaactcagctaaagtgagtgcggtggctcacgcctgtaatcccaatactttgggaggccgaagcaggcagatcatttgaggtcaggagttcaagaccagcctggtcaacatggtgaaacctcttctcttctaaaaacacacacacacaaaaatagctgggcatggtagtgcatgcctataatcccagctacttgggaggctggggcatgataatccaggagacggaggttgcactgagctgagatcgtgcactccagcctgggcgacagagtgagactccatctcaaaaataaataaacaaacaaataaataaagtgagtaggtgggccactggccaatttttataacctcagccttacggggtctgctccaaaagcatctgtccctgggatagaatctaaaatcagtccaaatgtcatactgttgcttcagtttgaaattttgtgaccagagtcttcctatttctagtcctaaaaagaagcaaagagctgcagtagtcaagacctccagtagggagactgatactccaatgcagctagaaataaggtgtgtcatcacactacagcctaaatctggacagtgccaggaagcctgctgacatttattaaaccttacctctgtttatttacctgcaaagatgactctttctttaggattttagaatagagagaaaaatttgaaatatgggagtcaagaagctagttagattcaaattgtctatatcaggggacagcaaacatttcctgtttgggccaggtggtaaagattttaggttttgtgggccatatgttttcttttgtacttactcacctctactgttgtagtgcaaaaacagccatagacaatacataaatgaatgggcatggctgtgttcccataaaacttgattgacaaaaactggtagcaggctagatttggcccatagaccgtaatttgctgacctctagtccctacaagagacttgatgcaatgactcaagttgtcagaagaacctaggctaaggctcatataaatcaaacatgatgtcaaagaatgttgttgactagagattagctgacctaacgtagacggcttcagaaagaagaagggagaggcagcaaactgcttaaatttaaatggaggaagcagcttctgtggaagaaaataggaataacatgaaaaagaactgcagcataagatgtacttagtaattcacattagaaaaaatacagggtggacctcagcaacattctttttggcattgtttttctgtattctaatattcagagcatgagtaataactagggtaaacatacatacttgttttccaggatagtccgagtgtgtcttttgtccttgtgtgatcatcaatagtgtcccccttttagagaactgtcccagtttgcactataaattatatgatcacaactataataaattgattctgaagttgcagcacaaataggtatatattaattggtatttattagttggataggtatatattagttggattttcacragacttggacaataatacaagtctataaatgcagaatgtagtgctagataagggtatgttaagaacttcaagtcagggttggttttaaatccaactttatcactttctgatcatcttagacaaggtgtttaatctccccgaatcacagctcctcatatgtaataataaataataaaagtagcaatctcattagatatgaatttattagcatataataaatattataaaatattagctgttattttattattattatatattcagatagaatcaattggttgtgtggagacaaaagtcacctttcatttacagaagctatgcctcaaaaggagtaattttcttttttttttttttttttttgagacggagtctcactctgtcacccaggctggagtgcagtggcgcgatctcggctcactgcaagctccgcctcccgggttcacgccattcccctgcctcagcctcccgaatacctgggactacaggcacccgccaccattcccaactaactttttgtatttttagtagagacagggtttcaccgtgttagccaggatggtctcgatctcctgacctcgtgatccacccgcctcggcctcccaaagtgctgggattacaggcgtaaaccaccatgcccggccaggaggagtaattttcttgtcactggagacgatcaagcagagacgtaacagcgtaacaggcacttcataggaatattataagtaaaatcttgctactcaaagcctggtccataaaccatgacatttgcatcaattagcagtttgttggtgcagagtcttaagcttccacctagacctactgaattggaatctacattttgaagaaaccttagtcagtacatttaaccttgctataaagcagcagtccccaacctttttggcaccagggaccgattttgtggacaattttttcatggatgggttgggggtgggtggtaatggtttggagataatccaagtatattacatttatcattagattcttgtaagggatgtgcaacctagatctctcacatttgcagttcacaatagggttcatgctcctatgagaatatcatgccgctgctgaccttacaggaggcagagctcaggccataatgctcacttgcccatggctgtgtcacctggttccaccagaccacggaccattacctgtccatggcccaggggtttgggacccctgctaatcgtccactgatgactcagacattagtggatgattagacttgcaaagccccttccatccctgagaccacttgatactatagcatccacaggttataagtggataaagtaatgcagtagaagggagctgggaattcaatacatactatatcctattccactaggcaagttaggaatagccctttccacccaactccaaagaacataataccaggtccagtgactacatttcactgatgaattaagtactaatctcagatgggtacagatgaagaccttaaatgagtatactcagcactgggattattttttaatctgcaacattacatctaccttggatatagcaacttgattatttcccgagttcgcctcattttgttttgagccatttctctgctttctcgggaatgtctgattattctccatgtaggtactctgtgtagaggtcagtattccattaatactgaacaattcacatacaaatagacagtttaaccttagatatttccccaaggcctaaaaaggttgatgcaaatataaacagaatcggaagagctggtgaggtatttagctgaaactttaaagaaatgcttctctcactgggacttcttggtgatggttgtaatgcagctcaaatgcttaagctgtttgtacacttttatcctttttccttgatgcaggctttctgacatccctggctgtctgaattacacacagggtagaccatcctggcccactgggttgcatcaatagcttcttagatcccttttctgattctattattctgtgactgctgagtagcccatggttatttttcaatataatctcacacasagaaagaaagaagaatatatcattttgaaygaattaaagtaacaaaggaaaaaattarttttaaggagaaaaaagacagcaggaggtgtgataaaaaccaccaaatttttaatgtatctaacctaagagaatttcattcattctcttaataatgatgacaattcatttattatgtcattatttatcaagcatatactatgtgctaagccctgtgyttgttgcataacaatgataataataatagcagctaacatttgttgaagacttacaaccacatgaatgagatcactatgggcaccatcctcakggaaacttacaatctagcagggaaggcaaattataaaaataatyccaagtgttgtcagtgctatgtgaaactgtaggtataatgggagggtgytacaggtctaggggtcagtgaaggttttcctcaggaagtgacatttaagagttagctagacaaagaagtagggatgaggaaaaagtgtcccaggccgactgaagactatatgcaagagctctgaccaagcaaaatgtttgttttggaaatgagagaactggccaaagcttggaaggccagggggagagcaggacgacaaggctaggaaaaggaaggcaggagccaaacatgctgaaccttagaggccatgtgaggagtttggacttcatcccaagggccatgggggagccattgatgggcattaagcaagtgagggacatgatcagatctgaattctaaaatttctctgagtggatcagaaaggaagaaagggaatatgtggatgacagaaatgatggtgactcaaataagagcagtggcagtgtttgcaaaacatctccatgttagagtgaggtccctgtcaggctaataagatgctttctctcctggagtctgcttatttgctaatccttgaaggaactttcaattctcagaacctcagaacctttgccttcacagagccaataagacagatatgggagctgatgagcaaatacaacagaaagtcatgcaaaggaaaaacacraagagacagtcctccagcagaattctgagcctgggtctgctggttccctgattccttccatgctttggaaaggaacgatgtgctggtgcattcagaaaagaaaatgagacccagaaaagcaggatttccctaaaaatcctggtcatagaccataaaagtattatcacaacataatgtaaagaatgtatttctggaaggaattctgtttctatatgagagaaaggtattttaattaatgattctacagcccttttaccttaaagagagggtttgtttagaaagcttgagttgtaagctatactgttagcttagtttgtgctaagtgagatgacaaagctgtcaccttcctctaagttcaaagaacagttatcaattaattactcatcaagtattttcttgagcaactacaaaatgaaaggcattagaaatacaaggataaattaaaattaacattattcttgtttacatggagcttccagttagtgaagaaactgagagtctagacgctaatcacatgattacataattaaatttaaaactgcaactgtgatagattctacaaaagataggtatatgtactgtaagggcttacgaaaaaagaatctggcctacacaataagttagggaagtaattactgaactgagagcagaagaatgcatataagttaaatggataaagcaggatagaaaaatagactagataaaatgaattaacttgacaaacagatatagactacctgcaaggtgccaaaggtcgtgataggtaactgtattacacaaacaaatgaaagttggtctgcaagttacagaaaataggatgggctgaagcttgttaattcctagttgtgagaagttggtgttactttaactatccaagcctcagtgttttaatctgcaaaataagaaaataacatctatcttgtaagattattgtgaaaattttaaaagcccttagcttaccgtctggcatacaagtagcaaatccagacagagggagtcagtatgatatagtatcagaagcaatgttacacagttgtcaaaagctgaatgtctttgatcaggctgaattccaatcccaggtacaattactagctctgtgaccttggacaaatgacacactttctaatcttcagtttctttatgtaaaaagatgatagacatatctacctcacatttcttggtaggatcaaaggagataatgcacggaaaggtcaaagattacttaaataaatatttgcctacatattttatatgtacaagctactatatcagcacagataaataagtagttatgtttctctattgttgttgttttgggtaggagggtgaagctagacaagaccaaaggcttcacatagaaaattttcacctaggtctttgcctacatattttatatgtacaagatactatatcagcacagataaataagtagttttttcattgttgttgttctgggtaggagggtgaagctacacaagacaaaagactttacatagaaaaatttgacctaggtcttgaaaaattaatagatgttggrcagacaatgctgataaatgtgccttgcgcaagccatacgactgcaatttgctactatgagaacagccccgggggttcaaggcataaggataatatttttaaaagcctggtgagttcctcctaataaacatcatcgcttcagttgttgtcatgagctagaatgcaagatgatgtagtagataatagcacatgctttgaaataagatagacatgggttctgagccagtccctrctacttacaactgcatgaccttatgcccattacttcacttctctgagcttcagtttactcatccctaagaggaagtaacaacagtgccctcttcacgaagctattatgaggattcagcacgataatgtatgtaaagctctaagtatcttgtttggcgcataataagtgtttaataaatgttaagtattgttattattgttgatgtggcattaaggttatgctggcataaaacattagaatttgttcagtgcatggaacaattacattaaacttagagcaagctatattacttacttaacagtggaataccaaagaaatacaatgaacaacaggttttaagagttcctatatggcagtggttgcaggtatttatctttgtcaccctagtaactttgagarctctacagagtaggccttcaataagtgttgaataaatgaacgattttgctgattttaaaatattttttatacttgtaaacatggtaagtgtttctgcagataatctgtaaataaaaaatacatctgtaaattcaacaccaatgtgttttcttccaaggtgtgtgtgcatgtgcgtatgtgtgtgtgtgtataatatatatgggaaatcatggcatttaaataaatgtatacatgttttgttttgatcataccatatgaaagcttttttccacttgccatatgagcatttgccttgttttatgaaacatactttacaaacatgatttatatgttgcattacactctataagaatataccatataatttatttaactattaccttattgttacacctttactgtgtgtcaaaactaattcatcttcaaatatatgttatttgtcaccatattcagtgagttcttaatcatttttagggtaaacaacttaaaaacctaattattaaaaaaaatactctgtattatctccctcctagatgagaacattttatgaaaacactaaaaataaattcaataaacaaaatgtaatatagcctaaaggtggctaaacacaaaagtgatgtagtcacagcattagcgcaggtttattgtaatctcaggatgtaaggttttaacttggcctttatgttattctaaccaaggagtatcataatctttattatgaatgtacactttgtctgatatgcagtttacaataatgagactaattctacatgccaatttgcatggcttctaaagaattctaataggttccaatataaagcaaaaaaaattgttttgtattttttgtttgtcgtttccatctgtttgcttctaaagatagagcaatttctgatgtaaaaagcatgtagccatgtctgcacatttctatgtacatgtttctgcctgtgggggttasaaaagttccgaattattattaagtttcaaagaattatgaaaaaaatgttaaaaaacacttctaagaataatttttatttaagccatttctttttctccctcatagttacatcatccttcccaaggattccgctttggaactgtccgagaaagcagtgctgaagattatgtgagacaaagtttcccagagatgcatgaatatatgagaaggtacaatgttccagccacccctgatggagtggagtatctgaagtgagtgtcaacctcttggatccaaagaaaaattctcactgaagagaagtaatttagctactgacgcagtatatgttagtttctgaaaatgacagatgaatatacccacgttgtrttaagtaatactttacactgtgtgagatcccaggagatggtgtgaaatagtgtgtatttaattatgtgacctagattacttgtgacctgcatagtctcaagttggtagtagctttgttcaaagagtcagtggggccattagcatagcagatggtggaggaagtaaatgttggctttacatcacttgagaatacaatggtgctgaaatagtcaaacacacagggaatakggccagaggataaagtgtcccaaggcaacgttttccttcccagtgaatatatctctaaacccatggaatgcctcctcttgccatgaggaaatggagtttatcttagagatttcctgtagaaaggaaataagatagaagacaatgattcccatgcctgcattcttctcatcagaatttatgagaagcaatcatgagaaatcacactgccatggcagattatcagagcctgtaattcaatgaagttgaatacaaaggcagacagtgcagtgatgsgtctgttctgtctagtcttcctgagaaaagggaaagaatggttcctgaaaaacaggaagacatgagggtgagtagtcctctccctcctgctcgatggaatcaagataataacagacatccacacctccaattcctagaattgtgcagcatcaggaaactggtttctccatggtcagcatcaataatctccccaatggacagcaggatctgccacctcaaattcttttttaagaaagaatagaaataaataaataatttcatggaacataagggttttgtctttctcaacaactttagaaacatgccacttaaaaaattttatggacttttaactatagcttagagaaaaagccttgttctctcatatttgcaaaattatacatgatgtgtaagtattatgaaatgccacttttaattttgcaagaacatcaacacattacagtctctctctgacatgaagtttagagtccctttacctcccagatcttcttgtgtattctcttcttcaggcgaatttatggttgagagaaagaataagatgtcagggtagcaatggcttccagctcaatagaaatagcagacaaactaggctctgctgacagtgtgaaaaaggatgagatgagctactgctgcagtccccagcagttccactccactcagggcattcacktatctcaggagctttacctgagaaggcccacgtgcccagcactggccctgccctagcctgaagggaagcaatcttcaggaaagcrgccacagatgaaggcccaagacaagtcaattttccttggtaataaactagcaagtggcagagtcaggactaggaccaggtctctggaatccaactgctgcttcagactagtctgggaacgatgatgaaagagtaggtccttgatgtttgcagaatagtccatgttccagcaacatctatgttgcagttagtatctgaaagctagttagaaatgcagcaactccagcctcatcccaaacttactgcatcagaatcttcattttaacaagctccccaggcaattcactgattgaggtgaaattggmatctaggcagagcttatcattaatgccctctcaccacttctctctgggccttaactctccactttcagcctagtcatttcctgtgccctcagccaccacttcccgcaaccacagtcttcatgttacctccctggcatcccagagctctgacctacaaggcacaacccctagcattgcctgtgcaaggaacttttctacatattgaacctgtcctttccctctcccatcaaaattctcctggacttaattctgctctctcagggccctgctttctcattaacagttttccaaaaaattaactcctactaaaatgcttattccttttattatgttaatatgtgactggttttcttgtgatgtgtgatatgtatttttaaataatgcttaagaaaagacagggcatgattctataatagaaataaccattgggggccctgtgaaccacaacagtgattcagccaatctagaagctacttgtaactggatcccacttggccatttcctcaccagtgactcagggtcccaatggagtctgagagctgactgcttttcgccttttcacgtaactgaaatttatcatagctatctgcactttgcagtcyaaaatcaagagtagttatttaaggaaggatcccagagacattaggcttcatgaattactggttttaaaaaactgaaatgaacctcatcttttttattgtcatattgctaccacaaatatttgtggaatattggcaagtgataacttgtkgctacgtagctgtcaaggtacattatggtactgtggcagtcgaactttgattggagaaacagctttcagctcaatttttattttattgccaggattccattaagattccttatcaacttctaggagacaatccacatccccaacactttctaaagcttcccattactgtagagctgggagatgcttcattttggttaaagttaaatttgggcctcattgtaacttaaatctgatacccctttgaaaaggggatgcattttaaattggttatttcacttatttgaagagtaggataagaaagcaacggtcattggtaccaaaaagggaagctgacctgccaactatgtgtctatacatgacccagacaaagccattcgtgtaaggatgtgtttcctgccctgatgaatcttctgggtgtctagggatatctttctctttttgattttctatgaattctagtcatattctcctctgtttagaagccacactgtgttaaattagaacagcctcaccactggatctaagagaggaaggactgagcccagaagggatagaaaagagttattctttttgcaaagctgtttggacaactctaagggtagaaaatcctttcttttttttcaaattaataaatatttttatttttaaaaaataaatacctacacctacacaataaaaaggaactgaggtagtcatcgcatgagatagaaagaagtgtaatacagagttctggttcccaagaaacttacactttaactggggagataatatagtgcacaaaatggttgcttttctgrtcttcacagaatccattccctctttttggtcacagcatcctgcatttcttcatccctcttctactctcactgatttatatgaggtgaaccccacccctggctccaggtgacaccacctagccaataagaatgatagtccagactttttaatgattgccattctaactgctgtgagatggtatctcattgtggttttgatttgcattactagtccaaccattgtggaagtcagtgtggccattcctcagggatctagaactagaaataccatttgacccagccatcccattactgggtatatacccaaagaactataaatcatgctgctataaagacacatgcacatgtatgtttattgtggcactattcacaatagcaaagacttggaaccaacccaaatgtccaacaacgatagactggattaagaaaatgtggcacatatacaccatggaatactatgcagccataaaaaatgatgagttcatgtcctctgtagggacatggatgaaattggaaatcatcattctcagtaaactatcgcaaggacaaaaaaccaaacaccacatcttctcactcataggtgggaactgaacaatgagaacacatggacacaggaaggggaacatcacactctggggactgttgtggggtggggggaggggggaaggatagcattaggagatatacctaatgctaaatgacgagttaatgggtgcagcacaccagcatggcacatgtatacatatgtaactaacctgcacattgtgcacatgtaccctaaaacttaaagtataataataataamataaaaaaataaaaaaaatttttaaaaaaggaatgatagtccatttccatggtaacaatatccagggatgggctcaggacatagtcacaataaaagcaaattagactaagagcttttctgaaactgttcctcatagaaaatcctttcttaaatggatgtatgtctttcacctttccaaaaagaattggaagtggctgaaaacaaagaaatcgttgcatgtattttagacagttatttccttttaaaacttctccttccttgccctctttgtaggtggaagctcagcctatgctgagactcacccttcatctgaacctagtcccaacacttactagctgtgtaacctggtttaagttacttcaatcctctgagcctcaatttcctcatctgttatatcacagtcattctgagtgataaaaggtatagagaacaatgaatgcaatgcctaacaacaagaagtccctctaacagtgtaataagaataaacattctctatgcgcttcctattcaattcagagtggctctggctttactgatggatttagaagtaattaaaggagctggtagataaactcattggaaagatgtcatgctgtcttataagagtgcctgtctcccctggtctgtagtctagacrtcagtgagaagccaagacagctaagtcagcacctaggtagcttgtgcggcccttagtgtycgggttctgtccyctaaacaaaagccggctgtcagccttcatgcttccttcccattaatgaatcattttcacttttctcctctggtcttaaatataggaayratccagagaaactagacrccttcatcatggacaaagcccttctggattatgaagtgtcaatagatgctgactgcaaacttctcactgtggggaagccatttgccatagaaggtattaatcagtcactcttgattcacttttactcaggatgtgctcagtttgccaacctagaaagtcacaaatgccaaagtcagaagcaaagagctattcatcttccctcgttttcattttcaactcataagcacttagctattaagttgctgaagttaggaatttatttttcacctattcaacaaatatttacttatccaatttttagggggaaaaatcattgttacccatatgatgttgtttcagatatctgggagtggtggcacagtgtaataaattttaatttaatctgtattgtgtgtgtgtgtgtgtgtgtgtgtgtgtgtgtgtgtttagtggcagggtgttgctatgtgctatgttgcccaagcttgtctccaactcctggcctcaagtgatcctcctgcctcagccttccaaaattcagggaaatctgtattttctaacagccaaatactctagcaaatctgacagaaaaactagratgattacattttacaactgggagggccccaatattgatctaatgcaatctactcatttgataaacaagaaagcccagggacattacataacattttcataattgtacaattagatgataatactgggactgaaatctaaagctcctggttcttaaataagtattattccactggttggaaaataagtagaaaaaaaaactcattctatagtttaatgccctttaaggtcccaaacaaaaccttgggatccttgtttgggatctcaggtctttttctccactggcagcaaatttttccttctaatgtgatcwcccaatcaatcaaacttcagaaccaaagaaagattgctttgtcggtagctcctttcattctgaatgacggttgatatayggagctgatagtttgaaccagcaaatttcacttctcccaattcccagcttcccttcctgatagtgcatgctggctctcgagacagccatgctcacttgacagaaaacactttggcttaaaacaatcccgtgggggtgcccaactgctatttccagaaatctgaactttcctgtatgttaactaggatatcaagactattctgatttcaatttcccaaccacagttagtctctgtctcctctaaatatatcagcagattaaaatgtttacctctgtctttgttttcatgataaatgagaatgttacagctgatgctatttctccacatcttctcctagcagaaatcagtcccctctccaggcaaagtcacccccacctgaagcagggatggaactcagaaagagaggcaattagcagtagtggtcttctattaagactaccgtcttagatagcaaagggagaaaaagaaaaagctagaaaaataaacaacattcagtatataatcccattttaatgtaacaatgaaaaatttctccttttttgtggcatctggggatgttacattttatttctgtcctagatgcactgggtaactgagatcccttctgccattaggagctactaacaatgaatcatgggtagaggacacaagaatgaggggctccattttccacctttatcttcaggggacaactctatcttgtcaaaagacagtggtaggatggcttgtttgcctctgctggaccctagtgccagatgccacgcaattaactccccactggtttcctgtttacatttccatctgtgttcctgagacttagtgtcttgcagttcccaacatctctagacatcacattgttttcaaaggagatgagcacaaaatggtgcatggaaaagccctccctgcaagagagtagaaatactgcaggttttaattgagagaatattgttatcattgtgaggttattctccaaatggatggggtacacatcagaaaattaattcaattctacttctgacaataagttcataccccaaaaacataactcagtaaaatacaaaaggatacgtataaattacacgaaacaatgtggtagaaatactagtcaaagtcttgattgctacttttcttaaaaatatgaatttcacaaattgttttttttttttttgagactgagtctcactctatcatccaggctggagtgcagtggctcaatctcagctcactgcaacctctgcctcccaggttcaagcgattctcatgcctcagcctcccgggtagctgggattacaggtgcccaccaccacaccccgctaatttttgtagttttagtagagacaggatttcaccatgttggccaggctggtctcaaactcctggcctcaagtgatcctcccacctcggcctcccaaagtgctgggattacaggcgtgagccacctacagtctaaataataaagctcacattttaataagttcaagaaacttaaatgttattagaggatagcatatatttttaacaatttaattgagagaaataatttcatgaatttttgagaaaatatttctctcaaattgttaaaaatatatgctatcctttgacaacatttaagtttcttgaactttttaaaatgtgagctttattattaagttagactgtataggtataaaaaatcatcaaagcggtgtatgagcaatacttggtcatttagtttacaggaatgttttatatgcctacccataacctttcacagggcctagtacaatgctaggcatataacattaatgtaataagtgatgtattacctattaaataactaattaggtttgaaataggtacctaattcactcacttaggtagttaatagcttgtacttatactttcccaaatgtttaaatgtacttaggagagaaaacagagtgcaatgattccttcatgctgaatgtactgtcactgcatatagtagtaacacactcagtactctatgtgtgacactcagtgtaactactgctgtggtctgaatgtttgtgcctccccccagattcatatgttgaaacctaatccccagggtgatggtattaggtcatgaagtttccaccctaataaaatggaattagtgcccctacgaaataggctcaacgaagctcattcacccttttcagcatgtgaggacctagctacatggcaccatctatgaaccagaaagcaggccctcaccaggcaccaaatctaccattgccctgatcttggacttcccagcctccagamctataagaaaccaatttcttttgtttttaagtctcccagtctatgatattttgttatagaagcctgagcagactaagataactattaactatccctccaaacttcaccattctgcatttattttgacttaaaagggaaaaataaggcaaataagggacagtggctccacactgagtttgaaaccctttcatgagtactcatcrgtacrsagtatatagcaaagcaaaccaaaactattaaggatgcgaaagcatgtggaaagtctttggtcgaattaaaaaccataaaccaggggcacaaatacatattgtgtgcaggggagaaaaaaaagtgttgagataaatgaatacgtgtctccaatttgtgcattggagttagctgacaataaagctcaaacaaggagaaagagtaacgtaactgcacaataatgatgtgtgatctttctgccaaagacctttgcctgtttatgagtttgttcttttacttgctttccaataattatttaatgcaatgcttggaacactggctctggagtctgagtacttgggttaggataaaattgctgttattaactggcaagttatctaatctactcttcaggttcctcacctgcataatggggagatgaataggaaatttatgatagaattgttgtgaggattaagtaatacatataaagcatgtactgtaggaacttgtttggcacataagaagtgctcaacaaattattattatatagtatattgattaatrcattgagaccaattaactgtaaaattcttccaggatagtcttcmtaagtctcaacttctcccacacatttctctccccactttgatatgctgaggctaagggaaacccattttatagtacctttatagttgggaccattacaatatgttctcaaccattatcccagagtagctaaatatggtattccaaggacagactgcaaaattgaataaatctttcaccctgaagcctttttaaccctatctgagatgctattttcaaaacatctcttttccaaccacatttcggaagattcttttagtctatgaatttctaactatacatttgctagctaaaatatatttccaccactcttagcttaataaagctgatttatccatggtgaaaagatcaggattctattctgaaaactgttctcttgggccattaagctgtatccaatttccaggatgcctgatgccttcatctttagagttgaaggattccattttgcttcattcatcaaccacaaaatagtcaaccctgtctttattgcaaagccacatttctagtaataatgaaagcaactcaggctgctcagttgagtcagcaatttaaaaatgagaattctttgaccaatgaacactagcaaatttgaaaagcaactataaatggggacagaaataaaaccctcaaggttttattttatgtttttgaataaaatggatttttatctcttttaacaaataagtcttctcatcatcacataatttattttcctatttttcccatcattccatatgcatagtttgttttcattagctaaaaatgattattattgctagaaatcattaaaatatcaatataaaagtgttcctatttctccacatcctctccagcacctgttgtttcctgactttttaatgattgccattctaactggtgtgagatggtatgtcattgtggttttgatttgcatttctctgatggccagtgatggtgagcattttttcatgtgttttttggctgcataaatgtcttcttttcagaagtgtctgttcatgtcctttgcccactttttgatggggttgtttgtttttttcttgtaaatttgtttgagttcattgtagatgctggatattagccctttgtcagatgagtaggttgcaaaaattttctcccattttgtaggttgcctgttcactctgtcactctgatggtagtttcttttgctgtacagaagctctttagtttaattagatcccatttgtcaattttgtcttttgttgccattgcttttggtgttttagacatgaagtccttgcccatgcctatgtcctgaatggtattgcctaggttttcttctagggtttttatggttttaggtctaatgtttaagtctttaatccatcttgaattgatttaaatgtggcacatatacaccatggaatactatgcagccataaaaaatgatgagttcatgtcctttgtagggacatggatgaaattggaaatcatcattctcagtaaactattgcaagaacaaaaaaccaaacaccgcatattctcactcataggtgggaattgaacaatgagatcacatggacacaggaaggggaacatcacactctggggactgttgtggggttgggggaggggggagggataacattgggagatatacctaatgctagatgacgagtagtgggtgcagcgcaccagcgtggcacatgtctacatatgtaactaacctgcacaatgtgcacatgtaccctaaaactttaagtataataataaaagaaaaacacacacacacacacaaaataaataaataaaataaaataaaataaaatatcaatattcaatacatgtatttaaacagaaattttaaagggatagtaatctgtttttagcaactgcaaattaacctagacatgatcgagtggagtgatttaatatttattatttcttgtgtaacattttttataaatgtctctgaaacttcaacatagctttttcattagggaatcttaacacttttgttgtagtgccaaaattctattcttagaatatgtagatttatcataagtatgaagttaagaatttaaaactttcttatcatatacttttgtcttatctaccaaaaatatcacaatcaagaaccaattcaagatgccatctttcatcctctcctctggtaccaatctcttgttcctttgaattttctttttttttttttttttttttagacggagtctcgctctgtcgcccatgccggactgcggactgcagtggcgcaatctcggctcactgcaagctccgcttcccgggttcacgccattctcctgcctcagcctcccgagtagctgcgactacaggcgcccgccaccacgcccggctaattttttgtatttttagtagagacggggtttcaccgtgttagtcaggatggtctccatctcctgatctcgtgatccggccaccttggcctcccaaagtgccgagattactggcgtgagccactgcgcccggcccttttgttccttttttttttttttttttttatactttaagttttagggtacatgtgcacattgtgcaggttagtttcatatgtatacatgtgccgtgctggtgcactgcacccactaactcgtcatctagcattaggtatatctcccaatgctatccctcccccctccccccaccccaccacagtccccagagtgtgatattccccttcctgtgtccatgtgatctcattgttcaactcccacctataagtgagaataccttttttaatgcagatacacaatctttttctttaaaagaaaaaggcttgagatgtgtgtataaccaataaaagagatgaaataacgcataaaaaactgagttttaatggattgtatttttttctaataacattatttgttgcttaacaataggaagtcaagaaaatgatgacaacgtcaaaagcatgattagaattttccattcaaagagctattttgagtgcctgttttatgcctagaagttttggtttgaaaggcaggactgaaaacaaaagagtttggatgggtagcttttgattctgctgatgttattattaaatracattttaaaatataatgggtaatttattagaaggaagtaatcagctttctttagaaacataatgaatgctgttgccaattcaactgcacaaacacttattcaggacttatttgcacatcatgcacaatactaggcacaagcgtataatagtcactgattcactgactcactcacacattcatttattcattcactcactcattcatgcaacaaatattccctgagtaaataggcaccatgttaagtggtcaggacttagcagtgaccaaggtggatatggtctctgctgtaatggaatgtatactctacaggggaaacagatattaaacaagacacagcataattattatttcattacaactgagataggcaccataagggagaactgggccatataagaacaaagtgtaggaggacttgctactatctggtaggagtgggttgatggttaggataattagccaggtttgccgaatatcaatgtgtttttcctccctgggtcaatagttttcaacaacagcaacagattgtggcacacagcttggttaaatcatccttggattctaataataagtactaggacatactgggctctactgtgccccaagcactattctgcatgaatccctacatgaaaccacgccagaatgtgtatcacttggagacttaaagattgaataaataggccgggcgcagtggttcatgcctgtaatcccagcaatttgggaggccgaggcaggtggatcacgaggtcaggaaatcgagaccatctggctaacacggtgaaaccccatctctactaaaaatacaaaaaattagctgggtgtggtggcgggcgcctgtagtcccagccactcaagaggctgaggcgggagaatggcgtgaacccaggaggcggagcttgcagtgagccgagatcgagactctgtctcaaaaaaaaaaaaaaaaaaaaggaacaaaaatcagtgctcttgaaattgaattgtaagctagaataattataggaggtatttgtttccattaagtatctttggatgcttgacaatcttttagtctttatccatgaaaaatgaactatatttttaatctctcttcctcaatcatgttgaaggcaaaaaaaaaaagkgtttgggtttttttttttactattctgtccaatagctaaaacawaatgtagctaattagcttctttgacatggctgagcaaagagattaacagtatagtaacattttggaaagcaagtaaagccacacagtgtgargatacagagtctaagctgactaataaaactctgacaacaaattaactccatttttatgttcctccctcattccttcccctgcctcccttgccctgcattaccaccaccctttcatttattttatccttggttttgttaaaaataataagtattatcacaggctgggcacgtggctcayacctgtaatcccatcactttgagaggctgaggtgagtggactggttgactccaggagttcaagaccagcctgggcaacacggtgagaccctatctcaacaaaaaatacaaaaattagccagggtggtggtgtgtgcctgtggttccagctacttggggggctgagccgggaggatcacttgagcccaggaggtcaaggttgcagtgagccatgatggcaccatggcactccagcctrggcaacagagcaagaccctgtctccaaaaaaaaaaaaaaaaaaaaaaaaaaagtatcacatatatatgcatatatatgtattcctaaaactatattgtttggttttgaatgttttaatatttacacaatgaattcatgctgcaagtaatcttctgacactgacctttttcattcaatggcatattactaaggatcatccatattgttgcctctagttctagttcatatagttttgattatgtaatattccatctgtgcaaatagtccacagtttcattactcattctcttgtcaaagaacatttgggttgtttccaatttttgctattatgaacagttcctctaagaacatttttgtacgtatctcctgatatgcttgtggcggagatctttgggaatggactcaggaacagaattgctggtcttaaaatatgtcaatattcaaccatataaaataataccaaactgctttccaaaatgtttgtatcaattttcagtttatattacagcaagcaatatataaataatcttattgatcctcatcttctttaacacttagtattacttcttatttatttatttttggacaatttaagttgatttttataarttcctgtttatattttagttctcatactgtattgtttattcacatggttttattatattattcaaaaattaaaaataaatttaaaaagtaagagagggtcatgcattaacaccgataagagaatgtcatcaaccacagactaagattaatctgattttgtatatttaaggttcagaagaggggttctggaagaggtagataggaaatcctagccctgataaagacctcaaagattgcctctaaggaatgtcttaatgggaaaggcagaagatcttaaaatttttcactaatgcactgtgcacagcccattcctctccttttccaactcaattcatctactcagagatgcagctgatttaagggtaatcatgactaggaatgtctttgagtgctttgaaagaaagttgatgaaaactcatcacgccctttttttggtctgatggcagtatcacacaaatatgtactgtggtggcaatctctcaggaagggtgtaaaaaactcatctgagattgtattttcttctaggatacggcattggcctcccacccaactctccattgaccgccaacatatccgagctaatcagtcaatacaagtcacatgggtttatggatatgctccatgacaagtggtacagggtggttccctgtggcaagagaagttttgctgtcacggaggtatggaaagactgttgaaaatggtgacacgttgtatagctgtacctcagagaacataaggaaatgctattacttgtgcctcatcatctaggttattgcatttactagactcttgcataatatttggattattttttactttgtccaaaaagcgtccattcctataggaatttacagggatgtgggtttgtcttagatttaaatgtgatgctattttgatgagtaaatatctaaatttctacttttccccataacctctatccacaagtgcagaagaaatgctgttctgaattacagcaatagtatctgagattgacatgaacagtgtttgatttaatcgttaattgatggacatgatgtgtacttcaaaatatcctgcaaaatctaatcaaaacattgctaacttaccagtggttaccacctaaagataaagcctttgtggatgtagaaaaatagacataccttagcgagtacttcttagattacagagtcatggatttttgaaactgaaaacaatcaattcccttcttttatagttaggaaaagaatacccagagataatcagtggtttccctaaggcacacaaataatcagaatctctttctattgcagtacactgactttacaatgtaattagaaagaaacctataaaataaggcagaaattggatgattaaaattggagactggaaggtataaccagagtcacaggctcagatatttaaaagaggagccaaatatacctgaacaaggtcagcctgacaatttaaaaaaaaaacaaacccacctaaagtgaataataatggtttcaagtagtctctatttgccaagaactcccaaagttgtatttcaacacagacccttcttctgagctccaggccatgtatccaccttcctatttgacatctccacttgaatatyctccaggcatctgaaatttaagttgtcaaaagctgaaccttgatcttccctcctaaatctatttttcctcctgtgcctcacatcttggtaatggctcctctggccatctagttactcattctggaaactggcaaggatccttaatgcctcccacatctcatcttccacattcatcaacaagccatgtcttttccttctataaaatatgcctcgaatatgcccatttattgtcatctccactgttgtcactcgagtccaagccatcattcttcacctggaccactataaaagtctcctaactagttctctgctatcactcctgcctcctcaaatttgttttccatgtggcagatcattcttctgcttagaagcctgcagtggcctcccatgttaatgggacaaaaatctgaaacattggcatagcccacaatgccctgtgggacctggccctgcccacctcccagcctcatcccagccactttcctcttggcttccctgcacaggctgttgcctcctcttcctcaaatactccatcctctgacacttgctcagctgaatcctttatattataaacttccagctgagatctcccttcttcagactctgataatcccagaccaatatgaatcatatctcccttcataatctcatatatctcacattatgtcatagcacytgtcataatttataaatcatactatttctaaacatatactcaattgagtttttgttttagtgtgtcccttcattaaactgtgagagcttggtgagggacaaagattttgtttacaattgtattgtcaatgtctcatatatagcagcactcagtaagtgattgtggaataaacaattagagaaattgaacagcatacctgagaaaacattggggagcagaaggcaaaagcatacatcgggtgtgaaattggtagtgtactgggacaaatagcgtacccccaaaattaatgtctacctagaacttcagaatgtgaccttatttggaaatagggtctttgaaaatgtagttagtgaagttaaaaggaggccatactgtagtcaagtgggccctaaattcaattatgggtatccttataaggagaccctgtggagagacatacagggaaaaagtccacgtgacaacaaaggcaaagactggagcatgcagctacaagccaaggaaatgctaaagattgccagcaatcctcagaagctaggagagaagcataaaacaggttgtccctcagagcctccagaggaactaaccctgctgacaccttgatttcagacttttggcctcctaagctgtgaggtagtacatttctggtttttttgtttggttggttggttttttttttttttttgagacagactctcacactgtaacccaggctggagtgcagtggcatgatctaggctcactgcaagctccacctcccaggttcacaccattctcctgcctcagcctcccgagtagctgggactacaggtgcccactaccacacgtggctaattttttgtgtttttagtggagacagggtttaaccatgttagccaggatggtcttgatctcctgagttcatgatctgcccgcctcggcctcccaaagtgctgggattacaggcatgagccaccgcgcctggctaaatttctgttgttttaagccagcctcttcctcaaatactccatcctctgacacttgctcagctgaatcctttatattataaactcccaactgaaatctgttttttacatttgttacatcagccctagggaactaatacagatagatgatagacatctagatgataaggataaaaatgtagatagatagatgatagvtagatagatagatagatagatagatagatagatagatagatagatggatgcaagctggtcaatgcccttggtaattaaatttacttctgattatcctggaagccatgacaaaaagaaacataggatgggttggaaatttttttaattggaaaaagaagaagttaacctatatttagttctagattctaaaataattctttttgaaaaatggcattgagtaagagagttagcaatgtttacaagatgcaaaaacatttctcctctggataacttttatattgatcaaacatttgaaggaagcatagaggaaaatggggacttagggagctagcatgtctgtttcctaccatgtaatagaaactgtacccagarcgtagttctcactatgaccctgtaaggtagacatttttatctttatttagagagatttgcgtgkcttttcctaaaagaaatgaacttgggcctataccagtcaattgagttaattcaaccaaggaaggaaacaaaccagttgcctaacctgtgccaaataacaatcacttggtgttttctatcatttgttgtgaccatagctgactcaagtcaacatcttcaagtgattcagaattgacagcaagacaaggctgggtgcagtggctcatgcctgtaattccagtgctttgggaggccaaggcaggcagatcatttgagcccaggagttcaagaccagactgggaaatgcagtgtgactctatctttacaaaaaagatttttaatttaaaaaatttgagagcaaatcattaagagaaaaggagcctcccaatcctgtccccaaagccagcattactgaatgattttaacctcccttatcacatacaagcctctaggctattgtcatttcagaggatcatctgaccaagacttcagctgaagggaccatatgattcctaggtggaggaggacctaaggacagacagctctgcggactcagaacctaactctacctggacacacagaagcgaacacactattggagacttaccaacacaattattaacataaacctatgtcaaatttattccaaagtaaaagtaactaacctaaaacaagatacatttgaagccatacatttctggatttgaatcctgtctctactattaacagctgaattacttaactgctcttamgtctgagtctcctcatctatgaatgggtatgataaaacctgccatcccattttgttctaagaataagaggtcatttatggaagcacagcatggtgaatagtaaataatagaagtactaattcttcctctgcctacattaggatatcttcaggtgtctttctatggctcttttcaaagtaaagaaatattaccagaaaccctccattagatttcctcatatttcattggccaaaattatatcttctgcctatgtctaagcctatcattggtgagggaatgggttcaccatgatggattaggccaatcatgattcattccccagcattggcaattgcacagcctcccttgaaacacagggtcaaatcacgaagcgtgaaggcctaaacaaaagcagggttcccttaggaagggggagacagaagaatacatgttgaataagaatccaaccacttctactctcactctgcagactttgaaagctgcttcttctctcatcccacctaccactagccatctgcacaatgaggtattttgatttaatcgtctgcaaagcaagtcctcccagctttgatacagtgattctggcttcccttaatattatcctaaaatatgaatattcagtattctatacaatatagtatgatggctagaaacatggactttgaagacagttctatatttgaatcccagctctaccarctgtgataccaggacatattatttgagcattttgaggctcagcttctacaaactggggagatagtcatatatactttataggattgtggtaaaaatgaagttcgatagtgcttttcaaatattgagcatattcctacatatgataaccacacagttacccatgttcttaaggattatgaagtttcaccatatatgttacagggctatatggatttatcagcaatttcaaacaaaatcaagtatagaccaaaaaaaaagatgttttgaaaaacaagtgaaagccataaactgttgagatgatgcatctaaaatacagcaaaattttttccattgcagtttttaacaggccaaattcaggggaacggcagttgggaaattctagatgtagtcagctggaagcattgaataaaaggctaatatcaggatcaagttgtgcttgtccaggcaatgttgggcccacattccaggtcagctaaatttgaaagagaactaggaatgagaagaagggaggaaagttgtgtccttactggaactccagggacagaaataacagagttctggtaacatcagtgtgtgtagagataggagggccacacacacacagagctcttctttctcagggatggtggtcggctgtatggtgtatcctggtctatggaacaggaaactattttgtaatgatgcttacctgggtacatttaaacagcaatgcatattcttgtgtgacatttttgttttgaacaacctaagacagaatttcaggattgtcctcacagaacctaaagatagaacgtaattaaatgaaaccaatcttcagttcattgactgagcttggtcttctctgcgcaaacagcctctgcctgctggatttcccattgctcaatacactaagtctcaaacggctatttttttcttaactttctcccagaaaaggtcagaaggagaaagcrtaattattaatgcttcgcttgccatcccttttgcttcaaatgtcatacactgccgggctctgttagtgtggggaaccaggattagctttgaaatcagacaagccatccttgaagcctacttcaaccaccaacttacttttggcgagtgccttaatccagctcagctttagcttcttcatctcatcagtggctcttgtgtgaagtaaataaaatgatggtctcatacacacggccctcctccttctccctgctcacggggtggagtgcaaggcacagtgtggaagaaccgggtatatactccggatggttcccctcccaacaggtgcccctgacacctgaggattccatttttcggtttactttttaccttacataccattttgctagttacagttcctgtgtaagtctgttgctatagagcaattaaacactctctttcactctgaaaaaaattctagtttagacaacaaattatatggtgacctagtaatagaattactaggtgcctttttcccccatttctagcagttggacattaatacttggcccaatgtgagaaccttgacctattcaccttccatctctttgtagccccagagctatctagccacagtttctctggaagataaactcacttttttttttttcctgaattccagggctttatctgctctccagagtcacttaggaaattgcaggtccaattctgccgaccagactctggcaattttcaaagaggaattttaaattgacctcagatgtttccccacattcctccctgcacacctgtgcctctgcccacagtgaactcattgtcaatcagtgccattagggaaacagggtataaatttcctttgttttcttttgactcagcaaaaaaaaaaaaaaaaaaaaaaaatgtaatttttttcaactccccaagtgaatttaagagctccagagcaagagttttgtgacatcggttatttgcaaaccaggaaagcaaggcagccgaccacagtttagcaacctctaaaattcttcaagggattactaaaatatccagatgataacttctttctttttgcaagcctcctttaaatgatagtttgaataatgcactttttaccaaatggaactagtcaggaagaaagaggaaacagtggtcttggtggggagcagatagaacactccaatgatcaaaggagaattttaaagaaactgtttgcaaaagtatgatttaaggaaaccagttaagatactacagtctcccagggcaggtgaagtgagggagccattaccacatctaggttcaaagggaagaattaagagacctatttttagaacccagggagaaataggagagggctttctaagagccttggccatttgaccaggggtacagccatccgacagtgacctgcctggaagacacccagggaataaatacctgagtttggtctcctcctacccttgcatcttctacctcaggtccagggagcctgtcgatatggtgcagagaggtccgcttcccagggcacaaagcaggaggaagaaagatggagagtcgatctggaagggcagaagaatgtccagcactgtccctcatggcagatgaatgtgggatggggtcagccacagaaaagtggccgcaacccaactgtctgagagtgtgcagcctctgcacttccagacaggggtccagcctgcrgggagagagaccatgcccttgcacttgttgggaaggagagagaagtacaatcaagtccacttaaatgaccctggtcttgggagtcagaccaccctggctctcccatcactaggaggaggcagttctatgtccttgagaaaattacctaacctctctgagcctcagtttaatgcgtatcttacttgattgttacaagattttcttgctgaatccagggatctcctccgttgttattgagtactgagggaaacacatactaagcaagaaaccaaacattagagtgaaagctctaaccttggaacccagagaccttgattgcatgggatagggaaaaggagaagcatattttgaaacagtccaaaagtaaatcattaaactctccagtgattttattwtcaggggaagtgcgcagcaggaaacagtaccccatatctgaactttccccatcttttgcttcaccctattcctgaaaccaccagcctccatctgaccttcagtccattcttgacctttcctatcctcccccagcctttaccttcacccactaaaagatggatccatagggcacggatggagtgaagatgtctattaacctcgttatgaggtagtttcaaaaatggaagtttaaatggttgtttttaaggagcatggtataggtgcaaaagtaaaagtaaccatggtatcaaaacatccacatcaaaatgtcatgaacacaaattgcttaacctccctgacttccctacactgcaaaactgagatattttatgtttctggcttggtataaagaatagagatcacatacatcaaagtgctgacacacagtaggtgctgaatggatagtgttaatcatatttgtcctgacactgctgcgaaccagttccatgacctttgacaaatcacttcacttctgtaaacttgtttctttgccttaaaataaaggaccatgtaccatggccagcaaagagatgctgtgattctcaagtaggattgtttaagaggattcctggcctaactaattgaagatatgggtcccggggcacagaggaggacagtggactgactggcctccagcctgggctccccatccctggccagggacccagacttgattcccaaggaccaccaaaatgcatatatgatatattaatatgtgtttacctattaatatttattgagaaaatggagttctctcacagcagatccattctttcctctgttaacttcttggaaagggaaagggaagggttagtcaactatacattgaaagccaaagggaatcccacaagtcacattgagaagcttcaatgccagtcagttttttctgaccagtttatctttaattcatattaaaaactcaaagggaatggttagggcagtgggggagggcagttttaatgcagtattttctgctcttgacagctagcccacatcccaacaccctcctgcccctttctcattcctaccccttctcttttccatttaaaatgtcactgtctgctcttcaacctgatgaaagttatggggaggcaaggagagttaatgactgtagattgctttaaattgaaaactcgtgtatatcaagagccaccttgacagctgagtgctttccttagaatagcctaagtaattaagtttaatatttaagccaagcataagatcagatggaacctatccaggtagtatgttctgaaaacccgaagaagcacaaagttgtccatgtattcttttatgacatggagtaaaattaggcctgaagaaagggaagccagtctgagaaagacctcatcttcatctgtcttgctacaagaacaatttccaaattcattcgttctttcttttgcttcctttcttcctgtctttctttcccttttcttccttgtctttcttttccttcctttccttcattccttccctttctttctctctttctccctccttcccttccttccttttctttctcttcctttctcccatccatccattagcaaacgtgttgaattcccacgtaccatgtcccatgctgggtgcagccaatgcagagatgaatacagagctcacaggcagagagctcataggagctcaagagagacttgtgaaaaatacccaattccacaccgccacaggggcagcaataaatgaagacataaggtaagccgtgacacaaacaaggccataattcacacatggaagagctagaaggaatcaaagcaggcttcctggaggaggtaacccctgtagcggaagaagcctccaggcaaaaccagagtaaaacactgaggcgtgaaattgtaagcaatgcaatttggccttgcccttcgaagacactgcacccaatcatactggattgacagaattgtatgccctgttaatagggccccttcccgagggattctaaaattacaggtggctgctttctttggcccgcttgttatccagtcacaggtaaacccacaagtaaattataggcctttacttttcctgtgctcgggcttgtagcttccctaccacctcctcaaaggcagggacatcttttctagtcttatatggaaggcagtctagaatacagaagaatttcagctctgggagcaacataccaggatttgactcccagctccaccactgtgtgtctacgcaagctgtgcaacttccaaaacttcagatcttcctccaaacccgggaataataatagggcctgactgaaagtgtgaaatatatttaatgagatcgtttatggcgaacacctggcttgacaaatgttctctccttccctgattatagaaccatgcaygcagaaaaaatacatatatttggtgaataataagcatagacaagaaattacagttggtgcacccaccctcttaggcccatcttggtcccatctcgaaaaaagcaggagcatcttatcattacaagcatcttctaactccgagataaacactcttttatgtattgcttacgtatgttatagaaccaaataattttttatttcaaaatgagaaatgcatgattctggaattttctacttttcaaattgctggtttaactaacttttgtagtgttgtgttctttctttcctctagctcagtgtctgagtgggaaaaagtgaagatgctttatacaaaccattagactgcacttaaaacagatctttacggaaacaatggtaacttggtctttgcatgtagtcaattgtatttcgaagttaggctcctgtgtgaacaggcccaagacctacaattctctggtcttgttttcccctccctccgtatcatcacaagattagggctgcttctctgttgctttctggctactataaataacacaaattaggattctgagagaaggaaaactaatttcagcaagtgtctccttcacccttgctaacgaccaagtaaacagacctctcggaataagagtccccgcttttatatgccagagatacttgggcataaattacacccaagaccacatactgttaagagttcttgcttttcccctggttaaattcggcaaactcatgaatatttatgaaatgctatttactatgcaactaaaaggtatgaacggtgctaaaactgattaggactattgtgagagacagtcttccttccatttttttagacttccatgcactaaagtctgtgggggatcacaggaaatgggactcctcactcacctctattccctgtgcagagaggagttgcctccaggctttgaggattcgggtttgaagaaagcggagaaagcatggaaatgtgtgaagattgccatctagtggctattgatgcgagttgttacaaaatactgcaaaagccatcttttttctttctcacaaaaggcaaaaaccaagtctaaaattgtgagaaattgccctgacatttcctccagggtatctgaggacaattcctccccatgcggctgtgggagttggtagaatttcaggacgtgttggatgagaaggcaacatcatgagagagccctggagcctttatagagatgcccctcttctcacacagtataggtggcttcctgcaacatgaaagcttagggctagctggccagggaagccaatgcacgcacatctggggcctcctctgagctccttccctctgtccttctgtccaataagacttcagcctaggtgttatgggttggattgtgtcccccaaaaaagatattgaggttctgaggtcctaattctcaatacctcagaatgtgttctggtttggaaatagggtcattgcagacatgtttggttgagctgagatgcagtcatattgcagcaagagtgaaccccgaatccagtatgactggcatccttgtcagaagccatctatcacacaaagacagacactcagggagagcaccatgtgatgatgaaggcagagaatggatttatgcatctgcaagtcaggaaggccaaagatgaccacaaaccaccaggagctaggaagaggcaagcaagggttgccctacaggtttcaaagggagcatgaccctgccaactccttgatttcagacttctagcctcccgaactaggggacaataaatgtctgttgtttaagccaccccgtttgtgctgcttcattacaacagctcttgcaaaataattaatacactccacattttacttctagtgcctcttgcatcccagctcaggctcttctagacaagcatttgtagatgtcattgtttcctagctgctctcccagatactggtctcttgtcctattcaatctacccataatgccagattaatctctccaaaatataattgtgattaagttgttcttttgataaaacgtgtgctttccctactgggtagagactaaatgtcttagccaaacattcaaaaccctgcttcatctggttctgtctagctcatcttctgctactttgctcaagtacttcagccattataagcaacttgctaatatctacacctgtactctttcccacttctgtgattatgrtacttgttcccttttctccctcaggatcaaatacttcttgaagaaagaaaaaagtcttcctctattgttcccagcaagaagtaatttctcaattctctgagttcttatagttcttttcccttacctctctgatgacatgttttgttgtccatcttgtattattaattataattctttaatgcctcaattcactcactgatcagcaagctttctgagcaaagaccatctctgaatgtcccaatgctttacatgttaaaacatgattgaataaatgatgccctataaagaataattgagtaaatgttgtcttttcttcagtgtatggggaatggtcaaaccatcttatcacttcgtccaataccatgctctcccttgacctccctactccggtatgctccatatgctctcccttgacctccctactccagtcacactggcattctttcagttcctcctacttgttttgttcctcctgccctagggccyctttgcacatggagtttcttctacctggaacactcattccttcccagaacatctagttaacttcttctgcttcttgagattgtaaatcagtcatcatttccccagtaaaagttttctgttgtccaaactctcctggtaccatgtacttctcatctgtaacactcaaggcaggtgctcctttacatctatggacatgataatttggttaatgtccatcttcccatcaaaactgtaagctccaggagaacagggacaacaagaaaagtatccactttaggtcagtattatattcttctcacatagtagatcctcaataattatttgttgagaaaacaaataaatagctgagtatatctgtgtgcatgtatgcatacagtctacttgagtttttaagcaagcctaaagtaggcaataattataatctctaccattcctgtacctactatgtgataggcattgagcacccttcttcttataatctatctcatttaatcctgaaagtgatgttatgagttagtaatcatcatccttgttttacagatgagtgaaaagattcagataagtaactctgcccaaggtcacaaagttgttaaatagcaaaactttgatttaaaaccatacatgccaaaattcattaaacaccatttcagtattacaaaagaaaaccaaacagatgacaaacctgatgctcaaaaacagtttaaactcgagctagtagttccacagtctaaactgtggctaacgtcagtacgcttagatattaaatatggtgaccggcaatgctacagaaaggtgagagcttccaaccaaatgtcaaggaccacctgtatagcttctagaacagctgtgtgacctggtctcctgactggcttgaaaaatgaagccttatatgaacctcaggtctcatttccatttccgttggtttgattttccaatgtcagttatttttacatgtgacctactcaatatttctttatctaaaaacttttgagggaaaaaaatgacatgctgaaatagaggtgccatcaaggctcctggtttcttccaaaacagttagtcaacccttttaatttacttgcttcagtgaatgtcctacagtccacatcaatccacagtgatgaacagaaaagtaacaaacagtgttttccatggaaattactaagaatcatttacagagaaaatcaaaacaatggtgttgagtcccataataatgctgagctacatagtttatgaaaggtagaacaatgggaactcaagttcacattgactaaaactccagatctagcataatgttacctcctctacagcacagagtagaatggttctgcttgtacacctgaattatttcagtgaagtggtaccatcttcctaatactgtctgtgtaaccattcaatattcctgtgacaagatttcacctcttacataacatttctatatacgctacctcatctgactcttacaataacacatcggtagatgaagcatgtgtaggtattatcaccatttcacagatgaggatgttgaggctggtacagcaatggcttcactcaaaggctcacagctaataaggtaaagagctgaggctggaaccaactatttacctcctatgctctctccattaccctttcctacctcctaaccacacactcacatagggaaatacagctaagagttttcacactgggagctcctttctaaatgactatcaaggaattactcaggagaatgtaagtgaggaatccataagagtgcctgatgggccagtgatgttggttactgcatttctcaagtctgcaatggaaggtctgtaatcagtcctcaaagagttttgaactggaggagccaatttttatgctggtatagcgtgtgagcagcctgtggcatactgtaaccactacatgaggagtgttgttaaatggctatatgtacacttaggtgtccagggcaggctggtatcctttaagacttcatctctactagtagggtaagtaacaataaaattagtaataatagcaatgatgataatgacattatattgactaacattagctttaatactcacaaaaatgtacaaaatatatattattagccccatttttcatatgggaaaactaatgtcaagcaacttgtccaaggtcttactgctactaagtggactgttaagatttgatgttgggttgtcccattttaaatcctttctaccttataatataatacctaattaataatacctctttttaacctaattaattcaattgggataataattcaaccatcaaatattttagcctccatatctttccttttccattaaactgtctagctctgtgctgtccactatgatggccacatgtagttactgagcactgggaatgttatgagctctaattgacatgtgctgtaaatataaaatacagtacaaaaagtgtaaaacaactcattcataaatgataatattggttacatgttgaaacggtaacactttggatatattgggttaatataaatatattattaaaattcacttctttgctttttaatgttactaaaaatttaaaagtacatatataattagacagcactgctatagattattattccaagattcatctactttatccccacatactgatctcacagagaaccaaccagtatgaaaatgtttttgctgttgaattattctcatggctcatgagcctataacataagatatcaaaacactatgttctatagtatatgtcagactgtctttattttttaccataatccaagcaagaaaatatgtcatattgcaaacccagaatgacctggtattcctttatcatatatatactatatttagttttacaactttatgaagtaaactttttacaactttataaacaactttatgaagtaatagtacttccccttacagatgatactttctcttcaattatctgctgttctatttttttgatgttgtttgtaactcactaaaccaacttcatcactcactaatgtgttgtaacccacagtttgtaaacacaagagtgtctgcaagtgagataccaattctatctacacagaggtgaagggatattttagcaaataataagatggacctggcactaatgaatgagctagtggaggcctgtaactatagcaggatctgtggcctattcagttggcaaaactgaagggagttcaaaatgcttcctctctcctatagagtcagcactaatggacctgtctaatgtccatctgttgttctgtctgctcagcattaccctgttcttataaggaagagcatgtgcttcttttggtacctgctcttcctacccagcccccacttccccccgaccagctccatccatgaggttcaaatggaagctcccatatgttataagccatgtctgatggctcataggtgggaacccaacccaagtgagaccaatcagagcctgttcatgggatttatgggcatctaactagaacagggaaaagtccgtcttttctgatgataaaatccccaaagtcttaacttggaatctgtcagtggttgtgtcctctgcaatgtggaagaattgctttaccataggagagagtgaaggaaagagaagcagaggtgaaaggcacagagaggtcaatgggcccaactccttgcagggccagcttcatgggcatgtggcccatgcagtctcataaggtcccgtacttggtttaatgttctgctgtggccatcttgaagctctcaatcattttcaaacaaaggacactgcaaattacataactggtcctgaggcgttggttccaatatttccttaaacccagtgggatcctcacccttcctaagactgaatcattcagctcttctttagattatgtgagattcttccaacaaattatctttcatgttaagcttcttagaggtagattcttttacttgcagccaagaaactggactacactgtggtcaaagacacaagatgagagaaataacacaattctagaggctcccagccccagtgcatgcccaaaagatagagttctgtccttgcccctgaggtttctgattttttcagaactgcacctgcagggcctggatatttcccccagagagtccagaaaggtctttgtgctttagaaagaacacaggctatagtggttggtatcatttagagaccaacactgattttaggcatcttgtaatataatttaaggtggtatccttaatattgcaaattcaataggcttatatgcaaactgtaccatgctcatttctctgaataactgaaaagcaagcaaataaatgaaacaaaaaaacattccaatataacagtctaattgggaaagggggtttcatttgtgtaatgcccataatcagctttaaaacatatccatggattatcatttgtttatagaggaaagtaaaatggccagacttaatgataaggtgatcagtggcttagttttgctagttccagcatggttatctttagactgatattttggctgaactatagaacacagaacttgccaacattttttaaagcgaaggagtgtttgcatctttcagtttgatgtagtggcctgaggttcccccaagtccctttgaactgtttgctcttgaaccacatttgtttcttatgcatttggagtaattgatgcgctccgaaaggaagaaggaataagagggagcatgtgagattagtcttcaacagaaagaacaaatctagttgaaacaaaaggagaaaagtgagatcatccagaggcgactgtcactctcaacacacacaaaaggcttctttgggcacattgcagaccttcccccaaggtattctgcagaatagccgccaggcaccaacaacaaagatgtgactcrggcatgagatgatggataagagggaacagagtaacagaggttgtgttcttgagacctgtgtcatcttgaaaaacgccctgaattcagcattgtttatattcctcgggaatatgttagtgcctgtaggtgatccatgtaagaaattctgcgcggtatctgcctggtctcttacaaacactctgaatcctacgtcctgaaaaaggtacagaaggatgtcaatcccggcttcccctcccagggaatcgtggaaaacatactatatcaatgccttgatgtgtcaccttgtttcatccttacactaggtctgtaaagcaagtatacagtgtccttggttgcagttcagtcattcggcgtatatttattaagcacatattgcctgtgaagcactgtgcttctgggatactgcagcgaataacacaggtgcgatcccttctcctttggggtttactttctcagagaaaaaaaaaaaagaaataagtagataaaataattgccagggaaattggggttatcatggaaaggtacaaggagtttgagagaaggaaaaagagaaggggcagcccagctttccacctctgcctctcccgggcacccccaggctccattctctcctccctatactcctgcccagacagcacccacctccccttccgcccccttttccctccttctttccctcctctctccgctccctctctgacctgccgcccctccctccgctcccctgcccttttgctcgaccagggcccccgggagccctctacccccaccccatggcccaaccgtccgggcacgagccccgcccgagctcaccgcccctgctcccctctccgaccctttgagccgtggccgttgccagatgtccacaatgggaaacgaggccagttacccggcggagatgtgctcccactttgacaatgatgaaattaaaaggctgggcaggaggtttaagaagttggacttggacaaatcagggtctctgagcgtggaggagttcatgtccctgccggagctgcgccacaacccgttggtgcggcgagtgatcgacgtcttcgacaccgacggtgatggagaagtggacttcaaggaattcatcctggggacctcccagttcagcgtcaagggcgacgaggagcagaagttgaggtttgcgttcagcatttacgacatggataaagatggctacatttccaacggggagctcttccaggtgctgaagatgatggtgggcaacaacctgacggactggcagctccagcagctggtcgacaaaaccatcatcatcctggacaaggatggcgatgggaagatatcctttgaggaattcagtgctgtggtcagagacctggagatccacaagaagctggtcctcatcgtatgagcctttttcttacaagcaccacccaacaacttctgctttcttccctatctctttcaagatttgctcaagacgtccaactgtctctctgacttatctggaagtatttctttttgtgaagccatatgtcctaacaggagcttcatcaccaactcagtgctattaattctscttctctgaatgactcagggtaccctatagggggaagagcaagtcaaatgagcatagtggggaaagaaaaggaaatggcttttrtaaacatcttttactttgttttgattcaaagaccaaactagaactttaaaagttcaaaaataagaaagtatacatttttgctgttatttctcatcattttgtatatgggaggaaatttataatttgcatgggtgttaggtgaactgttttcatttgcttgtgttcagatatcttgccagattgttaacttcctattgtagcaacagggacaaatatatttgtctttgctgggcatctcgtaatcacttttcttaggggacagaatcccatcttttccttcggcagattgcagccccattccccacaatgcatccagaaatcgctgtgcatgtttgaggggtaggagttcatttggcctcctcctgacttgttgctccagctcctgaacagaaactagcttcagggctcttataggaaatgctaagcctggactaagtgcccagctcagccatcatcctcattagcagtgggtttccagggttggcagcccacaccagcattaatttcaatgaaggggacctccagctaaatagggcaagcaaagtgttctcccagaaagtgctctcacctccgacactggtccctacccccaggtggagacaatgagacatttagttagttgtcctacggaggagaggcagtagagtcaggctgcagtggaatctccctaggatrccaaagtggcattatgtctgttgctcacagatgcagagactgacaattgtgtctccacagcagaggtggatgctagctacaccagctatgctgattttgaaaatcagatctgaggcctagaagagaaactgagagctctctcattccaggaagccttttccctagtggaacattcagtgcagaagtcctcacacactaacagatctccaccattgggtgagccggagcctgtggttccaggggagatccagaatgcatgtgtctcttcccacgcatttatgtcatgttggtagctttagatcagccatrgtgagaaaagaacaaaagcttttagttgtttttgttttgttttggagaatttgtttaccagtaaatacatcactgcctgtaccccaaatgttaccagctccctgaggtgtcccacatactattgtgagttctcagagcatgaactgtcctcagaagagcagggctaggacttgtcccagcatctgtgcctccataccaatcctctttctcacagagaaccacttcccatataagatgcttaaggctctcaaaacagcagaacaatgaaacatactctccctacacttgcttagccaagagataccactcaggtaacttttttcaggacatggaagatctgtttcaaggagatttactgctattttatttggaagaagctggcaactggtcttgaccaaaatagaaaaaaaaaaaaaaagtccacaaatttaatcacttgtagggaacccatctatcaaggtaccctaccatatacttttgtatttaatagattacttagaaaccacaaaaataggaatccttaccccttcaattcctgttcaaccctaaaaactgtgataaacgctcccaaccctgtggtgatcagggttatgtaatgttcaaagattcagacacacctgggtttggattcagttgcaactgggttgttatcacactcacttctttttagctgtgtgagcatgaataatttacttagcctctctgtgtctttccacctaattaaagaggatccaccccagggttattttgaggattcaaaaaggcatgcaacacacctggagcacaattccactttcattcaactaattcccttcccttcccccttcttccccttctacaagatcaatatgtaaaggagacatgaggcttactggttgcttttgaacacttacttagttcttagctacacccactctaaaattaactggacattagtgtacagcccatgtccaagcccagagagaaaacaatgggaacaatttcaaggtcctcaccactccttcatttgcagaggggacaacagactttctgacctgagaactggagaatttttaaaacaaaatctctcattccagcccaacctatttaactttttgtggaggawttttacatggaggaagtgagcacatgtcatgctagccaagaggacattattgtcattaaagagaggcattatttatacaccctgcaatgtgcacattaaaatatggaaattttaaaattatgaccaagggcttgaaacatattggattacatgctcacatttaacaaagagaggaaatgtgtttcagtttctggagtggctggaatttacaagctaattgttcaataaatctactcaagatagttacctaaggctttgtggcaatgaccttgaactgagagcctgtatctggatttagcacttgaaagatctaactggatatttgggttaaaagaatcacatttattcccaaatcggaatgctttgtttttcctgtcagttaattgccagttgccaacaaatctagttctatacagtttcttgggatgatgataataaacatttattgagcaattgtcccataacttttgatataacctttgttatacatatcatttaatcatcataacaacactgtgagtctggtgccattatttcagcattacagatgatgccatgtagagatctagcatcttctccaaagtcgcccagctggtaagtggcaaagcatggatttgaaccaggctttctgaccccaaatcctgagctttatttctacctctctgcatttatcttatttttatagctcctatatctacctgttacaaattatttattatagtcttaaccatgtcatcaaatcaagcctcagttttcataaatgatgaaactgaagcccaaagaggtaaattgcttgtcaaagaacaagcagcctccacctctttggttctatgcattgcaatgaaacagatatgttagacgagacagttttaagccatgttccacctttggctcatcttgagaaacaggtgacaatatttagattaaaccgataacgcaaaccaatatgctctgaggctatagagatcagtcacaatatgttgttatgaatcctatgttaattggattatgtctgctctgtaccatatgttgcaatccccagaccactagacactctttttgaaacagagaaaaaaatatggcctcagcaaattcaatttagctttggtgtatattctctcatgctttagaaacattctcaaggaaaaaatatcttccagacatttttgttaattacaaattcctaagccactgtctgaggaacagtatgaattttttaaatgaagacaattttttatttaaaaaaagtataaattccattctctacttatagtactgactctttctttctgttaagagatagagtaggtagttagtctgctatggtgttatatctattttgaatactttgaacaggaggaggctcggatgtttttaaaaagagtgttggccgggcgcggtggctcatgcctgtaatccccgcactttgggaggccgaggcgggcagatcacgaggtcaggagatcgagaccatcctggccaacatggtgaaaccccatctctactaaaaatacaaaaattagctgggcgtggtggcacgtgcctgtaatcccagctactcggaaggctgaggcaggagaattgcttgaaccagggagacagaggttgcagtgagctgagatcacaccactgcactccagcctgggtgacagagcgagattccatctcaaaaaaataaataaataaataaataaataaataaataaataaataaataaatagagtgtcattatggtagaggaacaaggccaccagactgagaatcagaccggactyctctgctgccgtgtcaactaccgtacctaccccagtagccaatgactgtgaactataaatcatgaatcatcaggaattagctgattcataatgaaaaattctaacactgaagggtcaccgtagtagcagtaaagctgtgtagatcagaagacagtctgactactcacaggctaactctgacctacaaatgtttgctttcgttgttactggttttacatggtgtttgttctcacaatgttttttaaaaattaccaatattttaaataaaacctttaaagattttaaataaaaacctaaattactacaaagaaatgcaggtcactctaatatggaggtagctttttattgactaaggagtctctgaaatattgagatgaaattaagagtttcagtgaagaaaaattaacatagttacactctttggcacagaagttcaaaatggactgaagggttcactattttttaaagatataacactggacacaaaatatttatccccataatcaatatgttctaatgcctgaaacagtagaaaaatgtacaataatcaaaataagtatagctgtgtaaaacttcaaacttttatataataaaatataacaaaacaaagaaaacataaaaagggagaaacataacatgttagcaaaagggttagcagtttttcaaaaaaaagcttcattgtgtctgatatgcataaataaatatgcaaaaaagtcattatatgattcattcaaaaggagataggtaaaacaaacatggaaaaataggcttgctaattcaataaatacaaattacaatatttaaaacaggaaaaatgaataattataaaacagttggcaaaaatagaagccttctaggcattgcagtatctttggtggcattgggaatggctttcaccctttttatgggtcattttacacatcacaagtcatcagaacagttgtatcctttgaccaggtaatctcactcattgcaatgtatatctcaaagaaataaaaatattttaaaatgctatacatggccaggygcagaggctcacgtctttaatcccagcactttgggaggccgaggcaggtggatcgcttgaggtcaggagttcaagaccagcctggtcaacatgctgaaaccccatctctattaaaaaaatacaaaaatcagccaggcgtggtggcacatgcctttagtcccagctacttgggaggcagaaacaggagaatcatttgaaccagaaaggcggaggttgcagtgagttgagatcgctccactacaytctgccctgggagtcacagtgaaacgccatctcaaaaaaagaaaaaaaaatactatacacaaaatttttattgtagcaatatttgtcgtatataccataaattataatatttaaaaaattaaacaaccacagtttgggagtagtcaagtcaattataacaaaaacaataggtgatagtattaggcaactaaagttaataaataaaataatatttagaaaatartatttttagaaatattaaaatagtttgttagaaaataagttcttttaaaagcataatgcaaayttgttatatcctatgtttagaactctgaagaatatgtgtgcatatggtcattgttcagaagagaaaatggagcattgaaagtaattgttttatagtacaaggattatgggtaatctcacatttagtttttaaaaatatttttctgagtcgttttaataataaatttttcaaaaaactgcacaacagagctaatgtggcaaattaagtacaatttcaaccctaaaagatggtcgcccaagcttaaaagaaatgggggctcaagaatcccaagaaacagggagagagaagcatcttcacagcaacatgggcagtgccatgttgatgagccactaagcagtttccaggttagaggaatgcagagagtgctgtcaaaatccttgtttatccaaatgtgtgagcactactcaggctcatgcagtgtctccctggattttgtgttaataaattatctcctcttctgtttcttttgttaagtgtgatctttcactatgtcttggttaatgagaaacttccaggttctctgaatgaatcttttttctccctcttcatgattcttgttaaatatatatgttttaattccaaatgattgcaccgcacaatcttacctaactctcttcaaccagactctctcacctgggaaactctgtctttggtacatctggagcccacatttcatgtggatatcattctcctacttctccccaacaaggggccatatgtatagacacagcaatgaatctgccaagttcttttgagcaactaactattcttctgggcaaaataatcaggaggcaataaataaataaataaataaataaaatagataccaggtcttcaaaattagaaatagcatttgcttcttccttgtcctgcttccaagcatctatgagtcatccatatttcagaagcaccacagcctttttcttttccttacctctcattaaaatcattatttctccccctgccaccagctctcttattaaggaaaaaaattcttgaacatcgcatttggctgtgcagatccagagaggagatgatacaaagcttagtgcattaggtcactgaaaaatacaattattttcccaggttcttgcagtcattttgctctggggaaaaatatttaatagggaatgtcagagtaaatgtaattaagttacttttcagacatgtgctttttattttttattgaacttactatatactaggctgctggagacaggcaaaagcaacacagccttaccctgtcagagaagacttcctaaaacaggctccacccgttcatttctgagatctgcgtcaggatacagtctatctcaaaagaagttatattcacacctcggagctagaggaccttaatcctttaaacagtacatatattgaatcagattatttggttgcaagcaacagattttttttttttttttttgagatggagtctcgctctgttgcccaggctggattgcagtggtgcaatttcagctcactgcagcctctgcctcccggattcaagcaattctcctgcctcagcctcccgagtagctggaactacaggcacctgccaccatgcctgactaatttttgtatttttagtagagacagggtttcaccatgttgatcaggctggtctcgaactcctgacctcagatgatccacttgtctcggcctcccaaagtgttaggattacaggcgtgagccactgcgcccggctgcaacagatttttaaacttaagcaaaacctatcaaaagaataacgggaaagctcaatgttttgaagtaagaaagagagtgacagatgaagcctcraaccacagcactccaaggatgctagtgcaggaactaggggactatgtctttggggcactgacattggaaatgactcatctccaaacacctttgatatccagtgtttctgtttcagattcacattgactggccttgagtctcatgctttgcctggtgaacagggagcagggagtctgtgattggtagatacaccaaaaccacatgaagcaggaagagggcagttccccaaagaaaggatcctaagaaaacaaaatcaatacattcctcctgaaatttttgcattcagtttccagtgttttacttcagtaatttaaaaaattttttgtcccagtttcaacagtagatccctagattggtgaatattagcatgatcaggtcaggctagcaaaactgggccttgtttcctctccttttaattgagaatgtccatctccacccttctctcttaaacaactgttctaggaagcttctgtgatataatgagactgtttgggatcgggggtgggggaaattatgcaaatttattttatacaaaaaatcctagttttcatatgctttcattcattcatttaaaaaatattcaccgtgctgggcactgttctaaacaagagtatgtatcgagcaaaatggacaaaagtgctgccctcctgtagcttacattctactttgctggggaaataggcaataaacaaataaacacatactatgtcaagagagaaataaagcaaagtaagagagatagattgtatctgaaagaggatggaagggggaaaagaatttgcctttttaagcacagtgattagggtaaacttcatggataggtgacatttgagaagaaacctaaagaaagtgagggaaggagcaatattgattcctggcagaagagtttacaggcacgaacagaaaatgaaaataccctcaagtggcaagttgctcaatagatttaaggaacaataaggaagcccaaatggctgagcaaagtcaaccagcgagagagaagaaggatatgaggaaatagatcttgtgaggcctcatagcccattgcaaggactctgaatttactcygcaagagacagaaaaccatgaccaggcattgagcacaggagtgacatgacagtcattctcactgctgtgaagaagacagaaggggttagggaaaacaactaggaggctgtctcaataatctaggtgaggtgagaggggatggtggcttggatcagggtggttggtggaggtggtgggatgttgaattctggatatactttgaaggtcggttccaccatatttgcagatacacagggtaatgggatgctagagaaagacaggaatcaaaggtggttctaaggtttttttccctgtgtcatggcaaggatggaggttcattgtgatgagaaagactgtgtaagcagcaggtttcagagggaaaattaggagtttgcttttaatgtgttatctttgaaatgtccgttcattacctaagtaaagaggcagagtaggaagttaggacagaaaagcccccaactcttgggagtcattgacatctgggtggtatttaaagctgactctgaatgagaacatgagtgtagctgaaaaactgaaagcatgcctatgtttacagtcagaaagatgaagaagaaaagcaaaagagactaaggtacaacaaagagaaagaagtatcacaaaaacaaagttaagaaactataccaaagaagatggagtaatcaatggcgtccaagctgccgatacatgaataaggtgaaaactgaccgttagatttggcaatatggaggccattttttacttttacaggaattgtttgacaggtgatgggaggggacaaaagtctgattgaagagggtctaagggagaatgggagaaaaggaattagaagcaatgagtatagacaacactctagaaaaccagagaaatcaggtggttgctatgtgctgggaggtgtggaatgggcacaaggaaggattagctgcatagatcttgattagtaacatcaaaaacaaatgatgagtgaaacactttatctgcatttcttgctggagacttgagaactagtcactactcgagccagctgtcagatgtttcaagtgacgacatctgaacaaaatacaaagcagggtttgggcaacaacaaagtttataatcttatcctatacatgttactgatctggtcagagaccacacctgtgatagtacaaacatctccttttatctgaatttggtccattcctagaaatgtgttggctagtaaatttatagatggtggaagccctttccattatttcaaatggaaaaaataataaagtattcctatttcatccaaaaatctcaagcagtttccctaaattcgctaaaacactcttagacacctgtagacatttaatatctaatgcacaatgcatggatatgtgacaatctaccaagaatttctgcataacataaagcatttaaaacattagttgtatagtgcataatttgttggtattcctccatgcaacatgcagagtacagtatcagayacaaactatgttttttcttcacagtgtagtaaatatatactaatgtaaattaacaataaaatgctaaagaaacataatgaatataaataacytttagaaaaatgaaatacatgagcaaggcaattttttgaatgattacttactagttaaagagttgcctaagtgagatggggtgggctagagtaagtttgtgaaggaccaactggagcaataaatgcctgagatttgtccctggctcaatcctgggactagccgggtgcagtggctcacacctgcattcccaacaatttgggaggctgaggcgggcagattacctaaggtggagagttcaagcctggctaatatggtgaaaccctgtctctactaaaaatacaaaaattagctgggtgtggtaacacatgcctgtaatcccagctacttgggaggctgaggcatgagaattgcttgaacccgggaggcagaggttgcagtgagtcaagactgtgccattgcactctagtatgagcctcagagtgagactctgtctcaaaaaatccaatcaaatcaatcaatcctgtgacagccttctctccctggcccttgagtctctggaagtgtgtggctatgagctagcaaatgaagctgcagctgaagcaatgggataaagggggaaaaaacaacaacctcaaaacatatgtttgtttgcattctttttgcattcatttacatggcccttgacagcatgagactggacttctgcttgcatttctgaatgtgctaccactcaagtcacttgcagctgcaattatcattttgtctgcatcacctgagtgtattttaaatatttgatattgaatattcataactccttcttttcttcctctgaccaataatgagtatcaagttgagcagttttttactagaaagaaagttttcacttgataatatggggaagatgcacatatgcacagcacatttaaacaatgtgatcctaggggaggaaccgctgaattacaaaggcagctgtatgtcttgtcactcagactcagacacaattgaaacattttctctggtgttcacaggcagatgatagtggattttccattccaatgtgagttttaaataaaaaattgtgatagttgttatagcgaatagtgaagattcaactagaaaaggatacctataaatggcgattgtttgagaagcattgcaggctttggcatcagacagtcctggatccgcagcctggatcccgacttagtagcttgcatgatcttgggtaagtaaggttattaacccctataaacctctgctttctcaaatgtgaaataaggataataacacttaacttacagggtaattataagatcataatacaggtatattgtatctggcatatgtattaaatgccaaatttaaaaacaataactacttctgttagtctatcagcatgtgggtataaacagcagaagtttaaagaaaaaaatgtataatataaacaatacggcctatttgttattgaggtactaagagaaaaataagactaatcattgttatgcacaaggaaacagagggagtcatgtccataaaggcaagatgactcactgcaagttacatctttcctcctcatcttggcagtgtcttataaaaaagcagggcccatctgctcagagtttaactgaatgtttgatgatgttacagtccaaactaaattcccccagtctgttcttaatccacagcaataactcactgaatccttcatattatagccatatcctgtacacattaaaataggtctaggtcaaggactattttcagacacatttgtatgtactttctgcatgtcaggtttacataactagtcaccatttgcacacagagatgtcccaggaaaatccctagtacctctgaagcccttggggtccaacgtgcttccctaccaaaccctttcccagaccagcattccttgtttcgtagggctgggcttcggcctgcattcccaagtcatctgcccaattttcctgccttgtgccagtctccgagcccctgctcagctctagtctttccttttctagggaccctaacactagtctttgattcacagcctgcagtactggcatggagggaaagagatttcctgagctaggctccaacacagcctgaaatctccgaccttttcttctgagtcctgacccccagatagacttccctatgcaccctatgcctgaatcatgcctggccggctgtttctccagaatagaggtggagagaggtggggagaatgaaaggaaaacctttaaagagaatgggaggatcattcacatcagacaaatgagtcagtgaagactgtgggctctgaaaacagacggcatgggtttgaatcccagctctaaccttcacgagctatgtgaccttggacaagttattgaacttctttgttgctcagtttcttcacttataaaatggagattataccagtatttaccttataaattgtcataaagataaggcaagttgctacattgataaagtgctcagaattgtgccttacacatattcaatgctaaataattataaatgataatgatgaccaaaagcttccagcaaagggataacacccaggctccttagtacggcatctgaggatttgcctagtgtggccctgtttctctctcactgcatatctttgtccatgtgtgccattataacaaaatacccgagactgggtactttataaagaagagaagtgtattccccacagttctggaggctggaagttcaagatcaaagcaccaccaagtttattgtcttagtaagggcccagtctctgcttccaagatggcatcttgttgcttgtcctccacaggggacaaatgatgtgtcctcccatggtgaaaggctggaagggcaacaaaagggactagctagcttcctcaagcccttttataagggcactcatcccttcataagggctcttaataccaamccttggagtttaggtttaaacatatgagtttgagagggacatatacattcaaactatggcactattcatgccttgtatacttttccttcagccacagcagtcagtttcacaacactataccactgtccaggaaagtcatgtcttttttcctttgtttatgctaccctcaggttagtatgttcactttccccacccaacctccccatcctgcctgtcttattcaaatgttatctcatgaaccagcttccccacaaatcccaggaagcatggatcaaatgtatcatggaggtatatgtttgttttctccctagactcaagctgtttaaaaggaaagatataacttccttctatctctatcccatgatacgcagaagagtgcctggcacctagtattaactcaatatattatgtatttttacttctacgggattgactcttgtcattgatgtcaatggctaaataatggctgttttagagtacatgtgagggttttcttaatctacacaaatcacttagcaaagtgctggccacagatatttattgtaactactattgttgctataactgctgctgttttggtatatagcagtagagcagaaagagcccaggctttggagctgaacagaaatggactgaaagaccaactttgccacttaaaagttgcagtaactccactttccttagttataaaatagacgttatatatctattttaatgtaaaacacttggcagaaagtaagcaaccaataaatatcattaagttccttctctttctcttctatgccttttttgtggcttggctcggtttactacacttctctggtctcactttcctcctctgtaaatgaactagatgatttccatgttccctaccagatccaaattccaaagttactgaactcaccatctttttccccttaaatctactcattctcttccctgagggacgttctttccttgacagctaccaggtatattaaattgtttcaattctctmtctctatctctctcaatctctaagagaccataaggtggtccagacccagggccttggcacaactccaggggccatttgcacagtggattaacatacgaatagcgcctgtcaactgaagaatcatgagcttcataaatttggccaggagatctttagttctcataaagggttgcagccagcaggccagccatcctgcagaatgggaagcatagcctcagcagaagctgagagcaagcacttcaagggaggggtaaaagggaacaggaatttatgctgagtggggtggctgagtatacgtattgagtaagctataggaggagtcataaatatttatgaaaagagatacatgcacatgtgcagttgagcttcatgcctcttcctgggcccatgttcaaaaaatggtggtgttagcatgacccgagggtggagattttggtcttctgatgtccaaatgtgaagcagaggacatgaaaaccctcactatgcatcccccacaagttggccaaaaccatctggagattgtggtcattttttaggaagggtgcattgggaaactggtgagctgtcacactgaaactgcaaagagggagggagaatctggttatggccttagatgattagctaaaggtgataaagcaatgagttatcggtttcttgttttccagagctagcttttgcttacttcttaagaatgaattatggctaaaggttaataaggaagggacaactgaggcatgacagacctcccatccaatcaaggccaggaactcagtttttaaggtttcttcggggtccccatggacaagagaaagttcgttcagtcggttggagagcttttaattttatttttatttctcaccctctaggcattgggtgctcctcggcagccctcagtccaaccctggctgaatttctttcatgatgtataatgaaggtcacagaacacacagggagaaatagtctccagctgtccttragtccagaaaaaatgaatatccatctgaaaaccaaagagtacacaagcattgggccaggtatatcattgtattcatggccttttctttcctattctgtcacagactttgcaaatgggcatcaaacacttctctgggctctttgtgctgctgtgcattggatttggtctgtccattttgaccaccattggtgagcacatagtatacaggctgctgctaccacgaatcaaaaacaaatccaagctgcaatactggctccacaccagccaggtgagtgccacaggtgtcttgctccaatattcttaaactgtacaattcctagggatgggaggatccagagccctatgtcagactactaagttatgttaccacaataacgagggtggggtaggcactctcattagagcagaaggaattctctctatcccattaattcacttttcccttaaattaaggcatcccacagtgctccttcctttcctataaccctccactgttgttcataatagaagaaatagaacttttttaaccaggtttcacttaatagtgacagtctgaaaagatggtgtgaaagatttatttcctaggttcttttcttgccaaaattgaaacctattacgtgagtttaaagtccctggtcccctttaagtgaccccacttgcccctgttctctctgctttttccctggtccagaggggtttgagacccattggggccaaggccaagctycacaaggccgcagttctctcctgttacctagacatcaacgcactgatttacagggagaactgaaactgtcaagcagactggtgactcaagcacactcgtttgcatatctctccctgaatgaaattggcatggagacccaaaatatagtcagaaggcttcataatgatggaagaactctaacaaagggagtggtttcacttgaccacagcaaggctggatgagccatcctggcctctcctgtggtgagaccacctcctgccctccagtgtaccatggattacctcccagcagggaggctgtcacttctgcatttaccctattcatgtattcatataccctcatactaaactcctcactttggtaacactttttttttttctagataggttactatcattggtttggttacagttgaaccctgttcttcctacttttatcctgggaagtatttggtcttctaggagaactccacagatcttccttattgtatgctaatatgattaacttaattctcaagagtcctccttcccttctttgttttggttgtcaattaattatatactttttactcatctttagcaattatggaaggccttttgctacacattagttatgattgtgcctccttatatcacataccgttttataatactgagctttccatcagaacacttttttgtttctccaggtggaataataacctctaattagaatttttgttctgttgagatttgaggctgaatgttgatctatttttaggcatttctggaatttgtttaaagaggccaaggtttgtaacgactacatatactgttacatctcaagtggttctttgttccctgacctaygtgtttctcataatttctacctgtgaatctgttttctccatcagagattacacagagcaataaatacatcatttatagaggaaaagcagcagcatttcaagaccaaacgtgtggaaaagaggtaagaaggggccaatggcaactgtctttatatttgtaaaataatctttagagatctaactgtataattattcagatcaaatcagggcaatttatcaaaagaatcagtataaatagagggaaataaaacataaaataaaaaatgtatatggacactaaaatgcagtgtacacaatatactgtcatggttagaagtgtagtcatggactctaggatcaaccctctggatccaaatcctgtctccaagacttatgatatgtgttactttgtgtaagtcacttatttaatctctctgcacctcaagttcctcatttgtaaagtagagataaaaacagtacctatttcctagagttgttgtaaagattaaataagatcatacatgtacatctctgaatgaaaggaaatgcctaataaatattagctattattatgtacaaaatacatgtaagaattaatgaataccgcaggcaattaattccatgttttactgtctttttggcatatttccactccctactcctttctagcattcctaggaacagagtattggaaatatgaaacagacatgtcatgcctaattcatttcctggcacttttctacaaactccctagcaaagagcatcttattaataggaaataacaaacattaaatgcattaatgacatctgaaaatcgaagctcttcactctcaccacaccaggctgtggatgactgttccctatttcatggtgactaaagatgtcagaagcacttgggtctggttcctggctagtctctgctgcctgctgcctaaggcaaccctactgattcttttgtacacccagaggcctcagatgagggcacacctctcatcataacagaagaaaaagggatggaaaacaggattctttttgtttgtatcttttctgggactgctgcagtccccttctatgcagtctccatctagcttgttggaatcatttcctttatctcttgaagtatctctttccagtcaatgagcactctcccctcccctctcagtctgtggtattcctgcatcatattgcaagtstgttagtgacaagctgtatactagtccagtcacagctgttccatgacatgttacatctattttttctatttttaacataaatttttaataacagtaacacaagaagacatagcagcaaatgtatcatcttacaatgaaaaaatatttgttttccagctataatagaaacaggaagcccaatgatcccatctccaactgtgatatgattcatattcacatctttctcacataaattgaaaaccatttgtgtcttttgatgcaacttacccagttttcttggcagattcccttcctgaaccccttattttgaggatctaaggagaacaggtgttcatggtttagcttgggctcacatttcctgtgcctacctctatacaacccaacattagcaacctgtcaaacacaatgagtgtttggcgtaccatagccgtcatgtctctttggaatagtccagtggagtattgaacctcagtgttacataattgctccagggaagcctattttacccatttttagtgttaaatacagctcactcactggtcaygtaacactctaagactgacgaaggcttgaatcaaagcaargcctaaatgttactgaggctaggagtataacaccagccttgggttattttttccaagtagacactgagtcttacactcagcatttgtcaccttgcactcataggtacccacatcaaatatcagatgcctggtgatactagcaactagaatttggcacaaagtccagcatttgtttattcttctatattatattaccagatagatatacaaagctctggagaagaccagtccagctatctttacttaccttatcactgtggctgtctagacagttgaagaaaatgtgtagatgctctactctcaggttttccctgctatgaaccattgtagggcattagaatgctctccctctcttctcttggaagtatatctatgcaaatgctcatgcatgctacaacttgacatccctcctctgtgccccatatttactgaacaaataaaagagcaaatagataaatgaatgaattattaacatgggtttgaggaaatgcttggagaaattttgggccatgatatggaagtaggtattgtccctttctcatttaatgcaaagaaaataaggtacatattgcaggagatgatttatatatagccctgggtttattcaacatgtgatttcacataaggttttggtctatctttcatctcactgggttcccaatcaatacatgtcacccctgttttccctttcctctcaccccaagacacacaaaaattacaaactacataacagcacaaccaagattactttaagattattcaaattcaataggaaaagatttgaagaaaaaaattaaagggaattataaagctagaagaaaaattacatctcctctctgactcaggtctaaagccaatggagctataagtgggttcattacagaacttttacccagcccaggatacaagaaaactgagctctggtaccctctgctcatttatataaaacttagactatgaggcatgttaaagaaccacagggtggtttggagtgtgtgtttcaatggcttgggtcatgtataagttggtctttgctatgtgataaatcatcccaatacttaatgttttaaacaacagcaagttgcttactaattcatggatcaactgtgcagtttgctgatctgagccagacttggctgaatttggctgggtttgctcatatgtctgtagccaactttgggggatggggaaagcagctaagggctgtctggtctatgatggcctcagctagtcaactgggaagcctgaggattctctccatatggtctaccatcatgcagcaggccattctggacttgttcacattgcagcagcagggttccaagagagtggaaatgtgcaagacttcttaaaagtttaggcttggaactgccactctgatatgtctgccactttctgttgcccaaaacaagttgtgagaacactcctaactgaagcggggaggaaagcagattcagcataggtacaagctgcaaagtcacattacagagggcataaatgaaaggagaaaagaaggtttatggccacttttacataaagactttattattcttctctttccccttctccttccagattgtccccttctcctggcaagtaagagtccaggaaaaaagtcaattcagttacatgaatgggaacaaaaacacaatggcttggtagggtgtttctatttagttttgtcctgtggtagaytgcaaaagttgtcataaccctcctactcctcctcctgcttcttctcctatggtggaaaaaatcagcagctatgctgcttagggctctaatctattcttgtagtgagaaactctccttatctcataagtatcaaagtgtatttcagaaacaggatcagccttcccctgtgactatttggcaataattctcatgctgtctatagccatctctccatgatggtagtaggtgatacgatgcaagcctaaaacaggattgcaaattgctttctatatgactttcattatcccagcaagaaactgagggctttctcgggatttttttaagcatcggacctgacctgtcattctcaactcacataaaaatcatccctatagtaagaaacactttgctgagacctgtggcttatatgctttttttctccccaagatcaagtagtaaacatcaggatggtcctgtgggactaaggatgagccatgttatgagatctgtcagcaggttgatgctcagaacccaacaagtgaataaatagattttgcttttattaaagcatcatctttcaaatcatcaaacgtttcaaggtgtggctagtttctgagcttcccttgcagaaaggaaattaaaagccacctgaggttgtttgcaaaaaaaaaaaaaaaaaaaaaaaatgcaccataccccatcctatcatcccttcaaatgayacccaattccagtttcagagcagcatgggacttgaacttttgtatgttcatgactctttattgccccatgacaccctagcaggtagtctgtccatggctttgttacttcatctctaaatgcacacccagctccatattattgcacaggaaatggctaacagatgaagacagcaccttgagagctgcagaatggaaagtaaatctaaaatttctctgtttcctaggtctaatgtgggaccccgtcagcttaccgtatggaatacttccaatctgagtcatgacaaccgacggaaatacatctttagtgatgaggaaggacaaaaccagctrggcatccrgatccaccaggacatccccctccctccaaggagaagagagctccctgccttgcggaccaccaatgggaaagcagactccctaaatgtatctcggawctcagtgatgcaggaactctcagagctcgagaagcagattcaggtgatccgtcaggagctgcagctggctgtgagcaggaaaacggagctggaggagtatcaaaggacaagtcggacttgtgagtcctaggtgaccacactgcttccctttctcagttcctgaccttcctctgagcccttgagacactttgtaatgctcttttgtaactatcgacaaaggtgtggggaagctgaggtctaggtcttcttaaaggtcaagtctgctctccctcgcctaaagtgcagcagcagctcctctcaagctcactctctaggtctccagggtaggagtgtttttctagcaagaatcttagtcaggagtaagctctgtgcgagagatctgtgaataaccagataaccccagctgccgttaaccttttcaccaggtgccacagtaatatttctggtttttagccctttctctgcactaccaacaagagataaaattgttactcacacttatgtcttactgggttgctggttttcatcgtaacacagaacgaggttatctagggttgtagcttttgatacaactccccgatctagatttattcctacattctgaatggggagcaggtaagagcagagcacctcccactgggggtggggtatttaaaaattaactcattagtatcataaacgtcaaggattgattggaccaggcaagagccatgtttttgagaaggttctggatctctgactccatcctgactgtttagtaagagcatgcttacaccctactgtgaaaaggggaggggatgtggtaagcrgaaacagaagacaggcagcagaggcattaaaaatgcataccatgctttcagaacaaaagctctgggccagaaaggcaatttggctaaaaaatgaataagactacttctaatgtaactaagcatctccactatggtgtgtgccttttataaaggaaaagagagaaaaaggcaaagcaaggttgtggccttaggttggacctggaatatcccttattgcctataatggaatatgtgacactgtgggtgaaatgttctacacaccacacactaggccattttcagatcagcagtcacccatcgcttagcatagaaatcccaaaacctccagcccgggaacactataagcttcgaccattcaggaatctgccctgcactttgcatatctgtatagaaaatcaagtcaatcccccatcctcacacccactcatctctgaggagctatgaactggttttggtccctctaatgatcctccagcctcatctaatgccccccaaagactgatacaagtaacctcccctctgcttaggtgtcactttctcagcatatcaagtttaggcagcaagggaaaggaatatgggtcagttctcaaatgtcaatgtagataagagtcatctagtagagaactcatcagagtgcggattgccaagacccttctccagagattatggggttgggggtggaggtctagaggtgagctcagaaacctactgttaaccaacacccccaagtgactgacacaggtggtctaaaaattacttttctagaaacaccattctggaagtttggctgcccacaggcaggaggagaagcatgaagagaaaacctgtttgagaagttttgttttgttttgttttgctttttaataattttagcacacatctgctgactctccttcaacatcctcacccccayccctgggcaccatttaggacaagacttccttatttatcaattacttgatttatcttctcaggactcattgttccacccccaaccaatttgaatgcctacaataagttcaggagctgtgccaagcactttcctcttttacagctggagatcactggaaaggtgtctcagtcacaaaacttctccctctactactggatgaaatgtctgcatttccaccaaaatctacccagtcacccagggaataacaacttaagctgtagttagataacacctagtgattaattggctgagaaaaccctggagtggagggaggctcagagatactgatatggatgtgggagggctctaaagttagaggtcaccaactccacagatgaaacagttcaataatgaggaaacaggtgagccctgaaaacacaaaaggacagttctgtgttgaaacaccccatcccctcacgttctcaccccaggcccagaagtaggttgcaactgcctttggaagattttgccccttagccatccccacccacttgtaccagctaagaatgctggagactctgccaccatgctctgcgtgcccctgaacctctgtgcagcccggaaggctgatgtacaggtgtacctcaatccacattacagccatgctcctaatgtacatggacatttttgtaactcagctcatattctgactgtatttgagaagctggctgtttaagggaacccagaagtgaattcttttgtaaagtaaagcacccttttgtaatgcaattaattatcccttaatgtatctgttttgtaagtctgcatttttgtatatcggrtttaccttaagcttctctagtgaggcattctgagcagtggtgatcacatgccagatcgccctgcctatccacaaagtagatgaccaatgcacgctcctcaaacatctttggaggaactacctggccaaaacactggccaggatgcagcaagcagcagcaggggctgacagcaggcttactgccatcaacattgcttgaaatgcctctatgttctgaataaagaaaaaccataattgcttgtggtgaaacgaagcagtcttcatgttaagtagcaatggttatttttattggtagtaactgaacagtgttttgcaatttgtgaaacagtgtattgtgttttgtaaaatgatgtcatgaaatggtgggtccttggaaacctcctttccgttcagctctgcctctgttctttcaactcctttgaggctcaaaaaaaacacaaagatcagaagccttcagatagagggtggtattctggtaaagaagaaagagataagggacgctaccttgcttttctggcacaggaagcacatgataaagcatgctcagakgagctggaacagatatagctacctggttcgtgtaaataagaataatcaaggccccagagtgtgtatgcttccaggtggaggagaaaggggaatctcccaaaatttaaaaacaaattggaagaataaccaggacagccaagtgaagcagccacagggacccaagcagtcgaggtctttaatgtgcctggagatgactctctgctattcatgaatcttgctattgcacaaaccctatcaagagctgctgcttcccttccagccagaaaagtggtaagcggagcaagtgccaagcagaacagaccttatcatctgggtaacagacttctcagtgttggtgctgtgtctgttagagccttagagcaagttaagcacttccttggtgtgggtaaagaataaaggggaaagaaactactttagagcctctttttctcccaactcatatttttgataggaaaaacagaaaacccatccagttcttcagaaattgctttctaggcattaatactactttactatctatactgtttagttattcctttctttacccacctaaactatccatctaatccaggattccctcactctttttttttagttactaatcattttatgaaaataatgtatttataagtattttcttaaggtttgtgaagagtatttgcattgtgtcttcattttaatgtgtttgcaatcgctccgctccaggaagaacggaaatgctgtcttgtgagcatgaagtgaacgggctgttttgctccagccacttttcttgtacaaccacatggatggattagatgtcctcaggtcttttccatcttcagtttctatgactgtggaataaatgttcagatagaaacttcacttttggatgtactgctggctttgtctttggggattcaaatgttgacatgataccagttccttcttaataggagacccattaatgctatgatttatgcttatttccttgctatagtccaaagaagaaacacaagatatgctgagaaatctcagagctcaggcatcatgaagtagaactgaaatggcttcatctgagatagacattccaggaaaaagcacaagttcagaggtctctaaaatcctgtactgatcaccctcatcagtaattcgacaaacatttgctaaacagcttccatgtacgtgccaagtgctggagacacaatagtgaagaagataggtatggtccctaacttatgaccttttttctttttttttttttttttttgagacggagtcttgctctgtcaccaggatggagtgcagtggcatgatctcggctcactgcaacctctgcctcccaggttcaagtgattctcctgcctcagcctcccgcccgagtaactgggactacaggcgcctgccaccatgtctggctaattttttgtattttagtagagatggagtttcaacatgttggccaggatggtatcgatctccttacctcgtgatccacccacctcggcctcccaaagtgtggggattacaggcatgagccaccacgcccaccctcaatctgacctttttacaacctataaacaggtaatactgtaacaactaacatatattgggtacttattataaaccatgatctcatttaatcttaacaaccccacaagataggcactatagatgtagtcttaagtaggtaaatgagacctccagtttacagataaaaaaacaagagtcagagaaactatgtaacttgcccaasgttgcagaactagtaatagtaacagagatttgtacaaccatacaggattccggtcactgcctcacaattttctattcttccttgaatccccttttagtctttctgccttactgcttctttcccatgcctcggcctggcccctagctccacagaacagagagagaagcggatattgtaactgcaccttcattggtccatttaactcaacactgtaatacctatgtctcataaaaatagcatttcagcatcttttctttctgctttctagcccaaccaagaactgatgcaaacacagttacaaatcagcagcagccctgcagtcccagacatatgggcagtttctgataacccaagcagttttagctgcaggcaaatttgccttcatgaatctgctagcctgttgccttcttcacacacattctttccgaatagaaacaatcaaatctcatgaaaatgtaaatccactataacttaattcaactacctacttacctaagggtgtttttgcattactcaatcattcatattttggatgcctatttgtacccaggcattggggctagttgctggaaatagacagataaaaacagcagattctgatcccatagagctcagtgtaatgaaaggacacaaactgacattttatggtgtgtactctaataaggaaatgcacaacgggtactattggagtgaagaaaacactgtgtgtatgtgtgcatgtgggtgcaggtgtgtgaggtgaagagactcagtggagggtaacaggcaactaaactaaaagaaagcatgtacaaaattccagattagggaaaccatggcaatcaagaaactgggaccttcaaatcatttaatataatagaaacacacagcttaaggtggatgacaaactatatgaactggaaagagaaaagcagaggcaagatcacttgtgctaaattggatttgtgtcctgaagactacaggaaccactaaaggattttaagctgaagagacaactagtaaaagaacaggatcctcaccaccaggtggagctggatgtcactcacatgcattttagttgtaggacagtgagcagataaagttaactttttgaagttttggaatgagttggccatgacatcatttaccaggacaggcagactagagacagacagacatggataaacgtgtgtcttagatttcagggaggatgtcagtgttttgttttgttttgtttttttccctagaaataagaaaatgtaggtggaaacgaaagttgatctatcaatttctttatttgctcaacaattataaaagttagcatttgctgagcatttactaggtgccaggcgctgtgctgaatgtctcctgtatgatgattcatttcatcctccatataaccctatgatgtagttattattttatagatgaagaaactgaagcatagagacatgaagtaacttgctaataagtagcagcaccatacgcaggcaagtcggacttcatgagaaatatatttaacacaatgcctggaatcacaataagcactcagcaaatgcatatgattgggagagcaggaagaaatctaagatcccttgattcaattctactctacaacaaggtgctaaaggaactcagtgaattcagaaacaaaatgtagttctaatccagggcctggcaaagagtctagttagattagaatgatcaaggataagtatagtaggtatatgtaagtctttagaagacttcaaaatgactcagaaagtattttcacttattgtctacctgatgacatgtactctattagtacaggtctccgattgggataaaagaacaatggagttctcatagtagcatttcaatcctgtggctaacctgagtggccctggaacctatttcctcacttctaaaataaggacatggtctgagttccctttcagctctaatatcctcagagcatattattattatattaatgtgaacatagcttccctcaaaaaaaaaaaaggttaacttacaataaatgaagcttttatgcaggtttccgtagcgtagtggttatcatgtgtgccttgcagtaagtgaagtctcagctacatgagactcagcagtctcatgagctgccactacagaagtgttagttttagaattcataataattccttttattgccacaaaataaattaaaactgtagtcatatatttttggataatacaaatttgaagggttacttcgatatatggggaaagattgtttctacttagggggtgaaaaaaagaaagagtaataaggtttgaatcacacattggcccagtaaagcagacttyggaagatctggcagcagaaccatgaagcagaattaatttaatcatgaaaaactttactgactactatgtgcctctgctagatattagggattagactgttaagacattgtccttttcatgtcctttagtaattgtgaagtaggctataagtaagaccttaatagctaacatttggaacagaccaaacatgggcaggaatcccagaaggtaaagctcattctttctgataggaccacttttaagtatttccaaactttaagatctagaaaatttgtaagtatttctatgtcatgggtttcctattgtgcaaacccaatccaacctacacataatccaccatttttctactaatctcagtgtatctgtcttaacatcagaaaagcagacttctgcaataatgactaatcaaaacttttctgcagatccactgggacatgggtttatctggcagtcctcagataaatcttcaaagaacaatatgtaacggcattccacatcctagcaaatgacaatgggaataaagatgagagtagcatatgcttccggcaagtgtaagcatcaccatcctagtaggtttagaagactgatgattatttattgtctagaatcttcacaaaatcaaatcacagtcatcactctagtggcatgtacattaaactatgtgcatcaaattccggcccttgaagaacaaggaagcctacggatctggacagagaaaaaggaaaaggaattgcaatggaaattcatgtaagaaaacaattgcagaaacagctcaatacctttgaaaaagatccctatagtaagtaagaaggtaagatccaagccatgtagttatgcatgcctcagagcacacctgactttggtcaaagtcactaagaaatttccaaggtaacaatgaaagaaagaaaaaagagagagagagaccatccctacaaaatctgaaatggttgttgtttgtttttgagacagggtctcactgtgtcacccaggctggagtccatggcataatcacagctcacagcagccttaacctccggtgctcaagctatcctcccgctgcagtctcccaagtagctgggactacaggtgtgcaccaccacagccagctaattttcgaaattttttgtagagacggggtctccctatgttgcctgggctggtctcaaactcctgggctcaagcaatcctcctgtctcagcctcccaaactgctgggattataggcgtgagccactgcacccagcctgaagtgtttttaagaaatgagaagcctctaggacttctataataatctttgaaattggcatttataagcattaccttaaagaaattaccctttaaagttcatatggatcaagggctgtgattgctaactaggatccaaaaaagctatgaataatgtacatacaatacaaataaaatttggtatgcagtttgggagtattcctaaagcgcattcattgacctcttctgtagtgagagaagccaactgccaaaaaatcaccatcatttttggttgttatctgaaaatgactgtgagagctcaacttgtgttgccaggacctcaagccrgttggratcaggggctccctgctcatctcaactagaggaacttcctctaaatccaacttcccatggggctagtggtttcctccacaacattccacaggccctatggtcccctggtgctgggcagctggctttctcagccaattgtcacaaacagccaacagccaagcccaaaccacctgttgaccaagcagtatatctgcacccaaccaacaaagttatgctcaagcttaccctataagaagagcaagaagcaaggggaaagtgtcctattactaaatgaaaactcactgtgtccagaagcaggagctaatcctgtcatgatggttctgtgggggtgggggtgtttgctgagcagggggatcaagggacccatgacctctcttgatgacctagtaagattcttcaattagactcattgcttaattcataccacatgactttgtggaattcagtgcaaatcctgctgattatagctggtgaccacagaaagacacagaatttgctcttacctgtcttctaggacaggtggtgatcaagaaggatccattttacacaaccccttgccagagatttatgaaacctctggtttgctggttattataaaacataatgcagctgggcatggtggctcacacctgtaatcaaaacactttgggaggccaaggaaggtggatcacctgaagtcaggagtttgagaccagcctggccaacatggtaaaaccccatctctgctaaaaatacaaaaattagctggacatggtggtgagcacctgtaatcccagctattcgggaggctgaggcaggagaattgcttggacccaggaggcggaggtggcagtaagccaagattgtgccactgcactccagcctgggcgacaagagcaaaactccatctcaaaaaaaaaaaaaaaaaacccaccacataatgcaagaactctcaccctaaagctagaggcagcaatatgctcccccaaaaaacaaattatagtctcttaccccacctaatgaactatgaaagataactgagtagtcaaataaattaatcttttaggtataatttctccatagaatagactcaataaaagaattgggagaaaagtgcttcaattaagcaaagatctaaatactctaaacaaggccaacctcttaacctaagctgattatttccatgcaagaaaatttaattctataacagcagatataaaatcaacttgtaataataaagacaaaagtttcaaagaaaaaccataaacacaaatgcaaactgaatcctgctttaattcaagcttgtggagaacaaagtcctacagaaacattccacagaattttctggaaaagagggatcacaacaaccctgtaaaaaggagactgagagtaattcatagctcaccaagttctctccgtatcaaatttccagaatacccacaagatttcttcaccagctcagtcctgactcaacctcttcaatctttatttcattagaagacaaagggtcatattatttaaaattattctagtctcaagaaatttaaagacttgaagtagtagagcattcaaaacttaaataactttaacaagaaagccagctgatcttaacaagttactctgctagtaaatgggaaatagactgaatcatcctagacataatttcattagggctgcaaaccacccaggggagagtagcacaattataccattttgtaatccacattcacaagaagtttgctacacaaatgaagaaaactttgtgcccatagacaacttattttttaaaatatcactccccaaaagtagccatgtttccacttttgttcccttttccacatcaaaaataccaacttgatttcttcaggaggaatggacaatccaagtttatacagtgggctggaaaaagaaaacactgaaaagtctaaaagcacaaaataaacaaagctgggagggaagacagtaagagttatttgtttctaattcattctgaaacccaaggcttgtatttaccagtcctttctgctaaagtcatccagctactgaagaggagagcctggaagtaaagtctggaggaaaggtagttgactgataaactgtcctacaggtgacagtcaaggagagaagaggtagaggtttggtggttaatgaataagttcctgactagccagctcctcttcttctcttgacttagatcaaccaatgtagatgcgatgaaaatcattggcaccaaaagcagcattacacttgggacatttgcgctggcgggtgtcatagcgtgtcttcacacactcaaagcagaagacatgaaaacacttagtaagaacagcatcctttttacgcatgttacagcayggacaggtcaagcgtgcctaaaaagaaaagatgtcagagtttgaacaaccatgaaagtttatgatccaaatggctctcatatactacacaaccaagaagaaaacccacaaggcactaaaaaaagagcatcatttccccccaacctccaaaataaaccattctctggttactatcatgcaaattattctcccagtctattaggccacttaaagctttgacaaaaaactaatcactaaggcattttttctaaccttgtaatccttaatctcttccatcagaatctcatcacacttgggtacattgtctggtttctttgtggtctccagcttcctgcgaagtctagagatgtcctcctgtggcaggatagcatacccattagacacacttacccaaatctatcatttttgagaaaaataatagacttgagttttctgttgtgaaaagaggggactttctatccttttatggtcaattatcttgtagaaatgtagagaactgcaaatggcaggatattttcttttgtttcagaagaggcaaccataattatatccccaaattagaattgcatctattaccaattcagtcctgtgaaaacacatctaagagtttagaggacagtctattttgttttatagtaattagttttaagctgaaggtagaacggtttaaaataattcagagacttacggataaagacagaaagacatcatgagaaacagctagcatgacaaaaatagagacattatacaagaacttgaaaatcctctactgctgctatgctgttacttctttaacaatttactaattcattaatttaacaaatatttattttgtgcctactaggtgcaaggcaccataaaagagtctgaggatatggcagtgaagaaaacagacttactctcttccctcaacaaacttcctcaagtctagtaggaaatgacatacattggactaatgattctttcatgatatgggtcacttccgacctcagaaaacacctaaaaggtgacaagaaaagacaactgcttttacctgggctcgtttgaaattgaacatgtccttttctttggtaacactgttctccacgatctcatcctgaaaatcatgtagcttcttctgagccaactccagttgtgctttgaggtcatctgcaagctgggctgcctccattgcctatgtaggatgtacaaataagtgacaccattgtatcacctattattgccagtgaggcaaaatgttagcccaagttgaaggaataaagcgaacttacaatctcaacagtgttatacttatttgttccactgagactaaccatcattagattaatcaatcataccttgcgtttattcatctctaaggcttgggtcctaagacccagctctttctcccctgtgccaatgttgctctgtaacagatgctccttctcttccagtttccttactacctgtagctgggcatcaacctttgaacagaaaatcagattttaacacaaatgaaaagattaaaaaaagaaaaaaaactattctgttaatctataagcccacaaaatacagtatgttagaaatctcaaactattactgattttgcccatgaacccttcaaaatacatcaagactatgataactgaaagctttacttttaatataaaatattgtggaagattcagtaagagtctgaaaaatgactgaaaagattcttttccaaattgccaaaaatagagaatgcatgctaatgcttaaaacctggcaattcatactataacatataaattagaactcaaacaaaagtccaagagtatttccttcagaatggctagacattctaaaagagtcttttttgaaattaatgcacaaagtagaatcaaacaatattaaagtgtaaaaagtaaaatcacaaacacccacctcctaacctcacccacaactcatcccaatatgtagaggtaaccattctaacagtttctcacactgccttcaaaaagcatatcaaaaagatagtccaccatgatcaagtgggtctcacaccagggatacagggatggtttgacatccacaagtcaataaatctgatacaccatataaacagaatttttaaaaaatcacatgatcatctcaatagatgcagaaaaagcatttgacaaaatccagcatccttttatgattaaaactctagcaaaatcagcatagaagggacataccttaaggtaataaaagccatctatgacaatcccacagccaacattatactgaacaaggaaaagttgaaagcattccccctgagaactggaacaagacacagatgccactctcaccacttccattcaacatggcactggaagtcctagccagagcaatcagacaagagaaagaaataaaaggcatccaaattggtaatgaggaagtcaaactgtcactgtttgctgattacattatcatatacctagaaaaccctaaagactcatccagaaaggtgctagaactggtaaatgaattcagcaaagcttcactatacaaaattaatgtacacaaatcagagctctgctatacaccaacagcaaccaaactgagaatcatatcaagaactcaaaccctttgacaacagctgcaaaaaaaataaaataaaatacttaggaatatacttaaccaagaacgtgaaagacctcgacaagaaaaattacaaaacactgctgaaagaaatcacagatgacacaaacaaatggaaacacatcccatgctcgtggatgggtagaatcaatattgtgaaaatgaccatactgccaaaagcaatctacaaatgaaatgcaattcccatcaaaataccaacatcattcttcacggaactagaacaaacaatcctaaaacgcatatggaaccaaaaaagagcatacatagccaaagcaagactaagcaaaatgaacaaatctggaggcatcacattacctgacttcaacctatactataaagccatagtcacaaaaacagcatggtactggtataaaaataggcatgtaaaccaatgtaacagaatagagaacccagaaataaagccaaatacgtagtcaactgatctttgacaaaccaaacaaaaacataaagtgggaagggacaccctattcaacaaatggtggtaggataattggcaagccacatgtagaagaatggaactagatcctcatctctcaccctatacaaaaatcaactcaagatggatcaaagacttaaatctaagacctgaaaccataaaaattctagaaagcaatattggaaaaatccttctagacaatggcttaggcaaagacttcatgaccaagaacccaaaagcaaatgcaacaaaagaaatgataaatagatgaaacttaattaaacgaaaaagcttctgcacagcaaaagaaataatcatcagggtaaacagacaacccatagagtgggagaaaaaaatctatacatccaacaaaggactaatatccagaatctacaaggaactcaaacaaatcagcaagaacaaaacaaacaatcccaccaaaaagtgggctaaggacatgaatatacaattctcaaaagaatatatacaaatggccaacgaacataagaaaaatgttcaacatcattaattatcagggaaatgtaaatcaaaacctcaatgcaacaccacctcactttgcaggaatggccataatcaaaaaatcaaaaaataataggtgttggcatggatgtgatgaaaagggaacacttttacactgttggtgggaatgtaaactagtacaatcactatggaaaacagtatggagagtccttaatgaactaaaagtagacctaccacttgattccgcaatcccacttccgggtatctacccagaggaaaagtcacgccatggaatactactcagccataaaa

SEQ ID NO: 6865 - DNA, 34217 bp, Homo sapiens
cacatttctttccctgaagccttctgtaacctgtcattttccttccttcctcttccggagcctgctgctttctctggacctgtctccacctcccacacagctcatcgtgaacaccacttggtgatggagggagtggacccgtgtgtggtccccaagtgaggccactgggagtttgtccttttcctcctttgcttcactcccagcagcagacccaggttgtcaggacaggagggcctgagctaagcagtaggcatcagtctcgtttgtcttcagacggcgggggcaggtccagggtgaggctgggtggagggctgaccaaggtccaaagggcctgcgcagcctccgggagggcagcttctccagccagaggcttgtgtgagccatcgtgtgctgggcttgtttttaagtaagaaacaaggaaatcactccagattctgtcattccaaggaaagggaaggggacagttcaggtttctcagctgttcttaggggtcactgagcgtctacctcctcctccagaggaggctggctcagaacacctagaggagggggccggggatgcaccccccaccagaggctgccttcagcgtctcacgggtgcaggacagcgctcaggcttgggctctaagctctgtgtctagtgtagaacatggggaaggagcatcttaggaactgctgaagtaacttcttactgctctcacaattctaaggaagcgggagaacggcctcctaccaacagcgcccaccccagagctgcctgggaaagggcagttttactgaaaggtgctttactgttcacctgcatctttcagcagctcccctcctgccctcacctggtcttttccctctttatcccaagcctttatgcttgagtcccttccccaggggctgcccacccgacagttccaggcattccctacctgagcttcttgtctgcttttccttctcccactgcaagcggctgcttgtggggcctgggatgagccctctctgtccccaccggccctccttgccaagccattcctgggtgagttcaggcctgcgggagccacacattcatctccacctggacacttgagccgcatggccagacccctcccacctgatgcggtggtgcgtgtgatttgtcaaaagaaagccttctggatgctgttaagatgtacccttcaggtgaacctggtatcagacccacagtacttgctgtttgagaaaaaataaaaacaaaaaggtcacctgttctccagcccttttctcttacctggtatttccttcctttctcctcccccaccccaaataaaaaaacaaaaaacactagaatttatttatatgtattgatgttgtaggtctaggtgaaaaaaaaagaagtaaatgtttcactgctctatttatatataatgtctgaattaattctgtgcaggaaaggccaggaaattgcatgtgaagttcggtgcagtcaccacctgtgtgtgacctgagctgcagtctcttcgctgagatgcaggttttaaatgagacttggggggctgagggcaggcctcaggcctcccagcgccccaacccctccttggtctaatgaaatgcagttcttagtgcagagatgttttaaggtgcaatatatctcttcctttcccgtggttttagagccaagctcaaggtagtaggacgtagggtcttattttgttttcaaacccccatcctcagagcgcagatacatgcagaggcttctgccaggataccacggggccttagtgggaacaggtggagaccagcacttccctttcctgctgctgaggtagggattggggggtcagaacccactcacttttgcctgttaaagttgccctcctgacgctggcagctctgccttggtcactggggatgcggctcgttgctcagccaccagtggccttgcggtattgtccaccatccactagagtgggatgaagtccagagtgtgggtatacatctcagatgcccatctacccactggggacttcaatgccagctgcatttggtttggttttcttaactgttggcttctccccacagcgttttttgtttttttttaaacattcatattgttttcaaacttggaattcatagacactctggctctaggttccttaagggggaaaacaaaagatgactttatttcacattcaagaaaatcagttcagttccaaagctgtggtccttccagccacttctagggacactggggaaccttgttaaacgttgacatcagtgctctccagccgtgctgtcaccctcctatcttctggatctgccttcgggatggtcagtgacagcttctggaagctgagcacacacaggtgcacagccatgctgtggtctggcctgctacggcagcatggcagctctggtggagccttctcccttgccatttggttcccctgtgccaagtagctgcaggctgcccctcaaatcttcatttgtcccttttcacttcctgcagaacaagcctgggttagagggtctgctggaaatggcctttgaagaccaaggataccaggatgtgtgcactctgtcgtgttctgtgatgaatgggaaacgtaggcttccagaaagccagctctcttctgaaatgtgacggacctaagcaggaagtcatccaggacaggagtggctcagtgttggggatggacgctgtcgcccagccatgctccaccagggccaccaatgtgtagttggctggtggtcttcgggcatgtgagacctgctcttcactgtttccaccccacttggtggcctccaggatggtagtggcaccctcagagccccatcttcagcatgttctgaagcctcagagtggaaattcctgctaaggctctgtgtggacgcctttctcccgtgatctaaaggggacactgtactcaagcttttgacctcatgccttgtgtagtaaaaaaggatttgggggttttgtttggttcctgagagggttgtgttttgtttttgtttccttttgtttatgttttggcctttcctctttgtctttccatgtagaccagatatttgaaagggcagacgatggctagaggtgtaatgtgcagcttgtttatacggtattttgggaaacttaccttggatgggaaatcgaatcgtggattcaccaggccggtgctggcacactcaccctcgccctttccctccggttcagtacctattgtttctcctttcaaatatgtgattgtactagctctttccatatgaaagaattctccttatttaaataaaaaaagtttaaaaagataaagctgaacgtgctttctcaggttgtacatccctcgtttcttggtcatttgaccagagagacctacagatcaaagaattctaattttacagagttcacacggaaattaggagtggcacggctgaaatgccttaacagaagctgtgtgggtagagaagggattgaaacccgtggctaagaagcatcttccaaatgcggcagcatcaagcactccactctcttcccacggatggcatctggttgtgcacagtgcctgcctgtggccccgtcacttgccgtgagaaacgagctggtcagaggaggtaagcatttgatgtggcgtgttgtgttgtcacttctagcggtgcttttgcaggaagtggaggaggattatgctgtgctttggggtggggagggagcaagccaggcctggggtagcgaagggtaaaaggtaagaatgggctgaggcagcagttctcggttttgccattgcctcactgacctggggaaagacgtttcaccacctgagtcagtctccttaatcataaaacacagattgtaatggtatcgacctcatggcgtagtgtggattcaaagtcaccagtagcttttagcttagtgcctagaaccagctaagaaaacttataaattacccccaagaaataaaacgctgtttccatgaggaaccccagtccctcaacttccttctaagccttttgactatggaagagagttggggacctggccatgggcatctcagctttaactagccacactcactgccctgatttactgctccctagggacaggtggctcacaaaatctcaaacggagaccagccctgaaagaggctagtcctaaggttgggggcttgcaagatggaggctgtaagtcctgaggcaccaccactgttagcatggcatgaaccaaagcttaacagcccagccccactccctcctggggcccagggaaccctccctgcccactgtaaatacagttgcctgcaggctctggccacaaacccaggtgagccccagctccttgcctctctgtgggatcttgggtgagtcacataacccctcaagggtaagccataaagaagtaaccacgaaattctaactggtgtcatctaatgctatgttgcccaacatggaaaaaaagtcttgcaggcagccaagaaccataatgaaggttattaaacctgcagtgtgcccttttggtctgtatagattaacatacaaatagaccaggagatcaagaaggagcgaggctgagaagagtgatccatcagcctggttgcgttgctgtcagttaccctgctctgggtgccgactgttcagggaaaacatgggaaggggtgcattgacccaaccaaaagtaccatgtctgctccaaagcaggcctttgggaaggctcttgaccctcagcagagggggctggagaggctgatggatgaggaggagccctgggaatggaggaagaagcctccagtcttctgccacggagtttaggggagatgcccccactggagcctctgatggtcatgcagcccccactgatgtccaggtttttttggttttgttttttgttttgagacggtctcactttgtagtccaggctggagtgcagtggtgagaccaaggctcactgcagcctcgacctctctgccccaagtgatctcctgcctcagcctcccttgtagctgggactgcaggcagacgccaaggggccccgctaatttttgtatttttttgtagagacggggtctcgctgtgttgcccaggctctcctggactcaagcgggctcacggatcctcccacctcggccacccaaagtgctggggttacaggcgtgagccaccgcccccggccctaggtccgttttaaatgcccttaccctcagccacttcaccgctagatgtatgtgcaagcaggatcgtggcatcgatgtttttcggcaaggaaactaggagcgcccgcgggcgtgggggcacgtgcctgtggtctcagctgctctggaggccgaggagggaggatcgcttcgggcagagaggtcgaggctgcagcaagccgtggtcctgccactgtactccagcctgggcgacagagcgagaccccgtgtcttaaaaaaaaaattaaggtcggacgcagtggctcacgcctgtaatcccagcactttgggaggccgaggtgggcggatcacttcaggtcaggagttcgagaccagcctggccaacatggtgaaaccctgtctctactacaaatacaaaaattaaccgggcgtggtggcgtgcgccttcaatctcagctactcgggaggctgaggcaggagaatcgcttgaacccgggaagcggaggttgcggtgagccgagatcgcgccattgcactccagcctgggcaacaagagcgaaactccgtctcaaaaaaaaagaaaagaaaagaaaagaaaaaaactaggagcaaactggcgcgcccggcagaacgccgttgtgcagacgcagaattaagatcttcacgccagatggagtgaaaaagcaaggagcagaagatgggtgggagcccactgcgctttttaaaatctgcacgtctgcttagagtacacagaaatcctggcacacaaaacagtagcacccgagagaggggaggtcgccgcgtttcacacctgcctctcctccgggaccggcgccctcgcccgctgcgcacgcgcgtcaccctctcccagtgcgcacgcgcgctgctgcccgtctggccccgcaggctcggtgaatcgaacgttgagcagggcggtgggtggtgcggagtgccgagcggcctcacccccaaccgtcggcccagtcggacggttccgaggcgttgccgggagccgggcgcggctctgtgtggactcggagaaacgcgggtacatttggggacaccggggacgagagcccagcccggacttgggggagtccgtcagtgccggacgcgggtccctggcttgcggacgggctggggccgggggcgtccccgtctttccggagctgggggcggggttcgggcccgggcagatgcggcgttcgggcggccgagccccgaagtaagaactccgtggcgcgtgcagccctagggaggaagggcgtgctgcgggtgcagtctcagggtgaggacggagctggggccgacgcagcctcgggagttggtggacgggacaggtgcggcctgtggggaagaagggccggccagggagatgcggtctgcaaggggagaggaggcactcccaggacagatgggaccttttgggacgaaggcgctcaaggcagatgcagctcagggagggaagggcgcgtccagggtagatggggcctgaggagaccagcggggcgccaacggccagatgcggctttggtgtgagacagggtgtcccaggcctgatgcagcctcaagagaagcggagctcaagggaagatgaagcctggaggagaacgtgggggcgcagggtgcaaatgcaccctccaggcgagaaagggagcacccggggatgatgtgccgctgggatagaaggcagggaggcactgggggcagatgcatccttgaggagagatgaggaggccccgaggctcgkccaggttggggtccctgggctgtaagcagctgagatggcacccaggagctgcccagggtcaggtagctgtggccgcactgtgggcttctggtcgtcggggagggaggggagaaaccctggcgttccttagcagtgttctcgcgcccaagacgtgctcggcaggttttgtggaatgagttgttgaaaggagtgaatgtccagtcctgagatcccctgaattcccacccgagttcactgctagtgcccctcaccccacatgtctacctgaaccaaggctccaggaacttcggtctttctcagcagcccggctgtgctgtggttctcctcgtgtgtccgggagccgggtggctggggatcccttctgtagcctctcgtgagccctcatggaccacggctcctcccttcttttctagggcgtctgcctgagcccgcttttckacaagatgtggggatttttgaagcgccctgtagtggtgacggctgacatcaacttgagccttgtggccctgactgggatggggttactgagccggctgtggcgactcacctacccgcgggctgtggtgtaagctaaatgactccattcccagggtgaatctagaattgtactttgtgacaggaggcgcccttactgaatagcataaatgggagagtgaaatcctggcttcttggtgataggtgtttttggcagtgagaggagagaccagtctgtccccaggacagccccagcagagtacaccttttaggtcttgccttctgagtctgtaacaggtgaaatttggcccattaaaggggtgcagtagaggaaaatctggttgccagccttaagtaacagttttaaagtctggacggcagaggattaatggatttggaagtaagtcttcactgttgagagcactttttagaatgtgtttttgtcataatgggaagtgattgctgttattattgaagggctctttattaactgattaatatgtgtgtgtgtgtgtgtgtgtgtgtgtgtgtgtgtgtgtgtgtgtgtgtttttgagacggagtcttgctgtgtcgcccaggttggagtgcagtggtgccatctcggctcactgcaacctctgcctcctgggttcaagcaattctctgcctcagcctcccgagtagctgagattacaggtgcccgccaccacacccagctaatttttgtatttttagtagagacgggatttcaccatcttggccaggctggtattgaactcctgacctcatgatccacccacctgggtctcccaaagtgttaggattacaggcgtgagccactccgccctgctgcatgttcttttttaactttttattatggaaaacgtcaaacatatacaaaagcagggagacaagtataatgaatgaccccccccacacacaccagtattttcattacccagcttcaccttatcagttcacagccaggcccctccctgcagtggtttttactttgcagcaaatcctagtattcatagataattcagcggtatatctgtaaaagatgaggatttttttttttttttttttggagacatagttttactctgtcgcccaggctgtggtgcaatggtgcgatcgtgattctcctacttcagcctcccgagtacctgggattacaggcacctgccaccacgcctggctcatttttgtatttttagtagagaaggggtttcaccatgttggccaagctgatctcgaactcctgaccttgtgatccacctaccttggcctcccaaagtgctgggattacaggcgtgagccaccgtgcctggctgaggattcttaaaaacaaaaatcacataaccacagttgcattatcatgcctgagaaattgacagcagtttcttggttatcttcacctctccctgattgaaaacatgttattgcagttgattcccacgttttcctttcatacttgcagccgtttcattgggtcatcgctagccacagacatgtgctgctggtgggggcgggggtgggggggttgggtaggtgggtaagcaggattagccttgcgtcccaggaggtctttcagcaggttggctcatagtatccacctaaatcaaacacaagggagagacagaatctgtatgggcaggcatgctgagtgccagctgtgcttggtgaattccccatgtctctgtgggtgggtgatgctgtatgcatcttaatatttggggatgggaaacaattggggcaaaagatccagcctttgctgatcactcactcaaagtcatttggaaacacatacacatttatcctcacagtttttgtttacagttaagattctaattgaatataatatgggttgttgtttttttttctagttttgacgaagtatattatgggcagtacatctctttttacatgaaacaaatcttcttcttggatgacagtgggccgccatttggccacatggtgctggccttgrgaggtaggagtcatcaggagagtagcccctacccttcaggacctcaaatacatttaaaacttatcagtgcatttcttacaggcagaaaccaggtcttattattgatgcatcttgtttattgcttgccacagtactctagaaatatttgctgaatgggatagttactgattaatcttctgtttcaggttatttaggaggattcgatggcaattttttgtggaacagaattggagcaggtaaaagataattttcatttcccttttaatgtgcgcaggttagaatgaagagattgtgacttttgtaaggattaacaactgtggctttttttttcctttcatacctagtcccacagaaactgtgccttattaatctgagtccagaaaataataaattggttggatacaaatgaaagacttctggaaagtctggttaaaatcttactgttcagttgcagtcattatttcagcccttgtcgttggtacacgtatcacagagcgtctgattgtaatgatcggttgtacatgtgaattttgtccattgccacaatgtttttgaaaatagggagggtaggccgggcgcgctggctcacgcctgtaatcctagcactttgggaggctgagacgggtggatcatgaggtcaggagatcgagaccattatggctaacacggtgaaaccccttctctactaaaaatacaaaaattagccgggcgtggtggcgggcgcctgtagtcccagcaactcgggaggctgaggcaggagaagggcgtgaacccgggaggcggagcttgcagtgagatgagatggcgccactgcactccggcctgggggacagagcaagactccgtctcagagaaaaaaaaaaaaagaaaaaagaaaacagggagggtaaatatgtataagtaaggcggtaaattttagaatccttagtcctgtctatgcttcatgagatcaggttccatgactatgcaaagctaatttcaaagccttcacccatagtttatgcactctgctgctgatggggtccccagttttgtaaacgtgcattttagagtctgtgaacatgacggygctatgtgaaagcatagctgcagtacacagagatggtgtgtgcacagtgtagtcagctctgcagtgtggttgcttttccagaatacagtagcaacgtgcctgtgtggtccctgcgcctgctgccagcactcgcgggggccttgtcggtccccatggcctaccagatagtgttggagctccacttttctcattgtgccgccatgggagctgctctgttgatgcttatcggtaagacctgcgcccctgcctgctcttgctgtcatgcagggaagaactgaccctttggcccggaagatcacatgggcttggtgggcgagctgcaccagaaagtgcatctggttcatccaaatttgacgctgcaagtcacccgctcccaggctgaccccgtggttatgggattgctgaattgtgggatcagactcttatcagcagtcggggtatggcagtagaaaactgcccagatgctgctgcaaagtccatgcacacgtgggcacctccatctccaaccaatcttgtgaccaaatgataacttccccttgttccaccacctcccaggccttggccaattgagatggactcgtgagtcagtggatcctcttcagagagggtcttccagctcacgtttatgaacagatgaaattaaagcagatgaaaagttagattaggctgggcgcagtggctcacacctataatcccagcactttgggaggctgaggcgggcagatcacgaggtcaggagtttgagaccagcctggccaacatggtgaaaccctgtctaaaaataacgaaaaatacaaaaaattagctgggtgtggtggcaggtgcctgtaatcccagctacttgggaggctgaggcaggagaattgcttgaacctgggaggtggaggtggcagtgagccaagactgcgccactgcactccagcctgggcaacagagcaagactccatctcaaaaaaaataaataagccgggcacggtggctcacacctgtaatcccagcactttgggaggctgaggcgggtggatcacaaggtcaagagatcgagaccatccgggccaacatggtgaaaccccatctctactaaaaatacaaaaattagctgggcatggtggcacccaccttttgtcccagctactcaggaggctgaggcaggagaatcgcttgaacccgggaggcggaggttgcagtgagccgagattgtaccactgcactccagcctggtgacagaacaagactctgtctcaaaaaaataaataaataaaattagccaggtgtggtggcatgygcctatagtcccagctactcaggagcctgaggcaggaggatcccttgagccctggtggtcaaagctgcagtgagccatgatggtgccactgcactccagcctgggcggcagagcaagaccctgactcaaagaaaagaaagagacagtagaaaatcaaaagagatgtgtattgggtgatgactgtatgaggccttgtgtctayagaatgttttaacattcacaacagccccacacagttgtatcgcttctgaagtaatgccttttttcatgagtgtttttcatcctcatacgttttcccttgctaccttaaaattgacaygtgtttcctctttgaaacagagaatgctctcatcactcagtcaaggctaatgcttttggaatcagtgttaatatttttcaatctattggccgtgttgtcctacctgaagttcttcaactgccaaaagcacaggtatggaaaatggagtgtcttcctagttaacgagaacagagattctgggtggtttgttgatctgagatggtccagtacctttttttgtttcgttttgtgagacagtaccttttcattttgaggagttgcttgctaaatatctttttttttgagacggagtccctgtcacccaggctggagtgtaatggcgcaatctcggctcactgcaacctccgcttcccaggttcaagcaattctccagcctcagtctcccgagtagctgagattacaggcacacagcaccatgtctggctaattttagtatttttagtggagacggggtttcaccatattggccaggctggtctcaaactcctgacctcaggtgatctacccgtcttggcctcccaaagtgtggggattacaggtgtgagcctctgcgcctagtgctagatatcttttggtcctctaatattttgggggttggcccttggcttgtgacttcataaatacatcttcatttttctataatttaaactaacaggacaacattttctgggcaaaaagaaaaattctgctgggatggatactttgggagatgggaattctttcttactgcccctgtggctcagcatggccagccgacccagaaagatttctctgaagaatgtggagcttcactagccttttggaaatgtgtctgaactatttctgtctccatctgctttgtttttattccagccctttttctctgagctggtggttctggctaacactgacaggggtcgcttgttcctgtgcagtggggtgagtttgagcctctggtcttgggcagtgtcctcctccatctccttatgttttcctgtctcatgttaactccatttctgtcatgtctttgcagcatcaagtacatgggtgtgttcacgtacgtgctcgtgctgggtgttgcagctgtccatgcctggcacctgcttggagaccagactttgtccaatgtaggtgctgatgtccagkgctgcatgaggccggcctgtrtggggcagatgyrgatgtcacagggggtacttggtgaaaagactccaatcctcaatgttttagaagcaggcaggcctgggcagcctcgcctcttggcctctgcaggtgcctctgtatgggaggccagagtttctgtcactaactttttctaagctcacaatgtctagaggtgggtrcgcttttccacgcagtggaacatgacttttctttgaatctctggcaggtctgtgtgttctgtcacttgctcgcccgagcagtggctttgctggtcatcccggtcgtcctgtacttactgttcttctacgtccacttgattctagtcttccgctctgggccccacgaccaaatcatgtccagtgccttcyaggccagcttagaggtaagtaagcagtgggcatcgtggccactggagaaggaagatgatagtggacccagagttttcttacaaacacatcaagtgaacattagcacttgaatcaaaacatgaagaatccacatccatatttctttttttggtgggggggatggagtcttactctgtcacccaaactccacctcctggcttcaagcgattctcctacctcagcctcccaagtagctggtattacaagcacctgcaaccacacccagctaatttttttgttttgttggtagagatggggtttcaccatgttggtcagtctggtctggaactcctgacctcaagtgatccgcctgcctcggcctctcaaagtgctgggattataggcgtgagccaccgcgcctggcagctgggagcattttaaagtcaagtcttacaaaccctgggcagtttcacccgccttaaggaccacactcaactgtgaccttcattcctatgaacctcgcagcagtggtagaaggtatcagtagaggtggtcaggactgtggttcctgaagtcagccaagcctgccgacggccagtgctgtagtgctgtgtgtttcagcaagttgtttggctcaccctagtcttggttttctcaactcttagacagacatcatcattgctcttacctcattggatgcttgtaaggactgaatagggtgcgcgtggaaggctgaactgagtgcctggcccagaggcagcatttgatcagacttagtgctcattatggttctataatgtaacgtgatgtgattaaatgggagatcattaccactgttacaagaatggccaccagcctaaacatcaccccagagggaggagtggccatcggraaggctggcttagggkcatttttctttctgtctctcactcatcaaccttctgcttctgtctcagggaggactagctcggatcacycagggtcagccactggaggtggcctttgggtcccagrtcactctgaggaacgtctttgggaaacctgtgccctgctggcttcattcccaccaggacacctaccccatgatgtaaggtgatggttttactttgaagataattaaatgctttatttgctcrtagatttgcttatcttagcaactttccctttctttgaggaagtttgtttgcaggacagaaagaagttgagcagcccgggtgctgattgccagtgagcttcgtggttcccgggtgttgctggagggacttggcgtatggcagggcccagggtcggccccagctctgtggctgtggctgacctcagcactgcctgcctraatcatctgatttcggctccttgtctgtggtaycttcattttccctgaaaccccttgctaggttgtatttgttgaaatctgcttccctttgcagaaactttaggagaaaggcgtgtgggcccgatcgatgacccacttccagatacgtttctttycctttcttttctttttctcataaatagacacagggtctcactatgttgcccaggctggtstcaaactcctrggctcaagcagttatcctacctcagcctcccaaagtgctctgattacaggcctgagccaccgcgcctggcccagatacatctctttgttgacttcacacagatatgagaacggccgaggcagctcccaccagcaacaggtgacctgttaccccttcaaagaygtcaataactggtggattgtaaaggatcccaggaggtgagtgcaggtcctrtgactccagagcagagctcacctcctggcctggccaggcgagaccctgggatgcagtcctgggcccccttctttccctccctcactgactctagtcaccgtcatggccttgaacaccagctcagtgctgagtccaaggtcagaggaatagatcatgagaccctcagtgagcagcctgctcagtagctgctctgagaagtttccaggcgagcctcaatgccccgacctgtgtccctctcccttcctcataaaaacaagaacccccctcctgcaaaagtagcatcatcttgcacacatcccagctagaggtgccccttgctctcattcccatatccagtcctgtggattctgcccccaaacaaggtctctagctgtcccggtcactgtctcctgatggtgtcctcccattgctgcctgcccagctccagcacctgcagcccgagtgggctttttcttttttttcttcttattttttcggggkacagagtcccaccctgttgcccaggctggagtgcagtggtacgatctcggctcactgcaacctccgcttcccgggttcaagcgattctcctgcctcagcctcccgagtagataagattacaggcgcccaccaccacatcctggtaatttttgtatttttagtagagacggggtttcaccatgttggccaggctggtcttgaactcctgacatcaagtggtccacccagctcagcctcccaaagtgctgggattgcaggcgtgagccaccacgcccggccccctcatacactttcattggtggaatgcccttcagaaggattcccttggcagtcatggtacatttgtcactgtagtgtttgtagacaaattcagagcaatgcaggtgtgatgaccgcgggtagaatcacattcggaaaatgacctttgatttcagaaaagagcccaattaatgtctgtgctttggtttcctgtgttcacctcatgtgaggcacacatgggttgggaggcagtctcagccatgagaattcagagctgtgcccctccggtgcagctgttagttcgaggggaccaggctctgtgtggtcccgacagcactgtgtcttccaggcacyagctggtggtgagcagccctccgagacctgtgaggcayggggacatggtgcagctggtccacggcatgaccacccgctccctgaacacgtgagtgtgcccgccgtctgctctgctgcacctgtgggtttcctctgtggttctctgttcagaccaaaacgtgagccctgccttgggccgctgccccctgtctacccatcatctgcatgtgtagcagctcttagacctacatttgatgccgggaggggacccaggcctggccgcrgaagggagcggggttaagaggaagcaggggctctgtgaggactggacagaagcacctagcacagcccatcctaggagagctcagggccccgtggatgagtgtacaaggacaggctgggaatgttgacccgctttctatgcagagaatggagtttgggcacacctccttaaagtggtmaagcttaaagtatgagtgagtccaagaagcctggaagctcgggcacgagtggagccgtgaaggcttcttccttctcagtccttcgtccttgtccgacttgccttcccgtggtgctgggcacagttgctcacaccctcctccttcctccctgactgctctctccaccgcctccttttcctctgttgctctcagtctctgagggccctccggccttgctgcctctgcacaggcccagtcccggggctacctctcctggacttccacccggctgcccggggctcacctccagctctccacgactcccagctccacaggggcggtctctggccctggcttttctggttctccctggaaagggcccagtagctgaggcatcacctgactccttcccctcccctcccattgcatgttgattccattgggagatcctgtttctcaaccttcagaaccagccctgggtaggggtccttccttctccctctactcccacctcctggggcctgacctctctacctcgcagcagcctgtccggcctgcggaccgtgcacaacccacttgcgttgttcctctgtgctcagtgactcccgtcacccgccaaggtccctggtgaccctgacacacttcacccccgccaccctggctccccccagccctgaaacaaccacctgcgggccccttgggggcttcacacttgctccctctgcgagaatgttcttggacttggctcccccatggcccctctatgtaggggtctgctgggatgtcactgcatccaaaagtgcctcctgggtgctgtcccycaccatttgttttattagtggcactcctacaggtgcacgctctgcccaccggcatgatggctgtttcccagagggctgtgagggccttgtcttgttcacagctgggtggctgctcctagacagtgccaggtgcatggtgcggtaccacatggttactgagtgtgtggattaagaggaagtgggtgttcctgaccgggcgtgctggctcacacctgtaatcccagcactttgggaggccaaggtgggcagatcatttgaggtcaggagttggagacaagctgggccaacatggtgaaaccccgtctctactaaaaatacaaaaattagccaggcatggtggcatgtgcctgtaatcccagctagacaggaggctgaggcaggagaatcgcttgaacccaggaggcagagattgcagtgagctgagatcgcgccatttgcactccagcctgggtgacagagtgagactccatctcaaaacaaaaaagaagtgggtgttcgttaacattgaggttgatagccttttctcccagcttatctgctgcgtccccaggccagctgggcgcaggggcgggcagctcagccctgcaagttgtagcattggtactgccagctggcatcgcagcagtaccggatcgggcctgggcgcacggttccttcctctgaaacttggttcgctcgtctaacaggtggaaggttccacagcagagtgtccttttcttttggagatgttcccacagggcctcctgcctgtttagtgtccactcccatcgccgagcctcaagacctccgtcctcagtagcagcaactcatgggactgggccaccccttatggctgagccggctttgtttctgaaaagcaaccttttcctgcctgaaagatttagtaattgccttccagaggagttcaaggaattttctgaaatctcggtcttggttttccaggcatgatgttgcagcccccctgagcccccattcacaggaggtctcctgctacattgamtataacatctccatgcccgcccagaacctctggagactggtgagtaaggctgcggctatagcagccacaaccgtcagtaatgaacactccctcacacggagcacttcctcacccggagcactccctaacacagagcacttcctaacagaacacttcatcacacggagcacttcctctaacacggagcacttcctctaacacaggacacttcctcacacggaacacttcctcacacggagcacttcctgtaacaggacacttcctcacacggagcacttcctctaacayggagcacttcctgtmacacaggacacttcctcacacggagcacttcctctaacacaggacacttcctcacacggagcacttcctcacagggagcactttctctaacacaggacacttcctcacatggagcacttcctcacatggagcacttcctcacagggagcacttcctcacacggaacacttcctctaacacaggacacttcctctcacactcacacggagcacttcctctaacacaggacacttcctcacacggagcacttcctcacacggagcacttcctctaacacaggacacttcctcacacggagcacttcctcacatggagcacttcctcacagggagcacttcctcacacggaacacttcctctaacacaggacactctcacactcacacggagcacttcctctaacacaggacacttcctcacacagagcacttcctcacacggagcacttcctcacacggaacacttcctcacacggaacacttcctcacacggaacacctcctcacacggaacacttcctcacacggagcacttcctcacacggaacacctcctcacacggagcacttcctcacacggagcacttcctcwmacrgaacacytcctcacacggagcacttcctcacagggagcactccatcacacggagcacttgctcacacggagcacttcctgacatggaatgtttgaaactgccattgagaataatcatttttcctttttttcagtttacccagttgaggttggatatttagaataattctgattcagatgtaaagttacataagttttattcgtacataaagtcacagatgttttcacagggaaccgatgcgtcttccttggtggaactggggaacctggtggtttcctgcatcagaggcctgtgttcactgagattctaaatgctttgtgtttgctccatgttgggtgccaggtgcgcttgaggctctgccaggtgaaagttctcccaacctgtttagcctcaggagcaggtcctgaacacaggacacgagctccagccacccctctgccaccatgatccaggagaaattccatttctcaggatttccctggggacaggcttagccgtgagtgcgggggatgttcctgaggcgctgggtctgtggtcacctttccttccagcgaccagggccacctgctccccttacggaatcgggtctcctgggaaaggttccataaaaagtcttctgttactggaccatgttgccatctgaatctaaggacatggacactaaatgcagcccagccccatgaccacagtgaaggcactgggcttatttccatagtgaggtcacacccccccttctagcttcccactggcttcagcgctttctgcctacgcaggctcagccctgtttcgcttgacagagttagcaccacgtcctcatggccagccctcacagcaaagccaggtatctgctgatgttcttttttttttttttgcgactgggtctcactctgtcacccaggctgaagtgcagtggcgtgatcttggcttactgcagtgttggcctcccaagcttaggtgatcctcccacctctgcctcttggtattacaggttagccaccatgcctggcccctgttaattttgaatatttaatttttaaaatattttttctattccaggacagtctgatttttaaaatttttggtagagatggggtcttgctatgttgtccaggctggtcttgaactcctggactcaagccgtcctcttacctcagcctcccagagttgctgggatgacaagtgtgagccactgctccagattggctgttccatttttgtgcagagtgcgcccctctgccccactcgccgtctctgtgctctgcatatctgtgtgcgttctgcatttccatccccgcccccccacagtccttccctgacgtgagtgctgtgccccttctcacgggcacccttctctgtcctttctgatggcccctttggcaccaggagcccacatttcaggtgtctgaagttcatagaacaaggaaggagggagcatgcgtgaggtgtgcgcgcccggcctgcggcatggaccgcggccaggcctcctcatgcctgctcctgcctagcttcttgggttctctggttgtgacagtatgggaaaatgacagtcatgtgatgtcatggggtcattgtgaggctccagtatgtcaggctgtgacaaggcaaagtgcctttcagatgttagttgtcttttttattactcgatgcgaggaaatctctaagctgtgtctggcagggacagtgtctggccttcatctgagctgtctgcgagtcctgccagatagggactgagacttgctcactttttggccagggctctgagccctatgaataggctttgcagagaggcacgaagaacatcaggctttgtattttctgtgaggaggcctcttgtacggccttggcgaggaggagggtgcacttccccagcgaccctcggagcagcccggggtgctgtgggcattgggaaggaaggccagtaccagccccttatagcttccctcacttggggacttgtccctttgtctcaggctcaagtcagtatcattgtttggtgayaggtctttatttttacattgaaggaaatttgaaaaggaatgaaataatccttgagatgtctttttgcaggarattgtgaacagaggatctgacacagacgtctggaagaccatcctctcagaggtccgctttgtgcacgtgaacacttccgctgtcttaaaggtaaggacactgtccgtggcttggcctgtcctgagctgtgggctccagtctgtttcccaagcccctcaggcttcaccgcctctctgcaggcggaacgcttcatttgagtcatcatggcttcctcttacactgagggagggcggcttttgtaacttctcaggatggaatcccaatgtgaatctcccacaaggggcacctgctgacagcgtgacccgggcaggggttccccttccaacccragtggacacgggagccacggccttcccatcacgccctttactctcctgcggtgtcaccagctgagcggggctcacctccctgactgggggtatcggcaactggagatcgtcggggagaagctgtcccggggctaccacgggagcacggtgtggaacgtggaggagcaccgatayggcgcgagtgagtccgcggcgtggcttccgccgctcctggaatgtactttcagctgctcaatatttgataacaccccagagttctcattttggtgggaagggaactgagcacattctccatgctcggtggcaggtcatctccctccctgcaccctgcactcagctgctgcagtaataactcaagacgcttcttccgaggtgtcgctggaaggcaaccagtttatccccgtgcaagtggagctttctcagggtcgaaatcacctcatttgaccrgrcagtcttgggtgtggtggggaaagctaagtggartgatgcggttcgataaggggtctttgttagaaaggcaggaagccagctttttgctgcactgacagcttctgctctgagctcttgaccttgtgctacttctatctgttatgcccttgtctgttctgccaggccaggagcagagggagcgggaacgggagctgcactcacctgcgcaggtggacgtcagcaggaacctcagcttcatggcgagattctcggagctgcaggtgaggagcggccaggggaagctggcctagctcgctgagcattgactcctcagcagggaggcctgggggctgcacaggactcaaaccagagtcaggctttgacgctggagctacaggctcacaacagaatgagtgtctcctctctccagtgtaagggactgtgtgtgacacccctggcccacaccttgtggccctgtggtcaggaataatagggacccaggaggttctgcaacatcgccagggtgtcttaaggcccccaggcagcgaaatgggccacactcaacagagcccaagagaagtcacaatcagaaactcacggtcacaaatctgaacgtgaccttagagagcattcagcccaatcacttcgtctacagaggaggtaactggagcacatagggtggggcgaccctcccaaggccacattcagggctggaatccaggttctcatcatgctgcctccgatgcatgatccgaatgaacttgagctgggccagtccacgtgcaaggggcagcagtgtactcctttgaccaaatccacgcacagcgggaggcatcccccatcctcaatctcagaggcctctgctttgttccagtggaggatgctggcgctgagaagtgatgactcggaacacaagtacagctccagcccactggagtgggtcaccctggacaccaatattgcctactggctgcaccccagraccagcgtaagcgagcgatgctgacagctgacagtcatagattcatcctgtttsttgagaattccttgcattaagagcagccgctgcaccctagaaagtgctgggtttctccmaagcttttcctgacaaaggcctgtgacttggttttctctaaacgctttggcaacctggagccaggagtaggggtgtggcatgtgtgcctgttgaaggaaacccggcttgattgcttttgtggagacacattgttccccttttcctggcgaaagtggttttaagatattcccattcaattttccgtgtggcacctggtggtggagcttaccggtgctttgctgatgtgcgtgccgtctctccacccggcagagtgaaagcattggtaggccgggcacacagtcagcgccccataaatattcactgaatgggcagacgctggaaatgcccacctttttcctcctccctcagaggcgggtaggtcggctcagcatgtgcactgaaggcagaggctcaggcccagaggccgccccaccccgagctctgagcgcactttgcattctcctccgtggacagtgctgctgttacaaagtggagtcatctgctcccaattttcagtttccaattacaaaattgagagcatcagtgctgtgtgtgtgtgtgtatgtgagagagaaagagagagacggagtcttgctctgtcatccaggctggagtacagtggcgtgatcttggctcactgcaacctccacctcccaggttcaagcagttctcctgcctcagcctccaagtagctggtattacaggtgcccaccgcaatgcccagctgatttttgtactttttaatagagacggggtttcgccacgttgggcaggctggtctcaaactcctgacttcaggtgatctgcccacctcagcttcccaaagtgctgggattacaggcatgtgccaccacacccggctggcatcagtgcttttaatgaaaggtctgagtaggagcagacctgtccacagtagtagtaaggcctagtggatgctaggctgtgcctggcgttttttcactctgctaaagtagtgcgtgcatctgaattcctttcctgtgttctcttctcttccctccctgagcagagggcaggtggctaacagcatctcccatgttcccttaggctcagatccacctacttggaaacatagtgatctgggtttcgggcagcctcgctctggccatctacgccctgctgtccttgtggtacctgctccgacggcgaagaaatgtccatgacctccctcagggttagtacctctcccacatggctttctttctttttaatatagacatggggtcttgctrtgttgtccagggtgttcttgaactcctgggcttaagcgatcctcctgcctcggcctcccatagtgctaggattacaggtgtgcgctgagcattcaccgcctcaagtgacaaaccgacttcataggaacctaccccttaaggcggcctctttgtttctgtattgtggaatcttaaattatgtttgtctcccaagagacaaaatgttaagttcccatgttgcgttagaggtgtctccagtcgagtgcagcgtattgggcaggaattgcccccttggtcccatgttgcccgtatgcgctggaaatggctgggtaacacaggcagccaggccgggcgcggtggcttacacctgtaatcccagcactttgggaggccaaagtgagggagtcacctgaggccaggagttcaaaaccagcctgggcaacatagtaagaaccctctctctaaaaaagcaaaagagagagaagacccrgcctgtgggagcagcagagtyggtgtagctcgagccctttcmtatagatgcctggctgcgctgggtgctggctggggygctgtgtgccggtggctgggcagtgaactacctcccgttcttcctgatggagaagacactcttcctctaccactacctgcccgcactcaccttccaaatccttctgctccctgtggtcctgcagcacatcagcgaccacctgtgcaggtacgggggctgyggagacagtggctggaccgggcagcagccctctgctgggaagcccatgcgcagcaaacacatggggtgcagcgaacctcacccatttcacgttacactgacatcctccgggtccctccggggaatgggtgaggttcagaagagatgcccagatgaggcactgcaggaacccagagggagaagtcgcggctgacagagatgaaagcggagtgggtggggagacggggaggggatgaagagatgtgggtggcctggaggattcgggagcagggagcaaggcccaggagcctggggtgtcagaaacggcagctggttatggtcgggttgtgtggtgtggtggagagaacccaagaaagcttctaaaccagagtgtgtttggaggttggagcagagggcgagggcctcccggtttcaggaagccacacaagggaggaccgtgggtttgggaccagtcctctggcatctgtgtggaggtggcccagccactgtggaggcctgaggagtcatcagggggcccctctcagtgcatccaggtgggagatggtcatgggtggcaggagacaagacacagaaacctgaaggcagaaccccaggcctcggggggtgaccgtgtggacagcagatgtcaagagggtgccgggcagggaagccgcagtggtcagccaccctcccccacgctgctctgacctctgcaggtcccagctccagaggagcatcttcagcgccctggtggtggcctggtactcctccgcgtgccacgtgtccaacacgctgcgcccactcacctacggggacaagtcactctcgccacatgaactcaaggcccttcgctggaaagacagctgggacatcttgatccgaaaacactagaacaagagtgtggcaaagaacacccgtgctggggtcgggaygaggttgaagggtcttggtcaatgtacgtaatgagcagggtgggccccacgctgggaggacacgggctgggctgagcagggcctctagtggaacacatgggggtctcattgaaaagctctctgatgagcacctccttttgtgcaaagttaattttttctcgacaataaagatattccgtgtcttyacccctgaactaagacacagggagtatttcagaggccagcgtaggagtcatcgacaacraaaagccgagaacccagggccagcagtggagcctcagcagaccagggcctggtccttgctaattgctgcagggtggagtttgatctggcagacccgatcctccttcatgaacacccagcaacctgagcaagtcccrgccctgccctcagcgagcccggcaggcgtccygggacagctcagtgttggagggccacctgaaccacgagccagggctggggcttgcatgtcattgtctatgacagcgtcaagactggcccttggcaccgtgctgtgtggaaaccctcccctctgagactccactgagacgtggctgagtgaaatyttcctcgtcagtggtcaaggtgtgtcatccatacagctccatgcctttgtcttttttaaatgtaattaaaaaaggaaccaactggcgtttgtagttggkgtttgttatttattgattctccctccaaaggggcctaagctcgacaaaaccgttacagttgtcagaacccagccacagggctcagcccccttcccccacgtcacgtctgcatcactactgtgggtgagcctggacggacgggggctggggctgcccrtggcagcggcaagggatgctttccagagacagccaccackcaggagggaggatcaccccaggcaacccagacacgggtgttcacatgtgaggctgtgagctccacatagcacaaargaggcttgctgactttgggcggccatgtctgctgggacctgggtgatccagtgcgtgccacagccagaagcaccattccctgcatatggccactagccaccctggggtgggacagcctgtctagacagacagcaccttgggggctcccctgagggtcagtgagggcctgaccccaggcaggactgcgtggacgctgttctccagccgggacagacctggcctccgctgccttctgccctactgcatgggctcccagcctggccccgcacaagcctgggtgtgatgctgggtgcttccagggcatccgcctcgcttctctgcctttaaggcacaagcaaggggggaaaacatccctcagtggctccccatatccgtgtaggccacgctggactgcaaaccactgggtcatgaaattaggtttgtaggccacaaccagccttgtgttatgaaacagaaaacagaaaacatgaggacatgtaacatgtaaaaaaggaaagtacttgttcacaaaacttttgagttatgtgtgtgagtgtgtaagaaccagatcagactggaaaaaactctctcccactgtgggttcactgtcaacaaaacatcaggccagccagtgtctaggctgtctcctcaatttccccaataatgtgcctcacattcctcacagaagcctcccaggcttcctgcacattctgtggcatttctcagtgacctagagggatctttaaaccgcaacgagcctaagtggctgaaaacctcaggaacgcctgtcagtgtcccagcaagttgagtctgagtgacacatctgagtttccactcctgagtgaggaaggcctcgctgctaacactcccctggggtgcgccgagaggaagcagtgggtgtgggtgggcgtccccaggctcagtccctgaacacacatgccgggcgggagacctgccctgaggctcggcagcccctcagtggggtctgctgctggactccaaatgtgaccgtttgccagaggtcrgcatcccagggtggtcccctggctcagaaaaggtccgcttgtagctccgcccattggaccctcctcggtgccatttgcagatgtcaccattcagaatgtcctggatgtgctgcacgatcaggttgatggcaactgcgccaagagacagacaagcagcgggttagccgcatccatcctccgtggagaccgcccctccccgcagcactcggccaggagtgagcgcccaacctctgccctgaggcacagcctgcggcgaggggcatcgagtcaaatctcagcagacagaaacatgcatcaggacacagcaaaataagacttcttagcttggtcttccaggaatttatgttagagtctgcttaaagtactttctgctaacagatttgaatatacatatatatatgttttaagaaacaggttcttactttactgcctaggctggagtgcagtggcccaatcacagctcactgcagcctcaacctcccaggctcaagcaatcctcccacctcagcctcctgagtagctgggaccagaggcacatgccaccatgcccaaataattttattttttgtagagatggggttttgctatgttccccaggctgttgaactcctgggctccagtgatccccctgcctcagcctcccaaagtgctgggattaccagtgtgagccaccgcgcccagctacatacatttttaagcatattttaaccctgtgccgcagatcaacactggcaggccgcgtgcgcaggggagtgctcagtaactgcacactggtggaactgtccctgcctcaagctctgggaggggcggggggacagcccagcaggccagcttcttacccatattgtccactcctcgcgggatgatcacatcggcatacttctttgtctgtaaggcacaagggggggtgttcctgtgaggacttttccttcaaaggtgattttaagatgctcagaaacagatgcaacagcaggaggggcggccctggggtgctcagaggtgctggtgtcatcggcaaatgggggacacagactcagtcatcagccaggtgtgagaggccatgatccaagaagtgaggcagaaagtgcagctgaggcagccaaaagaaagtgcctcttccagtgtccccattccatcacagaagacagcccccttccagtgttcccactccattacaggagacagctggctacgctaacgactcaattcactgggccaagctaagtgtggcacttctacaaagtgtgacattgttcctctggaatcatgaagcttctgcaaataccctggcacagcaacaggacagccgccgccgtgcataattactgcaggcagagacgctgatggtaacttactccctcatccaaccactcattggctcaatgctgactctcattccctgtcagatgctctgctgctgaggaaggacaaggatggagatatatcaggaaatgcagggctgctggggagggtccgcagccagatggtgggggttggggggtggctttagggaaggggaagcagcctggagaacatggctgaatcagacaaagctgagggaagagggagggcagggtctgggccgaaggacggaacttggaacggtgcgtgctgctggcgtgtggatttgggtcaagaaggcggcagaagagacaagctgcaagaggcagacagggaccaagtcctggggacagctgtgtctgcagttggtgggaccccatctcatgaaagcacgagcgcaagggcgagggctgctttctattctagtctgatagtctgacgggctggaggagtccgggagagctgacaggggtcttaaccgccagcagggatgggcctgaatacagttgggaaatacctacggggtccaggcagaggactgcacaagccactcaacatgaaggtgaaggaaaaggaggctcaagaacggctctgggtggggctggggccgggtgcggtggctcacgccggtgatcccagcactttgggaggctgaggtgggtggactgcttgaggccaggagtttgagaccagcccagccaacatggcaaaaccccgtctgtgcaaaaaaaaaaaaaaaggaaaaattagccaggcgtggtggtgcgtgcctgtagtctctggctactcaggagcctgaggtgggaggatcacttgagagtggaaggtggaggctgcagtgaagcaagatctcaccactgcacttgggcctgggtggcagagggagaccctgtctcaaaaaacaagcaagcaaacaaaccaaccaaaaacatctctggggcctgggcccaggacatagcaggtgacagcacttcctctactcaggtcgctgaggcagatttgatatccagagttttactgcgaatcacctactttttgccaaatatctttctgtgaatgagagactaaaacaagttaactttacttttaaaattatattttagaaatttcagacagcatgaatgcaaaaaaaaacaaaagttttctttatatagcagccaataggccaggcatagtggctcacacctgtaatctcagcactttgggaagctgaggtgggaggaccactagatcccaggagatggagaccagcctgggcaacacagggagaccccatctctacaaaaaatttaaaaattaaccgagcatggtggtgcacgcctgtgggcccagctactcgggttgctgaggtggaaggatcgcttgagcttaggaggtcaagactgcagtgagctgtgattgcaccactgtactccagcctgggcaacagagcaagactctgcctcattaaaaataaaatttaaaaaaaggccaggcacagtggctcaatcccagcattttgggaggccaaagtgggtgggtcacttgagtccaggagttcgagaccagcccagccaacatggcaaaaccccatctccactaaaaatacaaaaattagctgggtgtggtggcgtacgcctgtaatcccagctactcggaagggtgagacaggagaattgcttaaacttgggaggtggagtttggagtgagccgagatcgtgccattgcactccaccctagacgacaaaaagagaccctatctcaaaaaaaaaaaaagcagcagatagaacttacttgtcctacattatcaaaggcaggaatcttggtttcagttcctttgtgctgtatttttaccttaacaggcaaaatgttcccgtgcaaaacactcccatttgagtagagccacgagtcccaccaagccagaaacacaagatggagaaatggagaaaagacaggtgggtgtgcagcggggagttcctgctctctgcgagccagctgggatctgggcacagcgctcactccaagatttcagagcactggcccagagcagcctggggtcacagaccctggaggagcagctctgaagcaccttctgagggccagatcccggccttggcagtgaacagactaaagtgctcctgggcttccccactctgcggggaataagcacccaggacgtgtcagatgatggtaagtgccccggaaaaaggaagcaggcagagaggctggcgctgggtgcagagggttttcagtgttgaatggggacgctgggcaagggcctgaggcagggaggaagcggccagtgtgaatgtgggggagatatggggcttttttaggcagagggaggagcaggcacagagaatgtttttacagctgagaactactcccagggtatgtggccgtaatgagccaaattcttctcctttttttcaatcagatcactgtcacccagcactaagccctctcacagtactgggtcccatgtgtccttgtgaaaggggaaaatgggctctgaagcagcgagcacaggtaccggcaggcagaactcctcgaaggccggcttcacgaaggtggtgtactgcgtcagaatctgctccaggtccctccctcggcgcacgtcccggagaactgcagcggcaaggggcaggcgtgcttcagacctcaggacctgccgccagcctcggccaggcaggcacggaggcccgcggccgccttacctcttcgagacagcctgacgtcggagtcggtgtccacgaagaggcgcaggtggaacatgtcccggatctcctggctgtagaacaccaagatgccctcaaacagaaccacgtccgcagggtagaccaccgtggtctctggtaacctgaggggcgcacggggaaaggggctctgctgcagacacagggtctccaggccacacacacagtcagcttccattgcagggacactgactgtgggaaggggtgggggacccacagaaaccaaccggcggaggcctgccgccaggcaggtctgtgtgagcccgaggggacgtcctagctggcccctctcctcggccctccctagaaccacctgcttaccttgagtgtgtcacaaaatcataggtcggcacctccaccgttttgccctccacgatgttcttcagagtcctgtgcatcaaatcattatcaaaggcatctgcagggttggagacaaaggcaagacaggcagatgccctcgtgcagcggacagcagggaaccctctctgctctggggtcagcacagctgggtgctggggacaccgagaaccctagcacaggtagactaggactacggcagtgtatgtttggtagcaacagtgccctctgcagccctgcagaccacaggatgaccctgtccttgctgttctcgggctgtgccactgcccaagctctgtgcccctgagatgccggaacacaggggttttctgatcagctcttcctgggaggtgggtaggctgggcctctgcttctctctctttctgggactaactggttagactgcggctttgcaggccttcttcccacaagtccttgggaaaaggctgaccatgccagccagccagggtggaatcttctagcagtggcaggtgtctccctgccacatctgcccgtttacctggcccggagcttcaagccaccagcactagtttacctaccgcctcccacactggcctctctgaggactttgccccaaagcacgggagggcacagtgggcagaggtgtgtgtggagggccctaaaggccccaacgtgggaagggaagatgggaggatttctccaggatcacagttgtggcagggcagggcagggctccccacagtgcaacaggcttcctgactggctccaaccacgctcctggggggacactcagggcccagagaactcagcaaagttcccctgacttcactgtgcagccaactccactgcaggctgcgtggcgagttgggggaacagcccaagcgggtctgcatccatccaaccttgggcccaagcgcagctggttagcggccgcccagaatggggtctgccctccccacatcgttgggctcgcgatttacctggatggtcaaaattgtactgtcctttcaaggccttggccttctgctctgccgtcaggaccttgtagaacctgtcctggctcaggatgaccaccttccgctgccgctgttccacctcgttctgtcccagcaactccatgatcttctcacacacggtcgactggagacacagaagcgggattcccgcctggaaccgctcgtcctgtgacaggcacggggccggcttctggagacactgacccacccgccccctgggggttatgctcggaaggcgggaggacaccaacaggtgtggatggtctcagcggaagggccgcgggggcccaacggggttagcacggacttggggctccgaggagcccggccggcggagaggctgtgggggagccccgaggcccagcgccccaacccctcgcccgccccagcccgccccggcccatcgcggcctgcagccccttcgctcccgcgccctgcccctgcctggcagggggcccctcggccggggctggggtctcctctctggaccgggccgcccgtaggcaccggcgagaggcgagaccccggcccgctcggccccttaccttcccgctggcagtgccgccgctcacccctatcaggaagggccgctggtgcggacggtcggcct

SEQ ID NO: 6866 - DNA, 19472 bp, Homo sapiens
  misc_feature (1)...(19472): n = A,T,C or G, or insertion/deletion polymorphism (see Tables 1-2)
ctgtcaggtcttcaaacactttaatagactatatatgtgtgtgtatatatatattttgttgttgttgttttgttttgttttgtttttgttgttgtttttttgagatggagtttcactcttgttgcccaggctggagtgcagtggtgtgatctcggctcactgcaatctccacgtcctgggttcaagcgattctctagcctaaacccccgagtagctgggattacaggcatgtgccatgacactcagctaatttttggtgtttcagaagagacgaggtttcaccatgttggccaggctggtctcaaactgctgacctcaagtggtccacccacctcagcctcccaaactgctgggattacaggcatgagccaccatgcctgaccaacagacttatttttaagtccttttcaaatggaatcatttgtatcttctcagatgtgatttcatcactagtcgacacctgttgactgttctacaagggggcagatttccccctctttgtaatttttgtctgtgagttcatcttcagcaggcattgtcttctaaaagcatcctgcacgtgccatgttggtgccctggaatatcagagtttcgcatttgtctctgtgaggggttcctatgtgtgcaccagttgtggctggcctatttttcttttcttaagacagagtctctgtcacccaggttggagtgcagtgatgccatcatagctcactgcagccttgaactcctgggcttgagcaaccctcccacctcagcctccctagtaactgggactataagtatgtgccaccaccaccacacctagctggttttttgtttgtttgtttgttttttgttttgttttgttttgctggccaggcacggtagctcacacctgtaatcccaccactttgggaggccgaggtgggcagatcacctgaggtcaggagtttgagaccaacctggccaacatgtcaaaaccctgtctctactaaaaatacaaaacttagccgggcatggtagagcatgcctgtaatcccagctacttgggagtctgaggcaggagaatcgcttgaacccgggaggcggaggttgcagtgagctgagattgcaccactgcactccagcctcggtgacacagtgacactccatctcaaaaaaaagaaagacagggtctcactatgttgcccaggctggtcttgaactcttggcctcaagcaatcctcccacctcagcctcccaaaatgctgggattacaggtgtgcgccaccatgcctggtctgaaccatttttatgtcagtttgttagcttggagtttctgtcccatgtgggtggcccaggtgtagcgcaggcccccgactccacattcttagatatgactccgtttacccagagttcgagtgctgcactggtttctctagtttcacaaaagggcaactcatcttgggctccagctgtctgcagagggccagttccagaacctcctgctgtgtgtgaagctgcggctttgactcccacccctaagacatacctggtcctggaccctttataggcaactcagcttcaaaccactggctatgggaccttcttcattccaagagcctggctgtcatgtttccccgtcttgtctttgagcagggagatggtgcagttctgtgtgtgtgtcgagtgtgtatatgtgaatatgtgcgttggcttcctacacctgctgtctcagccaacttgacggaggtctcttgcagctgcaagccttgggcaagccacataatcactctgtttctcaatttacccatcaggaaaatggtatcacaatggtacccatatcgcagggtggctgtgaggctttaatgctatttaagatatgcaactggccgggcacggtggctcaggcctgtaatcctagcactctgggaagccgaggcaggaggatcacctgagggtcaggagtttgagaccagcctggccaacatggtgaaaccccatctctactaaaaatacaatattagccgggcgtggtggcaggcgcctgtaatcccagctattcaggaggctgaggcaggcgaatcacttgaacctgggaggtggaggttgcagtgagccaatatcgcgccactgcacttcagcctgggagacaaagtgagattccgtctcgaaaaacaaacaaacaaaaaaaaaacccacaccaccaaaccttgtttagcctctcgttccgttatctagaacagccatgtcagaccagaagggcacaccccagaactcaaaaccatgcttttccctgggtgaggagtaaggggtggttctagttttggttgtgtgtttgtgtgtatacattttctgcaatcagcaggagtcacttttatgattacagggaaaagggcaatcaatacttaaaacagcaggcacctgcttatctctttaagcgctgagagccagctagtgttcaataaaagcttcaggacatgcttggcatgagctgacatttttgtagtggttagggtggcttgaaggaggagggaggagggcagccatggagagcggtgtttcctgtactgcatgtgtttgagggggcagggggagcagttttagattcacagaaaaattgagcagaaggtgcagagatttcctatatactccccactcccccacatgcacagcctccccgattttcaacatcccgcaccagagagcaggtaagagaatgaatccagagtagacagtggtcactcttaggagtactgccttgcctggctctgggaaacccaaactccgagggctccaagcctccacccaactctccacctacccccaccccccaattcagcaacaacgtttttttgtttttttttttttttttggagacagggtctcgctctgttacccaggctgtagcgcagcggcgcgatttctcttcaatgcaacctctgcctcccaagctcaagcaatcctcccatctcagcctccccagtagctgggaccacaggcctatgccaccacactcagctagtttttatttttttctttttttgcagacagaaaaaaaagtgcagtggcacgatctcagctcattgcaacctctgcctcctgggttcaagttctcctgcctcagcctcctgagtagctgtgattacaggcgcatgccaacatgctcggcttatttatttacttatttatttatttatttttgcccaggctgcagtgcagtggcgtgatctcggctcactgcaatctccgcctcccaggttcaagcgattctcctgcctcagcctcccgagtagctgggattacaggcgcccgccactgtgctcagctaattttttgtatttttagtagagacggggtttcactatgttggccaggctagtcttgaactcctgacctcgtgagtcgcctgcctcagcctcccagagtgccgggattacaggcgtgagccaccgtgcccggccaatttttgtatttttagtagagatggagtttcaccatgttggccaggctggtctcgaactcctgacctcaagtgatccgcctgcctcggcctcccagagtgctgggattacaggcgtgaaccactgcacccggctgactcatgcttctttaaggacactcttcggctgggcacagaggctcacacctgtaatcccagcactttgggaggctgaggcaggtgaataggagttcgagaccagcctgggcaacatggcaaaaccctgtctctatactaaaaatacaaaaattagtcgggcctggtggcaggtgcctgtagtcccagctactcggggaggctgaggcaggataattgcttgaactcgggaggcggaggttgcggtaagccaagattatgccactgcactccagcctgggcaacagagcaagattccgtctcaaaacgaacaaaaaaaacccataaaagtcactcttcttcacaatatggggagttggggaccagctagaggtttggggctggccctctgcttggtggtggttgggatggtcccataggggagccactgtggcccagaggcctgagccgtgtgggcccgggccttgtttactggactgtgggcttcctgggtgctgggcctgctcccagggagtggctccttcccaaagcgtccctttgccttgggagcggaaccacgcaatagcctgactggccctggcagcccatgccttgtggccagtcaccagagagggcacacgagacccaggccaggggtatcagggacagcccctggtcagactctgctagtttccctgcctttcgctacgtggctggaccacaggggaagaaatggcaagaaaccgtgtctaactctcccttgatacaaattcaaagctggcttgggggatggccacctttgggacacacacctggacagatctaagccagcagcgtggctgtttgctaggcactgttctgtgcctggggcttaatttacagaggtacggctgaatgaccatgaggagaggccaaagccatcgcaagattgatcgcatttcctgagagaaggggcacccatgccatgcacggttctcagtagagaaccccaggtttggtcaggaggcagaagcaggggcgaggggagagcccaggcctgaggctttcttggggtttccatggaaaaggcctggcagggcagggaaagagtttaaaattggctagtttgagtaattctagcaggctctgggctgcagagtggtctctagtcacctgatacctggccctgggtgacttagggcagggagaatcttgcctccaaaggcgagaattagataaggaggtagctggggctgtagacttggggtctttttttttttttgagacagagtctcactctttcccccaggccggagtgcagtagcgtgatcttggctcactgcaagctccacctcccgggttcacaccattctcctgcctcagcctcccgagtagctgggaccacaggcgcccgccaccatgcccggctaattttttgtatttttagtagagacggggtttcaccatgttagccaggatggtctcgatctcctgacctcgtgatccacccgcctcggcctcccaaagtgctgggattacaggtgtgagccaccgcgtccgcccggggttgtctgttttgtatatgaaaagcatgctctgccccgagccttagctatctctctctcttttttatttttgagacggagtcttgctctgtggcccaggctggagtgcagtggcaccatctcggctcactgcaacctccacctcccgggttcaagcgattctcctgcctcagcctcccaagtagctgggattacaggcgcccgccaccacgcccagctgatttgttgcatttttagtagaggcggggtttcaccgtgttcgccaggatggtctcgatttcctgacctcgtgatctacccgcctcagcctccaaaagtgttgggattacaggcgtgagccaccgcgcccggctggaaatccataatttcaatggatcagaatttgcctgtcacgttctctgtgccaggcacggagcgggggggcggcagggatggaacccggcacatgggcctctgcctccttggcgcgctgtaggcgcgagcctaaagtcatcaggcracagcccccgccacgttccggggcgccccgacggctccagcagcgggtggggtgggaggcgtccggacagtccggaggcctcgatggccaagaggagcctgggctggagggggccaggcccgggggcggccgggggagggcccgggactggcgcagaggcagcgcgaggcagaggcaagcactcggacgaaggcgcagccccagcctcggggtgcggaacgggcaccttccgggccacttgagtctgagaccttgtagccggctcgaggcccgggcgcagcagtccctgccagccagctttcggcgcaatgggacgcgggcgctcctggtgtgccggcctcgggccctgcaccctcacgcatgcgcgccccccccggtggactacaactcccggcgtgccccgcgcgcctcccggaagtgatcgctccagtcgcctccgacctcggcgctgggcgggcgcgccgggcctggggaaggggcgggcgcggggacccgatgcgcgggagcggaggccgagatggcttcggcgggaggcgaagactgcgagagccccgcgccggaggccgaccgtccgcaccagcggcccttcctgataggggtgagcggcggcactgccagcgggaaggtaaggggccgagcgggccggggtctcgcctctcgccggtgcctacgggcggcccggtccagagaggagaccccagccccggccgaggggccccctgccaggcaggggcagggcgcgggagcgaaggggctgcaggccgcgatgggccggggcgggctggggcgggcgaggggttggggcgctgggcctcggggctcccccacagcctctccgccggccgggctcctcggagccccaagtccgtgctaaccccgttgggcccccgcggcccttccgctgagaccatccacacctgttggtgtcctcccgccttccgagcatancccccagggggcgggtgggtcagtgtctccagaagccggccccgtgcctgtcacaggacsagcggttccaggcgggaatcccgcttctgtgtctccagtcgaccgtgtgtgagaagatcatggagttgctgggacagaacgaggtggaacagcggcagcggaaggtggtcatcctgagccaggacaggttctacaaggtcctgacggcagagcagaaggccaaggccttgaaaggacagtacaattttgaccatccaggtaaatcgcgagcccaacgatgtggggagggcagaccccattctgggcggccgctaaccagctgcgcttgggcccaaggttggatggatgcagacccgcttgggctgttcccccaactcgccacgcagcctgcagtggagttggctgcacagtgaagtcaggggaactttgctgagttctctgggccctgagtgtccccccaggagcgtggttggagccagtcaggaagcctgttgcactgtggggagccctgccctgccctgccacaactgtgrtcctggagaaatcctcccatcttcccttcccacgttggggcctttagggccctccacacacacctctgcccactgtgccctcccgtgctttggggcaaagtcctcagagaggccagtgtgggaggcggtaggtaaactagtgctggtggcttgaagctccgggccaggtaaacgggcagatgyggcagggagacacctgccactgctagaagattccaccctggctggctggcatggtcagccttttcccaaggacttgtgggaagaaggcctgcaaagccgcagtctaaccagttagtcccagaaagagagagaagcagaggcccagcctacccacctcccaggaagagctgatcagaaaacccctgtgttccggcatctcaggggcacagagcttgggcagtggcacagcccgagaacagcaaggacagggtcatcctgtggtctgcagggctgcagagggcactgttgctaccaaacatacactgccgtagtcctagtctacctgtgctagggttctcggtgtccccagcacccagctgtgctgaccccagagcagagagggttccctgctgtccgctgcacgagggcatctgcctgtcttgcctttgtctccaaccctgcagatgcctttgataatgatttgatgcacaggactctgaagaacatcgtggagggcaaaacggtggaggtgccgacctatgattttgtgacacactcaaggtaagcaggtggttctagggagggccgaggagaggggccagctaggacgtcccctcgggctcacacagacctgcctggcggcaggcctccsccggttggtttctgtgggtcccccaccccttcccacagtcagtgtccctgcaatggaagctgactgtgtgtgtggcctggagaccctgtgtctgcagcagagcccctttccccgtgcgcccctcaggttaccagagaccacggtggtctaccctgcggacgtggttctgtttgagggcatcttggtgttctacagccaggagatccgggacatgttccacctgcgcctcttcgtggacaccgactccgacgtcaggctgtctcgaagaggtaaggcggcygcgggcctccgtgcstgcctggccgaggctggcggcaggtcctgaggtctgaagcacgcctgccccttgccgctgcagttctccgggacgtgcgccgagggagggacctggagcagattctgacgcagtacaccaccttcgtgaagccggccttcgaggagttctgyctgccggtacctgtgctcgctgcttcagagcccattttcccctttcacaaggacacatgggacccagtactgtgagagggcttagtgctgggtgacagtgatctgattgaaaaaaaggagaagaatttggctcattayggccacataccctgggagtagttctcagctgtaaaaacattctctgtgcctgctcctccctctgcctaaaaaagccccatatctcccccacattcacactggccgcttcctccctgcctcaggcccttgcccagcgtccccattcaacactgaaaaccctctgcacccagcgccagcctctctgcctgcttcctttttccggggcacttaccatcatctgacacgtcctgggtgcttattccccgcagagtggggaagcccaggagcactttagtctgttcactgccaaggccgggatctggccctcagaaggtgcttcagagctgctcctccagggtctgtgaccccaggctgctctgggccagtgctctgaaatcttggagtgagcgctgtgcccagatcccagctggctcgcagagagcaggaactccccgctgcacacccacctgtcttttctccatttctccatcttgtgtttctggcttggtgggactcgtggctctactcaaatgggagtgttttgcacgggaacattttgcctgttaaggtaaaaatacagcacaaaggaactgaaaccaagattcctgcctttgataatgtaggacaagtaagttctatctgctgctttttttttttttgagatagggtctctttttgtcgtctagggtggagtgcaatggcacgatctcggctcactccaaactccacctcccaagtttaagcaattctcctgtctcacccttccragtagctgggattacaggcgtacgccaccacacccagctaatttttgtatttttagtggagatggggttttgccatgttggctgggctggtctcgaactcctggactcaagtgacccacccactttggcctcccaaaatgctgggattgagccactgtgcctggcctttttttaaattttatttttaatgaggcagagtcttgctctgttgcccaggctggagtacagtggtgcaatcacagctcactgcagtcttgacctcctaagctcaagcgatccttccacctcagcaacccgagtagctgggcccacaggcgtgcaccaccatgctcggttaatttttaaattttttgtagagatggggtctccctgtgttgcccaggctggtctccatctcctgggatctagtggtcctcccacctcagcttcccaragtgctgagattacaggtgtgagccactatgcctggcctattggctgctatataaagaaaacttttgtttttttttgcattcatgctgtctgaaatttctaaaatataattttaaaagtaaagttaacttgttttagtctctcattcacagaaagatatttggcaaaaagtaggtgattcgcagtaaaactctggatatcaaatctgcctcagcgacctgagtagaggaagtgctgtcacctgctatgtcctgggcccaggccccagagatgtttttggttggtttgtttgcttgcttgttttttgagacagggtctccctctgccacccaggcccaagtgcagtggtgagatcttgcttcactgcagcctccaccttccactctcaagtgatcctcccacctcaggctcctgagtagccagagactacaggcacgcaccaccacgcctggctaatttttcctttttttttttttttgcacagacggggttttgccatgttggctgggctggtctcaaactcctggcctcaagcagtccacccacctcagcctcccaaagtgctgggatcaccggcgtgagccaccgcacccggccccagccccacccagagccgttcttgagcctccttttccttcaccttcatgttgagtggcttgtgcagtcctctgcctggaccccgtaggtatttcccaactgtattcaggcccatccctgctggcggttaagacccctgtcagctctcccggactcctccagcccgtcagactatcagactagaatagaaagcagccctcgcccttgcgctcrtgctttcatgagatggggtcccaccaactgcagacacagctgtccccaggacttggtccctgtctgcctcttgcagcttgtctcttctgccgccttcttgacccaaatccacacgccagcagcacgcaccgttccaagttccgtccttcggcccagaccctgccctccctcttccctcagctttgtctgattcagccatgttctccaggctgcttccccttccctaaagccaccccccaacccccaccatctggctgcggaccctccccagcagccctgcatttcctgatatatctccatccttgtccttcctcagcagcagagcatctgacagggaatgagagtcagcattgagccaatgagtggttggatgagggagtaagttaccatcagcgtctctgcctgcagtaattatgcacggcggcggctgtcctgttgctgtgccagggtatttgcagaagcttcatgattccagaggaacaatgtcacactttgtagaagtgccacacttagcttggcccagtgaattgagtcrttagcgtagccagctgtctcctgtaatggagtgggaacactggaagggggctgtcttctgtgatggaatggggacactggaagaggcactttcttttggyygcctcagctgcactttctgcctcacttcttggatcatggcctctcacacctggctgatgactgagtctgtgtcccccatttgccgatgacaccagcacctctgagcaccccagggccgcccctcctgctgttgcatctgtttctgagcatcttaaaatcacctttgaaggaaaagtcctcacaggaacacccccccttgtgccttacagacaaagaagtatgccgatgtgatcatcccrcgaggagtggacaatatgggtaagaagctggcctgctgggctgtccccccgcccctcccagagcttgaggcagggacagttccaccagtgtgcagttactgagcactcccctgcgcacgcggcctgccagtgttgatctgcggcacagggttaaaatatgcttaaaaatgtatgtagctgggcgcggtggctcacactggtaatcccagcactttgggaggctgaggcagggggatcactggagcccaggagttcaacagcctggggaacatagcaaaaccccatctctacaaaaaataaaattatttgggcatggtggcatgtgcctctggtcccagctactcaggaggctgaggtgggaggattgcttgagcctgggaggttgaggctgcagtgagctgtgattgggccactgcactccagcctaggcagtaaagtaagaacctgtttcttaaaacatatatatatgtatattcaaatctgttagcagaaagtactttaagcagactctaacataaattcctggaagaccaagctaagaagtcttattttgctgtgtcctgatgcatgtttctgtctgctgagatttgactcgatgcccctcgccgcaggctgtgcctcagggcagaggttgggcgctcactcctggccgagtgctgcggggaggggcggtctccacggaggatggatgcggctaacccgctgcttgtctgtctcttggcgcagttgccatcaacctgatcgtgcagcacatccaggacattctgaatggtgacatctgcaaatggcaccgaggagggtccaatgggcggagctacaagcggaccttttctgagccaggggaccaccctgggatgcygacctctggcaaacggtcacatttggagtccagcagcagaccccactgaggggctgccgagcctcagggcaggtctcccgcccggcatgtgtgttcagggactgagcctggggacgcccacccacacccactgcttcctctcggcgcaccccaggggagtgttagcagcgaggccttcctcactcaggagtggaaactcagatgtgtcactcagactcaacttgctgggacactgacaggcgttcctgaggttttcagccacttaggctcgttgcggtttaaagatccctctaggtcactgagaaatgccacagaatgtgcaggaagcctgggaggcttctgtgaggaatgtgaggcacattattggggaaattgaggagacagcctagacactggctggcctgatgttttgttgacagtgaacccacagtgggagagagttttttccagtctgatctggttcttacacactcacacacataactcaaaagttttgtgaacaagtactttccttttttacatgttacatgtcctcatgttttctgttttctgtttcataacacaaggctggttgtggcctacaaacctaatttcatgacccagtggtttgcagtccagcgtggcctacacggatatggggagccactgagggatgttttccccccttgcttgtgccttaaaggcagagaagcgaggcggatgccctggaagcacccagcatcacacccaggcttgtgcggggccaggctgggagcccatgcagtagggcagaaggcagcggaggccaggtctgtcccggctggagaacagcgtccacgcagtcctgcctggggtcaggccctcactgaccctcaggggagcccccaaggtgctgtctgtctagacaggctgtcccaccccagggtggctagtggccatatgcagggaatggtgcttctggctgtggcacgcactggatcacccaggtcccagcagacatggccgcccaaagtcagcaagcctcytttgtgctatgtggagctcacagcctcacatgtgaacacccgtgtctgggttgcctggggtgatcctccctcctgmgtggtggctgtctctggaaagcatcccttgccgctgccaygggcagccccagcccccgtccgtccaggctcacccacagtagtgatgcagacgtgacgtgggggaagggggctgagccctgtggctgggttctgacaactgtaacggttttgtcgagcttaggcccctttggagggagaatcaataaataacaaacmccaactacaaacgccagttggttccttttttaattacatttaaaaaagacaaaggcatggagctgtatggatgacacaccttgaccactgacgaggaagatttcactcagccacgtctcagtggagtctcagaggggagggtttccacacagcacggtgccaagggccagtcttgacgctgtcatagacaatgacatgcaagccccagccctggctcgtggttcaggtggccctccaacactgagctgtcccgggacgcctgccgggctcgctgagggcagggccgggacttgctcaggttgctgggtgttcatgaaggaggatcgggtctgccagatcaaactccaccctgcagcaattagcaaggaccaggccctggtctgctgaggctccactgctggccctgggttctcggcttttcgttgtcgatgactcctacgctggcctctgaaatactccctgtgtcttagttcaggggtgaagacacggaatatctttattgtcgagaaaaaattaactttgcacaaaaggaggtgctcatcagagagcttttcaatgagacccccatgtgttccactagaggccctgctcagcccagcccgtgtcctcccagcgtggggcccaccctgctcattacgtacattgaccaagacccttcaacctcgtcccgaccccagcacgggtgttctttgccacactcttgttctagtgttttcggatcaagatgtcccagctgtctttccagcgaagggccttgagttcatgtggcgagagtgacttgtccccgtaggtgagtgggcgcagcgtgttggacacgtggcacgcggaggagtaccaggccaccaccagggcgctgaagatgctcctctggagctgggacctgcagaggtcagagcagcgtgggggagggtggctgaccactgcggcttccctgcccggcaccctcttgacatctgctgtccacacggtcaccccccgaggcctggggttctgccttcaggtttctgtgtcttgtctcctgccacccatgaccatctcccacctggatgcactgagaggggccccctgatgactcctcaggcctccacagtggctgggccacctccacacagatgccagaggactggtcccaaacccacggtcctcccttgtgtggcttcctgaaaccgggaggccctcgccctctgctccaacctccaaacacactctggtttagaagctttcttgggttctctccaccacaccacacaacccgaccataaccagctgccgtttctgacaccccaggctcctgggccttgctccctgctcccgaatcctccaggccacccacatctcttcatcccctccccgtctccccacccactccgctttcatctctgtcagccgcgacttctccctctgggttcctgcagtgcctcatctgggcatctcttctgaacctcacccattccccggagggacccggaggatgtcagtgtaacgtgaaatgggtgaggttcgctgcaccccatgtgtttgctgcgcatgggcttcccagcagagggctgctgcccggtccagccactgtctccacagcccccgtacctgcacaggtggtcgctgatgtgctgcaggaccacagggagcagaaggatttggaaggtgagtgcgggcaggtagtggtagaggaagagtgtcttctccatcaggaagaacgggaggtagttcactgcccagccaccggcacacagcrccccagccagcacccagcgcagccaggcatctataggaaagggctcgagctacaccgactctgctgctcccacaggccgggtcttctctctcttttgcttttttagagagagggttcttactatgttgcccaggctggttttgaactcctggcctcaggtgactccctcactttggcctcccaaagtgctgggattacaggtgtaagccaccgcgcccggcctggctgcctgtgttacccagccatttccagcgcatacgggcaacatgggaccaagggggcaattcctgcccaatacgctgcactcgactggagacacctctaacgcaacatgggaacttaacattttgtctcttgggagacaaacataatttaagattccacaatacagaaacaaagaggccgccttaaggggtaggttcctatgaagtcggtttgtcacttgaggcggtgaatgctcagcgcacacctgtaatcctagcactatgggaggccgaggcaggaggatcgcttaagcccaggagttcaagaacaccctggacaacacagcaagaccccatgtctatattaaaaagaaagaaagccatgtgggagaggtactaaccctgagggaggtcatggacatttcttcgccgtcggagcaggtaccacaaggacagcagggcgtagatggccagagcgaggctgcccgaaacccagatcactatgtttccaagtaggtggatctgagcctaagggaacatgggagatgctgttagccacctgccctctgctcagggagggaagagaagagaacacaggaaaggaattcagatgcacgcactactttagcagagtgaaaaaacgccaggcacagcctagcatccactaggccttactactactgtggacaggtctgctcctactcagacctttcattaaaagcactgatgccagccgggtgtggtggcacatgcctgtaatcccagcactttgggaagctgaggtgggcagatcacctgaagtcaggagtttgagaccagcctgcccaacgtggcgaaaccccgtctctattaaaaagtacaaaaatcagctgggcattgcggtgggcacctgtaataccagctacttggaggctgaggcaggagaactgcttgaacctgggaggtggaggttgcagtgagccaagatcacgccactgtactccagcctggatgacagagcaagactccgtctctctctttctctctcacatacacacacacacacagcactgatgctctcaattttgtaattggaaactgaaaattgggagcagatgactccactttgtaacagcagcactgtccacggaggagaatgcaaagtgcgctcagagctcggggtggggcggcctctgggcctgagcctctgccttcagtgcacatgctgagccgacctacccgcctctgagggaggaggaaaaaggtgggcatttccagcgtctgcccattcagtgaatatttatggggcgctgactgtgtgcccggcctaccaatgctttcactctgccgggtggagagacggcacgcacatcagcaaagcaccggtaagctccaccaccaggtgccacacggaaaattgaatgggaatatcttaaaaccactttcgccaggaaaaggggaacaatgtgtctccacaaaagcaatcaagccgggtttccttcaacaggcacacatgccacacccctactcctggctccaggttgccaaagcgtttagagaaaaccaagtcacaggcctttgtcaggaaaagctttggagaaacccagcactttctagggtgcagcggctgctcttaatgcaaggaattctcaacaaacaggatgaatctatgactgtcagctgtcagcatcgctcgcttacgctggtyctggggtgcagccagtaggcaatattggtgtccagggtgacccactccagtgggctggagctgtacttgtgttccgagtcatcacttctcagcgccagcatcctccactggaacaaagcagaggcctctgagattgaggatgggggatgcctcccgctgtgcgtggatttggtcaaaggagtacactgctgccccttgcacgtggactggcccagctcaagttcattcggatcatgcatcggaggcagcatgatgagaacctggattccagccctgaatgtggccttgggagggtcgccccaccctatgtgctccagttacctcctctgtagacgaagtgattgggctgaatgctctctaaggtcacgttcagatttgtgaccgtgagtttctgattgtgacttctcttgggctctgttgagtgtggcccatttcgctgcctgggggccttaagacaccctggcgatgttgcagaacctcctgggtccctattattcctgaccacagggccacaaggtgtgggccaggggtgtcacacacagtcccttacactggagagaggagacactcattctgttgtgagcctgtagctccagcgtcaaagcctgactctggtttgagtcctgtgcagcccccaggcctccctgctgaggagtcaatgctcagcgagctaggccagcttcccctggccgctcctcacctgcagctccgagaatctcgccatgaagctgaggttcctgctgacgtccacctgcgcaggtgagtgcagctcccgttcccgctccctctgctcctggcctggcagaacagacaagggcataacagatagaagtagcacaaggtcaagagctcagagcagaagctgtcagtgcagcaaaaagctggcttcctgcctttctaacaaagaccccttatcgaaccgcatcactccacttagctttccccaccacacccaagactgcccggtcaaatgaggtgatttcgaccctgagaaagctccacttgcacggggataaactggttgccttccagcgacacctcggaagaagcgtcttgagttattactgcagcagctgagtgcagggtgcagggagggagatgacctgccaccgagcatggagaatgtgctcagttcccttcccaccaaaatgagaactctggggtgttatcaaatattgagcagctgaaagtacattccaggagcggcggaagccacgccgcggactcactcgcgccrtatcggtgctcctccacgttccacaccgtgctcccgtggtagccccgggacagcttctccccgacgatctccagttgccgatacccccagtcagggaggtgagccccgctcagctggtgacaccgcaggagagtaaagggcgtgatgggaaggccgtggctcccgtgtccactcgggttggaaggggaacccctgcccgggtcacgctgtcagcaggtgccccttgtgggagattcacattgggattccatcctgagaagttacaaaagccgccctccctcagtgtaagaggaagccatgatgactcaaatgaagcgttccgcctgcagagaggcggtgaagcctgaggggcttgggaaacagactggagcccacagctcaggacaggccaagccacggacagtgtccttacctttaagacagcggaagtgttcacgtgcacaaagcggacctctgagaggatggtcttccagacgtctgtgtcagatcctctgttcacaatytcctgcaaaaagacatctcaaggattatttcattccttttcaaatttccttcaatgtaaaaataaagacctgtcaccaaacaatgatactgacttgagcctgagacaaagggacaagtccccaagtgagggaagctataaggggctggtactggccttccttcccaatgcccacagcaccccgggctgctccgagggtcgctggggaagtgcaccctcctcctcgccaaggccgtacaagaggcctcctcacagaaaatacaaagcctgatgttcttcgtgcctctctgcaaagcctattcatagggctcagagccctggccaaaaagtgagcaagtctcagtccctatctggcaggactcgcagacagctcagatgaaggccagacactgtccctgccagacacagcttagagatttcctcgcatcgagtaataaaaaagacaactaacatctgaaaggcactttgccttgtcacagcctgacatactggagcctcacaatgaccccatgacatcacatgactgtcattttcccatactgtcacaaccagagaacccaagaagctaggcaggagcaggcatgaggaggcctggccgcggtccatgccgcaggccgggcgcgcacacctcacgcatgctccctccttcct

SEQ ID NO: 6867 - DNA, 116327 bp, Homo sapiens
  misc_feature (1)...(116327): n = A,T,C or G, or insertion/deletion polymorphism (see Tables 1-2)
agttttctcaggttttttttaaaatttttttatttagaaatttttttagagactaagtcttgctcttttgcccaggatggagtgcagtggtaaaatcatagctcactgtagcttcaagctcctgggctcaagcaattctcctgagtcagcatcttgaatagctgggattacaggtgagaaccagtgcactcggccagctgataattttaactccttgctaaatgttgcaaagccatatgactgtgaatacattgctaggatctttgaagagtctccaggcaagtgaggggccctaaatcataagctccatcagcttcatggatctcagtattattatttctgagcctgccagtgggggccagtgtaggaccaccaatgacccagaacatggactgtggctatgacgggaacaaattaattgctccaaagtgaaaagtatttttttaaggaatactttctaccacctgggtcttactggatttttttgcttgcaggattcctagagctctaacctgggaaacacagcaaaacctcatctctacaaaaaataaaaaagttagccaggcatggtggtgcgtgcatatgatcccaggtactcaggaggctgaggcaggaggattgcttgagccctgcccagaaagtagaggttgcagtgggctgtgattacatcactgcactctagcctgggtgacagagagagaccctgtctcagaattaaaaaaaaaaaaaaaaagctgggtgtggtggttcctgcctgtaatcccagcactttaggaggacgaggcaggaagattacttgagtccaggagtttgagaccagcctgggcaacacagtgagatcttgtctgtataaaaaataaaaaaattagccaggcacagtgaagggacttcgcatgtgtgaagttccaggtactctggaggctgaagtgggaggatggcttgagccagggaggttgaggctgcagtaagcagtgatggtgtcactgagctttagcctgggtgaaagagcgagatcctgtctcaaaaagtaaataaacgatgaaaactattttagagttttttaatggtaaaattatgatttctattcatgttattgctgtatttacttactgcctagtttataatttgcttgactcttccagatgtggccctaatctttccacagtcaagcgtgtactactatttcacagcattttcctttccaaactgtgtgccaaataaatcggggtctccaaccccagagccgtgaactggtacccgtctgtggcttgttaggaatggagcagcacaggatgaagtgagtggtgggtaagtgagcattaccacctgagctctgcctcctgtcagatcagcaatggcattagattatcataggagtgcgaaccctattgtgaactgcgtatgcaaggggtctaggttgtccactccttatgggaatctaatgcctaattatctgaggtgtaacaatttcatcccgaaaccatccccccgacctcctccaccccctaccaccatttcctggaaaaactgtcttccacaaaaccagtccctggtgccaaaaaggttagggactgctgaaataaaatcatgtcataggtgaagtccttgtttcttcccttttgtcttcctctttctctgtaatctttatttcttatggcctgtttttctttctggtatggtttggtctcacttaactctcatatttctttcttaagtgtagatgtattgtaacttaaacaatgttactttttggtcttgatggatggctcacacctgtaattccagcactttgggaggctgaggtgggcagatcacctgaggttgggagttcgagaccagcctgaccaacatggagaaaccccgtctctactaaaaatacaaaatttgctggcgcagtagctcacacctgtaatcccagcactttgggaggccgaggcgggcagatcacgaggtcaggagttcaagaccagcctggccaacatagtgaaaccctgtctgaactaaaaatacaaaaattagccagggatggtggcgtgcgcttgtagtctcagctactctggaggttgaggcaggagaatcacttgaacctgggaggcggaggttatggtgagctgatatcgcgccatggcactccagcctgggcaacaagagcgaaactccataaaaaaaaaaaaaaaaattagccgggcatggtggcccgaactgtaatcccagctgttcgggaggctgaggcatgagaattgcttgaacctgggaggcggaggttgtggtaagccgagatcgtgccattgtactccagcctgggcaataagagcgaaactctgtctcaaaaaagaaaaagaaaaagaaaaattagccaggcatggtggcgtgcacctgtaatcccagctgaggattaggcatgagaactgcttgatcccaggaggtggaggttgcagtgagttgagatcattccactgcactccagcctgggcaacagagtgagactccatctcaaacaaaacaaaacaaaacaaaacaaaaaacaaacaggcgagcccagcacagcggtgcaagcctgtggtcccaggtactcaggaagctgaggcatgaggatcccttgagccctcaygatagcacctgtgaatagttactgcattctagcctgggcaacatagcaagacctatttctaaaacaaaaatgtagacaaattattacattctaggcagtacgcccagtggtgaataagatggagtctgcgccctcagggactatgtgttggtttaaattttcacctcaagttaacatttgtgattcaatataagtgatgaagtttgggggcctttgagggacctggggataaagtgtttttttgtccagaaatacttgccagaggccccttaaatcacttggccatagcatctgctttcttggcttacttctaagactggctgtgtacacatagaaggaaaaagaacattaaaaaaaatgttttgcgattctaaggcagagtagtttaatagagtatggagttgggaggctgaagaactaaactctacacaaggtccagtatgaattttgtgactatgaacaagtaacttcatatccttctatgtcagggaagactgagttgtgtatggaaagaaaggggctttggacagagtttactgtgtattcatccattcatttaaaaaacaaaaaacaaacattacattctaggcagtatgccaggttctagggagacagtgatctgccctcagtgagtactacttattgattttgagcaaattttcacctcttgagtttactttcccatttgtaaaagggatgaaaataatacctattccatatttcccaagaatcactgttgtagtgatccatagttctagcaggagatttgaattccttgagtgtgctgactggaaaaaaaaaagaaaattgcttgttagttcaagttcttcatttgtaggtgacagaacagggctcagaagattaactgaccattctagttccttttttacttctcacatgcaatgcagcttccctgaagattcttttgcaacttttggggcctctccttcccttcctccctggcctgggtgctccagcctacccagacgcagtgttccagagcccactgtgaatgtggttttgctaaggctgagttcttccttagcagtccacgaatgccatctcttgtcttgaaatccagccatccagtaactcctaactgtcacctcttccataaggtcatgaaccctcaacttgaaaaggccattctctctgagaatctcagaatgctttgtaccttggcttattatgatgatccttaatctgtggcagtttcatcctaccctagattgtaaattgtatcctcttgcttatttcttttctttttttttttttcttgagacagagtctcgctctgtcgcccaggctggagtgcagtggcacgatctccactcactgcaagctccgtctcccgggttcacgccattctcctgcctcagcctcccgtgtagctgggactacaggcgcctgccaccatgcccggctaattttttgtatttttagtagagacaggtttctaccgtgttagccaggatggtctcgatctcctgacctcatgatccgcccacctcggcctcccaaagtgctgggattacaggcgtgagccactgcgcccggcctcctcttgcttatttcatgccagcggtgcattgagtaatgtcttgtaacagagctgattgaattcctgaatgagttgaatggcagcacgatagcaataacatctgaccagcctaccataggtggttctattactacctatgtagtcataaaacaaggcaataaatatgaagcaattctgtcaatgttgttgttgctgttttgttttgagacaggtttcactctgctgcccaggatggagttcagtggcatgatcacagctcactgcagccttgacctttttgggcttggtgatcctcccacttcagcctccctagtagctgggactacaggtgcaagccaccatgcctcgctgatttttgtattttttgtagagttggggtttcactatgttgctcaggctggtcttgaacttctgggctcaagcaatcctcctgccttggcctcgcaaagtgctaggattataggcatatgccaccatgcccctaaaggtgacatcaagagaggtgagtagatagaaagcagtttgggagttgattgacatttgaaatagctggggaaatgattattacttttttcctttttttgcctggagactcccagtattggaggatataatcattgttctcaattttttgaagatctgtcaagtggaagacattctgtattgctccaggcagcctaactaccagcaatggaaggaaataaagggaaacagatttcagctcagcaggaggcagaactttctaacatttagagctgtccaacagtggagcaggctgcattacttgagggagtgagctccctgaaatttgaactgttgaacaggaagatgaccatctggctgaatgtacaggagggaattcctgcctgggcaacagttgcactagtgacctttaagcaggtatcttccaattttaaggtttctagactgttcaactcagctaacttgacctctgaatatatgagttatggtgttacaaaaattattagacagttcatttattgacttacctaaaataactgcatggtgaagtttatgataagcaagattttagaaactgagaagtgggaaggcaggttttacactgaaaatccagataccatccaaaccaattaatggcacttagaacaaaagggaagggaggggccggcagcggtggctcacgcctgtaatcccagcactttgggaggccgaggcgggcggatcacgaggtcaggagatcgagaccatcctggctaacacggtgaaacctcgtctctactaaaaatcaaaaaattagccgggcgtggtggcgggcgcttgtagttccagctacttgggaggctgaggcgggagaatggcgtgaacccgggaggcggagcttgcagtgagccgagattgagccactgcactccagcctgggcgacagagccagactccgtctcgaaaaaaaaaaaaaaagggaagggaggtttgtaagtagtgtgtgcgtacgtgtgagagagaaacagagaagagagagagtcattcatgcgaataatgtgtcctgggcaactgagcgttgtcacagaaagcataaaacgctctacatttttgctttacacatacttgctcagtcggattcttcacgtccagcattactgcaggcggaaaccagggcccaggcctggtgaacagccttccggaagacgattccggacccggacacccacgacagcctcagggggcagctgacctagggctgcctaaggcggaagtgggagcccctagccgcccgggcggaactacagctcccagrggcccccgcggcgctgcgcacgcgcgctggcgtggcggcagcgccgctgcaggacgcagggaagccaacaggcgagtggcgaaggtggcggcagcggcggcgggggcagtcaccggctagggcgacggctccgaggccgagtggcggtccgacagagtcctccgtgtcctcccccgcatgacccccttggtgagtacgcgtcccgatttagtccgcgggctgtgagcggctccctgcctcgcggccggkttgctccggcctagggccgcagcctgtctctgactgcccggccgtcaggtccaactgaccccggggtcctgggctcttcccgtcagtgtcgggcgaggtgggggtcgggggacactgggttagacccaggggagagatgtggcggcgcrcaggagccagggcggcctggggctgaggagagggagagacgcgtgggggatgggatgggaagggacaggaggaccgcggggcggcctcgggtgggggccagagacgagaggcccggcaggtagggaactgagtataggaggcgagaacgaaatggaatgtcttctgagtgtcgctgataaagatatcgtgctgcagggaagcttgacaagctggacacacgggtctgggggcagcccacctaacacagacactcactgtacttggcatctttccacttgctgtcggaggtctgaaagtgagggagctgttggttgtttccatcccttttcttttaacttcaccttttattgactggcaaaattgtagtgagtgctggctaggcaaaccacagaagtacacccagggttctgtgtataaatgtgcataaaaacagggagacatagtgataggttcagatgagaactaggtcaaaggaggaatcagtgtttttatttttaaatttatgacgaaaatcagttctgagcaggactttgaactagagaggggttttaaactggagttcattgatggatagaattagaagggtcctttcactagaaggaggataaaatgacatcattatttttattgactgctaactgaaacttattatttccttcagttacgaatgtggacaacaagccagagtagcattagcagcgcctatgactttgtgatcaataaaaattacggatatttttgcatcatgtttacagttgcagatagctcagaatatcatttatggttaacacttctttgaatttctggtgttactagacccgccgttagacattgttatttaatgtgataataaggctgtacatatattatgaccatattagtttgttgttttgctaatatttccatataattggtttcccttgtaatcacatgtatttaattatgcacttaaaagaaatctgagaaagggaccataggcttcaccaaactgccaatgaggtccgtgcacaaaaagattaagaactcctgaaataatttgggaggccgaggcgggcggatcattgaggtcaagagatmgagaccatcctggccaacatggtgaaaccccatctctactaaaaatacaaaaattagttgggtgtggtggcccatgcctgtaatcccagctacttgggaggctgaggcaagagaatcacttgagcccgggaggtggatattgcagtgagccaagatcacgccactgcactccagcctggcaacagagcgagactccgtctcaaaaaacaaaacaaaacaaaaaaactcctgmaatagaaataaggttttttggatttataagtctacttagaagaactgttktttttttttttttggttgtaagtttattcaatgcaaaagaatcctctccaattttactgaggtggctgaccacgtccacgaccaaatccgtctcaactggaatttggctgctgacccagccccagcctcagctttcttgtcggcactaagtggcacagcactccatctgtaggtatgtctgtcagcactccatctgtaggtatgtctgtcagcttcccctcttgtgagtctcgcaggtcactcaccctccagacctttaggctgaggcctgccggtctctggacagctatggcgtagggtagcaggtacagtctccggggggcagatgaaggtaatcccggagatactggataccctcattggtaaggtaccagtagaaatgtctccaggcaaactgttccttcatgtagccttgagacttgagagactgcatggccttcatgacatgaaggttgggcacgttcttgtctkccagctctgggtgcttaggcatgtggacatccttcttggccaccatgactccctccttaaaaaggagttcataaatggcaatctggttctttagaagaacatttgaatcattgaaggcagacaggatgacagtgtagacgaaagagaatttcataatcagggagataaaaaatttggatgggatcagggtagtcttttgttttgttttrttttgagacggagtctggctctgttgcctaggctggagtgcagtggcatgatctccgctcactgcgacctcagcttcctgggttcaagcgattcttgtgcctcagcttcctgagtagctgggactacagacaccagccaccacgcctggataatttttatatttttagtagaggcaaggtttcaccatgttggtcaggctggtctcaaagtcctgacctcaggtgatctgcctgcctcggactcccaaagtgctgggattactgatgtgagccaccgcgtcctgcccagagtagtcattttgaaagaatagaccatagatatttcattcagggtaatggggaatgaacaaaataatcggaagaagaaagaaaagtgaatatgttggcctttaaatttttgtattaaggcacctccccacttccaagggattgcagctctgtaagctctaatgtaagcctgagaaaagaaattttactgtttgctggttttctttaaatcatggaggtggattttttttttttttttctgagatggagtctcaggctgtcgcccaggctggagtgcagtggcgcgatctcagctcactgcaagctctgcctaccgggttcatgccattctcctgcctcagcctcccaggtagctgggactacaggtgctgccaccatgcctggctaatttttgtatttttagtagaaacggggtttcaccatgttggtcaggctggcctcgaacctcctgaccttaagtgatctgcccgccttggccccccagagtgctaggattattggcgtgagccaccgcgcctggccatcttacattttttaaaagacaaaaaattatttcccagcactatgttgtgcttttgtgagcatttggtttcatatggggactaatcattcttagtacatgctgccatataggtttgattattcatcattttgtatgaggtaataaaagggaaagtctgtaagtgaagttcttgttttgctgaggttcttttaccttttactgtgtgatcctaggttgttttatttctcttcattcttcttccttctttcttcttccttctttttttttgaaacaaggtcttgctgcattgcccaggctggacttgaactcctggacttgagtgatcctcctgcctcagccttaccaagtagctaggactataggtcggcaccaccacacctggcattgtttctttttctgttcttctttytgagagggagtcttacttgtctcccaggctggagtgcagtggtgtaatcttggctcactgaaacctctgcctcccgggttccagcgattctcctgcctcagtctccctcctgggctgggactacaggcgggtgccacratggctggctaatttttgtatttttttgtagagacggggtttcaccatattggccaggctggtcttgaactcctgacctcgtgatctgcccgccttggcctcccaaagtgcggggttatagaccgcacccagctgcattgtttcttaattgctctcttattcagtatgttgagggccacaaatttgcttctgtcaaaatgaaagcaaaggagctctagaaaggggtattggtgctagaattaacattgaattataatcagtataactgattagtaatcaaggaagtgaaagccaaaataagtgaaaatgcatcagattgagatttcagattgataacaaatctaatgtttttcacatcagattgataaaaaaaattttcatgtctgggctgggtgcagtggcttacgtctgtaatcccagcactttgggaggccgagatgggcggatcacctgaggttatgagttcgagaccaggctggccaacatggcaaaaccccgtctctactaaaaataaaaaattagctaggtgtggtggtgcatgtctgtaatcccagctacttgggagcttgaggcaggagaatcccttgaacccgggaggcggagcttgnnnnnnnnnnnnnnnnnnnnaaaaaaattatctgggtgtggtggcacacgcctgtaatcccagctactatggaggctgagacaggagaatcacttgaacccaggaggcggaggttgcagtgagccgagatcgtgccattgtactccagcctaggygacagagtgagacttcatctcaaaaaaaaaaaaaaaaattaaaaatcaaaaataaaaaaaaaacactgaggaaaagtatgtgcacaataaaaaaaaatagttctgccaaagtgtaggcatcggtatataaaaatctttcccatacataatcttcagataacatcatggtttttcccaaatgtgcttactatttgaactattatttattcagtgacttttttttttttttgatacggagtcttggtgcgatgttcaggctggagtacaatggcgagaatcttggctccctgcaacctatgcttcctgggttgacaccattctcctgcctcagcctccggagtagctgggactacaggcgcccgctgccatgcctggctaattttttgtatttttagtagaggcggggtttcactgtgttagccaggatggtcttgatatcctgacctcgtgatctgcccacctcggcctcccatagtgctgggattacaagtgtgagccaccgcgcccggccaaaaaaaaaatttcatgtctgacgatatcaaatgttggtgaagatgtggcaaaaatggtaattttgaaactactggccaggcgtggtagctcatgcctataattttagcacttttggagtttgagggccacttgagtccttgaacccgggagttcaagaccagcctgggcctcaaagtgagacccctgtctctattaaaaaagaaaaaatttataaaaaaaaaaaaaaaaagaaactgctaccggttactgttaggaggagraaaaaaaaactgttggttgagtgtaaactggtatagctgcttttgaagacagtatttgcagcccttagtaaagttgaagataggcgtactctataatttcacgtctataagggattatgaatgggaggtagtggcaaaggggatgatatctataatttttttttttttttgaggtggagttttgctcttgttgcccaggctggagtgcaaatgcgcratctcggctcactgcaatctccgtctcccgggttccagcatttctcctgcctcagcttcccgagcagctgggattataggcatgcaccactatgcccggctaatttttattttattttattttattttattttattttttttagacggagtctcgctctgtcgcccaggctggagtgcagtggcgtgatcttggctcactgcaagctctgcctcccgagttcacgccattctcctgcctcagcctcccaagtagctgggactacaggcgcccgccaccatgcccagctaattttttgtattttcagtagagacggggtttcaccatgttatccaggatggtcttgatctcctgaccttgtgatccacctgcctcggcctcccaaagtgctgggattacaggcgtgagccaccgcgcgcagcccgttatctataatttcttttgaggatatctatactttttttttgagactagacactactgtgacaacagctaattctgggaggcagaatatacgtgctaaattattatttgtatctttccytattttctgctgttcgttttgtttttttctttttgtttgttttttgagacagagtcttgctctgtggtccaggctggagtgcagtggcgccatctcaagtcactgcaacttccccctcctgggttcaagagattctcctgcctcagcctcctgagtaactggtactatgggcacgtgccaccacacctggctaattttttgtatttttagtggagatggggtttcaccatgttggcaagcctggtcttgaactcctgtgatccgcctgcctcggcctccccaaagggctgggattacaggcatgagccactgtacccggcaggctttgtttttttgtaatccataacttctaaatattgtttttgcaactctttgaaaaattgtaagcctacagaagggttgttcagtaaacattcatatacccttcacctagatttgctgttaacattttgccatrtttactttacacatagaagatgcacattttactttgggaatccgagacggtcagattacttgagcctaggaatttgaattttgaggcaaggtcttgctctgttgtctaggttggagttcagttgcgctatcagggatcattgcagtctcgacctcctgggctcaagctgtcctcccacttcagtctcctgagtaggttgggatgtgctaccacacccggttaattaattttagttttttattttttgagatggagtttcactcttgttgcccaggctggagtacaatggcacaatctcagctcatcgcagtttctgccttctgattctcctgcctcagcctcgcgagtagctgggattacaggcatgtgccaccatgcccagctaattttgtatttttagtagagacggggtttcaccatgttgatcaggctggtcttgaactcctgacctcaggtgaactgcccgcttcggcctcccaaagtgctgggattacaggggtgagctaccatgcctgaccaattaaaaaaagaattttttttttattgggaagacaggatctccctatgttcctcaggctggtctcaaactcctgggctcaagcaatcctcccaccttgacctcccaaagctttgggattacaggcgtgagccactatgcctagctgctagaatttaaaataaactttattcggccaggcacagtggctcacacctgtgatccctgcattttgggagaccgaggcgggtggatcacctgaggtcaggagtttgagaccagcctggccgacatgatgaaatcccatctctactaaaaatacaaaaaattagctgggcgtggtggctcgcgcctgtaatcccagctactcaggaggctgaggcaggagaatcgcttgaacccaggaggctggggttgtagtgagccgagatcacgccactgcactccagcttgagcaacaagaacaaaactctgtctcaaaaaaaaacaacaacaaacaaacaaacaacccccccccccaaaaaaaaaccaagaactttattctactggtgctttcttagccaccgtcacaatgttgtcacttctcactttacgcagctggctccactgagggtttgtgagctggtctccagtgatggcacatagttcttattaccttacatggtaacactacctgatcatggcgttctggaaattgtgacaatatgtactgatcttttgttggtgcaactaacaatacaaaagttgctgctctgtaaatgtatgcttcagtttcattagtttatttggaataattacccctaacattgtttttttttttttttttttttcgagacaaggtcttggtctgtcatgcaggctggagtgcagtracgctatcacagctcactgcagcctccacctccctgtctcaagagattcccctgcctcagccttctgagtagctgggaccacaggcacatgacaccatgcttggctaacttgtattttgtattttatttttgtttgaccagacgagttttaaatacaagttttgtagtttttgtagaggtgcccacactggtctcaaactcctgagttcaagtagttcatctgcctcggcctcccaaagtactgggattacaggcatgaaccactgcgcccagctacttgtaatgtttgtaggtagtttaatagcgaaagtaggtacattccagtgataagacattcagtttattattttttcctttttccttttttttttctttaggggtaagtgtactggagagagttggttatacattctaggaatctcaaaggtaaagtatgatttaaaaatatttttttaaaataatttttttaagtttgcctacagctacaaatttttaagttttatgtaagtggaatcctttttttttgagacatattctcactctgtcatcagagtgcagtggtgccatcatagctcactgaagcctcaaactcctggcctgaacagggcgatcctcctgcctcagcytcctgagtagctgggaatacaggagcatgctactttgcccagctgagtccttcttatttgctttggacagactagtacttgaaaaaataattttcaaatgtttagttgagtgtttttttttccttcaacttttgggaggctgtttttttgtcatacatatttccttctctggagttaattttctgttaagcaagaaggatttcagttatgtattttttacacttgaactacctaaacttgtgcttgcatagaattattttcaactttaactccttaagtaatcgttttcaggatattttagtttttgttcttgttttttttttgagttggagtctcgttctgtcgcccaggctggagtgcagcctcccgagtagctgggattacaggtgctaccatgccctgctcattttttatatttttagtagagacaaggtttcaccatgttggctaggctggtcttgaactcgtgacctctggtgatccacccgctgtgctgggattacaggcatgagctaccatgcctggctttttttttttttttttttttttkggaggcagagtctcactctgttgcccaggctggagtacagtggcatgatctctgcttactgcaacctctgccttccaggttcaagtgattctcctgcctcagcctccctggtagctgggattacaggtggctgccaccatgtccagctaattttttttatttttagtagagayggggttttaccatgttggccaggctggtcttgaactcctrctctcaagtgatctgcccgccttggcctctggaagtgctgggataggtgcaagccaccatgcttgggcagatgttttaatttgtaaaggaactaggaccaataattttttttactgtatacacattttagaataagttttaggcacctagctgtttgatttctggtaactaagattatagtcagttaaactttactgctggccaggcatggtggctcatgcctgtaatcctagcactttgggaggccgaggtgggcgaatcacttgaggtcaggagtttgagtccagcctggccaacatggagaaaccccgtctctactaaaaatacaaaaattagctgggtgtggtggcgcacacctgtagtcccagctacttgggaggctgaggcaggagaattgcttgaacctgggaggcagagtttgcagtgagctgagattgtgcccctgcactccagcctgggtgacagagctagagtctgtctcaaaaaaacaaaaacaaaagaatctttccttctttatgcttacctatattttctaacttttctggatatgtttcaatatgtattatgattttgtaaaaaatttcagaagggtggttattttttgtttcaaagctgaaacccagtttaaaactctaatacagtggtcagaggaagtggtgaatatcttgatacttcagtttctaatatttaatatatatataagtgaatggttgaggccgggcgcagtggctcacgcctgtaatcccagcactttgggaggctgaggcgggtggatcacctgaggtcaggagtttgagaccagcgtgaccaacatggagaaaccccgtttctggtaaaagtacaaaattagccaggtgtagtggcacatgcctgtaatcccagctactcaggaggctgaggcaggagaatcgcttgaacctgggagtgggaggcagaggttgcgatgagccgagatcgtgccattgcactccagcctgggcaacaagagcgaaactccatctcaaaaaataaaaaagaatggttgagtgaaggacttaacagactacataggggtttctataaatttttttttttgagtttgaagatgaaccagatacctgataaatgcttgtgtctgaaagaaaagtataaaagtataatttaattctaatactctttgtgtgtgtgtgtggccaaaattatgtttttgtatacctttttttgtaagccatttaaaaaatacaggctttaaacatactcttggaagtgtataaacagatactgtgtctgcttgttaatctaagatgtctgtccgaaaaggtgcttgcttggtcttgctcccttataatgccggtacacccacgctggagactagtagaaagcatgttgtcagacgtgtttagttcttttttttttccttaccaacttatgtgttgttatttattttctgtgaatctttggaaggattaaacccacgtggtttttctatcagaaaaaagacaaaacaaaattagtcaaggcatattagtctttttcctttttcctaggatcagagtgtagtaatatcctgccaatcttaattttaacaaatacttatatttttcggacttagattaacttatttttttattttttattttttgagacagactcttgctctcttgcccaggctggagtccagtgacctgatcttggctcactgcaacctctgcctcccgggttcaagcgattctcctgcctcagcctcccgagtagctgggattacaggcacccaccaccacacctggctaatttttgtatttttagtagagacgttgtttcaccgtgttagccgtgctagtcttgaactcctgacctcaagtgatccacctgcctcgagtgctgggcttacccaccgcacctggccctcctttcactttctaatgcagaattctaatctatccctttgttttacttgtgttatttatatttacttacttccattatcttggctactttacaaaaatgcattaggtctaaaagttataacatttaaggctgaattgccaaatgtttaaaaatatagatttctgtaccagaaaaactttggaaaaactacattaattctttttttttgagatggagtttcactctgtctcccaggctgaagtgcagtggcatgatctcggctcacttcaacctctgctgcctgagttcaagcgattctcctgcctcagccacctgagtagctgggattacaggcgcctgccaccctgcctggctaatttctgtatttttaatagagaaggggtttcaccatcttggccaggctggtcttgaactcctgacctcgtgatccacccgcctcggcctcccaaagtgctgggattacaggcgtgaacctccgcgcccagccaaaaatacattaattctttatgcagagatgatttcatctttactaactcctttggaacccgaggaatctaactttgattcctctaaaacaaagtccttttaatatctaactattgcaggttgtgataggccaacttggattctgacaaagtaacttcttattaaggcctctctatgaataagtttctgttccttagtttgaaaacattaccatgataatagtaatggtaatagctgacatttattggattcgttctctttttcttaggcattatgcacattatttgaaattatgaattccataattctatagagacatcttaatgattgatttctttttgaaaacctattttaacaaactggataatattgttgactaggaggtttcttttgggtagaaccacagtaatgatggtaacgctgtttggagtttgataatgaatatgtatactttttatgaaacaccactctggtaaatgtgatgaaatgtacatgacagccctctgtttacattctttaattttgagggtggactcttggatcttgaaacaggctttaccagtattacagctcagcaaaaatgcagctgaggctcaaagttctctttctgctccttcattcggttgttttgtgtacccgctgtatttatggaagcagcttagtttatccagggaaccaaagcttcctcaaagcatgggggttgtgaaaacttcctctaagtttacagtgttctaaggatttyagattgttcttagttacttggtttatcttgatctccagatttatatatatcttactgagttgtcattagagattgttaaattagatttggtggtatttaatttcacamtcatacaattaatggaggtttatctaattgtgaaagttccagataggcacccatttctagattggttggatacttctatgttatttgcttcctctgggaaataatggggtataattttaatgccattgcagttctgcttattagtgtgcagcttgttattgttgaactatgtcttattttgaagtttagtactatgccctttttgtggcacttaaaaattttctcatttttacagaatttgtcttgtcttgagtgtttcagtaattgcactagtaggtcttcagcagggaagagcttggtgccaaatttttattgtttttcttttctttttttttttttttaattcttcagctaagactgcagaagaggtgatttattgtatggatgttatacttggccacaaggaaacacagaaatagtgcagaatgtcacaggtccagggcagaggaccaacatgggcagtttttgttatgagcgaggtgggtctcaggtgatcggtgatcagagggcgatgaagttctagatccattgagacaagctctagacagtagcatgcagtcccacaacttgtaccagcatccccagcatctggcattccatgtttctgctcctgtggcctccacggtgcaacaagctagtggttttcttggacctctgccttatctttcttcttttgcstattcacttcttcctccacttggctgtcatggcacagaggtttccaagaaaatggcgctaaggctgagagctcttttctttttttwaaaaaaaaattactaaagtaataaatattctttgktttttatttttatttttatttatttattattattattatcttgagatggagtagtgctccgtcacttgagctcaggagcctgcacttggccaggctggagtgcagtggcgcaatcttggctcactgcaacctctgcctccccggttcaagcgattttcctgcctcagcctcccaagtagctgtgattacaggctaacgccaccacgtccagctaatttttgtatttttagtagagacggggtttcaccatgttggcgagcctggtcttgaactcctgacctaaagtgatctgccggcctcggcctctcaaagtgttgggattacaggtgtgagccactatccygggcctgttctttgtttttttaaaaaaaactaaaaacaatggaaaaaaaatgaagggttttctttctcacatatgcatgcacttaccatttgatttgaattattttcccccaaaattatagttaacattatatataataagcgctttgtactttttttttttttttttgagttggagtttcactcttgttgcccaggctggagtgcaatggtgcaatctcggctcactgcaacctctgcctcccgggttcaagcgattctcctgcctcagcctcccgagtagctgggattacaggcatgcaccaccacgcctggctaattttgtatttttagtagagacgggtttctctgtgttggtcaggctggtcttgaacccccaacctaaggtaatccacccaccttggcctcccaaagtgctgggattataggcgtgagccactgtgcctggccgctttattcattttaattcatttaactttcaaaagcctgtgaacataccctatgaagtaggttctggtgtrtgtgtttgcagatgaagaaactgagtcatagagaagtaaagtaactagccaaagattgcacagctagggagtggcaaacctgagacttgagcccaggtactcttgctccagcgtttaactcctagactgcctcygggatcttaggcatattgttctgcagtttgctcttttcgcttaatgatgtctgatggacatctttcttttttgttgttgttgctgtttttcgttttaatttttttcaatttttaaattaaaaaaaatttttctttgagacatcttgtcacccaggctggagtgtaatagtgtgatctcggctcactgcaacctctgcctcctggcttcaagtgattcttctgcctcagcctcccaagtaccttggattacaggcgcctgccaccatgcccggataatttttatatttttagtagagacggggtttcactatgttggccaggctggtcttgaactcctgacctcaggtgatccacccacctgggcctcccaaaatgctgggattacaggcgtaagccaccacacccaacctaaattgtttatttttttgatggacatctttctacatggtttgagtgtaccattacttatttaacttaatgcctttcaaacttaatcttgttgccaggcatggtgactcaggcctatagtcccagcactttgggagaccaaggtgggtggattgcttgagcccaggagtttgaggccagcctggccaacatggcaaaaccctgtttctgcaaaaaatacaagagttagttgggcatggtggcacatacgtgtagtcccagctgctcggtgggaggctgaggaggtaggacgatcacctgaacccgaggaggttgaggttgcagtaagctgtgatctagccactgcactctagcctgggggacagagcgagactctttctcaaaagaaaaaataaaaagacaatcttgtttaacattgccaatttcattagtaatgatttcaagttatataaaaagtcaaggtttttgaattggaatagtcatggaacattagtatttcctaagtaatgcatattagctattcatgtgtattgatattgtctcagttgagttgtataataaaatccgagcttaacccacaaaccatttattacgaatgagtttaattatttttgtagttattctgtcttctttagctctggaaaattagtgtattgagggtaaaatcaataatctgtttggatttcgtttacttttgacatcttccagaattctgttgtcgtcacaagaagtctgttgtgttgatttgaactgtgaatactatctgacattatattacctgtattttcaaagtaatttgcctttcaattccttgtacttgtgccaggcagcgttagttggtagtaagcccattcttttttctacaatgtttcactcttgcttcaaatataccaactattctgtaggccagagttcaaaacaaaacaaaacatacgaaaaaccaaataatactgactaaagatactaaaatgtcacttgtttcaaattttttctcatttaatatttactgcctaattttgaagaaatatctttccagtctttaataaaaatgttacacctgtaatcccagcactttgggattacacaggcggatcacttgagctcaggagtttgagaccagcctgagcaacatggtgaaaccccatctctacaaaaaatacaaaaattagctgagcgtgatggtgtacgcctgtagtcccagctactcagtacgctgaggcaggaggattgcttgagcctgggaggcggaggttgcagtgagccgagagtgcaccattgcactctagcctggagaacagagtgagaccctgtctcaaaacacacaaagaaatttcagatatgctcattggaatgtgagaagatattttcaactaaatttagttgcaggtttttttgttttgttttgagacagggcctcgctcttgcctgagatgaagagcagtgggaccatcatagctcacagcagcctcaaactcatgggctcaagcagtgttctcatatcagcctcctgagaacctaggactacaggtgcatgccaccacgcctagctaattttctaaatttttttttcgtaaatatggagtctccctatgttgtccaggctggtcttttgaattcctggcctcaggcgatcctcccactttggcctcccaaagtgctgtgattataggtgtgagctaccatgcccagccttaattacagttttctaataatgttttctaataattttggaactaagtagcagcttgactgattcctaattggagcattgctctttatcagtcagtcatttttaaaattaattataaattcaaacattcattcagcacctgctaaatgccagtcactgtgctaagtaatggggataccggcatgacaatgtccttacttcagggaacttggagttttgttgtaaaaacaacattttgttgcagacaatgtaaagtgctgtgggagagatgaacccaaatgaggaaatatctgagtcaagggactgtacttggtttgagctacaccctgatacctaagtgtgatttaactggccaatgaaaggagtggacacagggctctaaaaacagaatgtatagaagtgtagtttgtgaaaactagtagaaattgtcactggaaagtcatgtatccctaatatattgtgtatccttcagtatccctaaggtaatatgccctccatcaagatcagaccttgcctgtcttgttcatcagtgcttagcacataggaggtatttaataattaacatctgttgaatgaatgagtgaaggaagtgtgttaagtaaagcatactatgcttgtctgttttttttttttttttgagacagggtcttgctttgtctcctaggctggagtacagcttactgcagccttgacctcccaggctcaagcagtcctcctacctcagcctcccaagtacctgggacttcaggtgcatgccacacccagctaatttttaaatttttttatagaaacagagtctcactatgttgcccaggctggtcttgaactactgtactcaagtgatcctcctgcctcagcctcccgaagtgttgggattataagcgtgagccactgtacctgaacttgtcaattttttggaacgagaatgaacccattattttagtatattattaatgcctgacaatttttagatcatgtaatttcacaaaacataaaatgagcaagaaactgctcctgcactgaagggagtaagttctgtaaggagaagtaaatgtaaataaatcgtcgtgattcaacatgatatttgtaaaaaatatttgcaagagacactcatctattgtatggattggttaagtccctgaaaagtggtggataatttaaaatgctcacattaggctgggtgcggtggcttatggctgtaatcccagcactttgggaggcctagtccggcggatcacctgaggccaggagttggagaccagtctggccaacatggtgaaaccctgtctctactaaaaatacaaaaattagccggacgtggtagtgggtgctggtaatcccaggtactcgggaggctgaggcaggagaatcacttgaacctgggaggcggaggttgcagtgagccaagatcatgccactaccctccagcctgggcgacagagcgagactccatctcaaaacaaataaataagtaaaatgttcacattaggccaggcaaggtggttcatgcctgtaatcccagcactttgggaggccgaggcagaaagattgcttgagctcaggagttcgagaccagtctgggcaatgtggtgaaacctcatctctacacaaaatacaaacattagctggatgcggtagtacatgcttgtagtcccagctgcttgggaggctgaagtgggaagattkcttgagcttgggacatcaaggctgcagtgagccattatcatgccacagtactccagcctgggtgacagagcaagatgctgtctggaaaaaaaaaaacaacaaaactcacattaaaattatttgattgataaaatgcaagggataacattatagcaggtcattttaaaaatggcagtcatggctgggcacagtgactcatgcctgtaatcctagcactttgggaggcccaggagggcagatcatctgaggtcaggagtttgagaccagcctggccaatatggtgaaaccccgtatctactgaaaatacagaaattagccaggtgtggtggtgggtgcctgtaatcccagctactcaagaggctgaagcagggtaatcactggaacctgggaggcagaggctgcagtgagccgagatcacaccactgcactcgtctgggagacagaacaagactccatcttaaaaaaaaaaaaaaaagacagtcatgtactcttttgccctattacattaatgtgaatattacataaatactatgaggaaggccggccgcaatggctcacgcctgtaatcgcagcaccttgggaagctgaggcaggtggatcacttgaggtcaggagtttgagaacagcctggccaaatggtgaaaccctgtctctacaaaaatacaaaaaaattatctgggtgtggtggcacacgcctgtaatcccagctactatggaggctgagacaggagaatcacttgaacccaggaggcggaggttgcagtgagccgagatcgtgccattgtactccagcctaggcgacagagtgagacttcatctcaaaaaaaaaaaaaaaaattaaaaatcaaaaataaaaaaaaaacactgaggaaaagtatgtgcacaataaaaaaaaatagttctgccaaagtgtaggcatcggtatataaaaatctttcccatacataatcttcagataacatcatggtttttcccaaatgtgcttactatttgaactattatttattcagtgacttttttttttttttgatacggagtcttggtgcgatgttcaggctggagtacaatggcgagatcttggctccctgcaacctatgcttcctgagttcaagcgattcttctgcctcagcctcctgagtagttgggattacaggtacgcaccaccatgcctggctcatttttgtatttttagtagagatgggggtttcaccatgttggccaggctggtcttgaactcccgacgtcaggtgatccactcaacctcggcctcccaaagtgctgggattacaggcgtcagatggcgctcggccaaaacatagttattacaactatttcaggaatgttatatagaataaatgagaagagccgggcacagtggctcacgcctgtaatcccagcactttgggactccaaggcgggtggctcacctgaggtcaggagttcaagacactgaccaacatggagaaaccccgtctccactaaaaatacaaaatcagtcaggcatggtggtgcatgcctgtaatcccagctacttgggaggctgaggcaggagaatcgcttgaacccaggaggcggaggttgtggtgagccgagattgcgccattgcgctccagcttgggcaacaagagcaaaagtccatctcaaaaaaaaaaaaaaaaaaaaaagaataaatgagaccatccatgaaaagcccgtagttggtgtctagcacctggcaggcctgaaatgtgtggtagttattactgtttttatttcctaagcacccttattctttactgctgatcagttaaaactcttcaagctcaactgttactactacttttttttttttttttttgagtcagagtctcactgtgttgtccagactggagtgcagtggcgcaatcttggctcactgcaaactccgcctcctgggttcacgccattctcccacctcagcctctcgagtgactgggattacatgcgcctgccaccacgcccagctaattttttgtatttttagtagagatggggtttcactgtgttagccaggatggtgtcratctcctgaccttgtgatccgcctgtctcggccttccaaagtgctgggattacaggcgtgagtcaacgtgcccagccaactgttactacttctaataacctaaaaaaagatttgctattaggtggaagtcaatataaaaagtagcttttcttaaactattctggctggaaaatatatttcctttgcttcgattgatcagaaattagtgcaaatgtaatatagctatggaaattttgtttcatgaagtttctgtgtttcatttgtgatcacagtgaactgaaagaaaaaatatttttagtgtgataaacaccataatgtgttaacagatgttaatgggttctggaatgtcatatgggagccgttcccttttctaggccgtggtggttagagattgtgataattacagtgttcgaatactgctctcaagtttgtataattttttttactgaaaaaagttgctaactcagatacttgaatttagaagtatattatttgtttaatttaaaaggtagacttaaattttttttatttttgtagagaacagtcttgctatattgttcaggctggttatgaactcctgacctcaagcagtcctcctgcctcagcctcccaaagtgctgggatcacaggtgggagccactgtgcccaacctagagtttattttttagatcaattttagctttacagaaaaattgagatgatggtacagagacagcatcaagatcaaktcttcatattattaacatcttatattagcatagtacatttgtttcaattatgacagtttgttacaatattgtgaactaatattgatacattatcattaaataaggttcatactttgttccaatttcctcagtttttacctagtgtcctttttctgttcaggatcccattcagcatactatattacatttagatgttattgtgtaatttttaattagattgtcttgaattagatacattaatgtatgtgtgtggatgaagcacactatattactcataatgctcttaaagataattggctttttttttttgatggagtctcgctctgtcacccaggctggaatacagtggtgggatctgggctcactgcaatctctgcctcctcgctggttcaagcgattcttctgcctcagcctcccaagtagctgggattacaataggcacctgccgctacacctggctratttttaaaaaattttaattttagtggctcatgcctgtaatcccaacactttggaacgccaaggtgggcggatcacaagatcaagagattgagaccatcctggccaacgtggtgaaaccccgtctctaccaaaaatacaaaaattagctgggcatagtggcgtatgcctgtagtcccagctactcgggaggctgaggcaggagaatcacttgaacccaggaggcggaggttgcagtgagctgagatcacgccactgcactccagcctggcaacagagcgagactccgtctcaaaaaataaaataaataaaaagttttaatttttatttttagtaaaaacggggtttcaccatgttggtcaggctggtcttgaactcctggcctcaagcaatccacctgccttggcgtcccaaagtggtgggattacaagcatgagccaccactcctggyctgatagtcggcttttacttttacttttagttaagtcttttacacatgtaggtttcataatgttagcaggtagtctgttttacctctttagttacgactttgatatttcccacttactttgatgaaaaggtcattttggtcaattttgttatgtgatggatatggcgtcttgtctcattgcccctaggaaatgataaaaagttaccctaccttttaattgataagaataatgatatcctacactctgcagcaatttatactttagttatcttacagtataccatctgagatagataagggcatcatcccaattttgaagatgaggaaataaactttggtgaagtgcctagccacaagtcacgttgccaataggtgtcagagttcagtcttaaattcatcagatcttctgattccagttttagtattctttcgcctatgttaattaaaatagtctttgtagaaattaagaaagtaggaaatggtctttttttaatgactttctaacaacattatttctgaaattattgggttaataaagaggtgattcatttgtttacctgaattctagctgttacttaaagtttatttttatttttatttatttatttatttatttatttatttatttatttatgtttgagagggagttttgctctgtcgcccaggctggagtgcaatggcgtgatcttggctcaccacagcctccgcctcccaggttcaagcaattctcctgcctcagccttctgagtagctgggattacaggcatgcaccaccacacccagctaattttgtatttttagtcgagactgggtttcaccatgttggtcaggctggtctcgaactcctgacctcagatgatccatccacctcggcctcccaaagtgctgggattacaggtgtgagccaccgcacccagcttattatttttattttttagacagggtcgtgctgtgttgcccaggctgaagtgcagtgtggcgcagtcttggctcactgcagccttgacatccccggctcaagtgatcctctgccttcagcctctggaatagctgacaccacaggcgtacatccctccacctggctatttattattattattatttgtagagatggggtctccctgtattgaccaggctggtcccaaactcctgggctcaagtggtcctctcaccttggcctcctgaagtgttgggattataggtctgagacaccacacctggccttactttgagttttgaattgctagatacatatcattaatttgggataccattaattagaaattctcaatagcaaaaacttgaaatgtgattcttatcccataaaaagttggaaatattttttttcctaccttagagaccttctctttagtcagaggagttcatttagatatagttgttaacatttgtaatatatgtattttccttgaaacttttttttttctttttttgatatggagtctcgctctgtcacccaggctggagtgcagtggcatgatctcagctcactgcagcctctgcctcccgggttcaagtgattctcctgcgtcaggcttcccaagtagccaggactacaggtacgtgccaccatgcctggctaatttttttgaatttttagtagagatggggttttgccatgttggccaggctggtcttgaactcctgacctcaagtgatccacccgccttggcctcccaaagtgctgggattacaggcgtgagtcactgagccccgccagaactttttttttttttttttttttgagatggagactcactcttgacacccaggccgaagtgcagtggtgcgatctcagcttgctggaacttccacctcccaggttcaagcagttctcctgccttaacctcctgagtagctggtggtgcacaccaccatgcccagctaattttttgtatttttagtagagatgggatttcaccatgctggccagggtggtctcgatctcctgacctcatgatccgctcacctcggcttcccaaagtgctgggattacaggcgtgagccaccgcgcctggcaactttttttttttttaaagagacagggtctcgttatgttgcccaggctgttctcgaactcctggcctcaagtgatcctccctcctcagcctcccaaagcactgactgacaggcttgagacaccacacctctggcctccttcagaattttaatgtgcagtcatgggtccttaatgagagggatacattctgagaaatgtgtcattaggcagtgtcattgtgtaaacattatagagtgtgtttacacaaacttaggtggcatagtcccctactctcctaagctatatggcatagcctattttcttctgggctacaaacctgtatagcatgttactgtactgaatactctaggcaattataacataatagtaagtgtttgtgtatctaaacaagaaaaatagtacagtaagaatattgtataaaagctccattataatctcatgggcccactggagtttcaccatggttgactgaaaggtctttatgtggcgcatgactgtattttgtaattcataaatttcaccttatcggrcagtgcctcctctctgtgctttgcgttagagtagatatgcttgcttatcaggggttggcagagtttttctgtgaagggctagatagcagatattttggacttgtgggccacatggactgtggaggactctggcaactattcagctctgccattgtggcatgaaaccagccatagataatatataaacaagtgagtatggcttcattccaatacaacttttatttatacaaacaggcagcaggctaaatatgacctgaaagtcatattttgctggcccctcctctataccattatggaargatatagaaatccagtgtgcttcactcttgccactaaaatctccttactgtgctctcagtgataagtgttaaaacatgagttgaaaaacttgaacttctcaaaatctgattaatatgcatgggcataatctatttcttttttctttgkttttttttttttttttttttttgaggtagagtcttcctctgttgtccaagctggagtgtagtggcccgatctcgggttcaagtgattctcctgccttctgggttcaagtggttctcttgcctcagcctcccgaatagctgggattacaggcatccgccaccacacccggctaatttttctatttttggttagagatggtgttttgccatgttggccaggctggtctcaaactcctgacctcaggtgatccacctgcctcggcctcccaaagtgctgggattacaggtgtgagccactgcacctggcccatctgtttcgtttttatagaaaatatggtaatgctgttgaacttattttattttatttattttttgagacagggtctcattctgttggtcaggctggagtgcagtggctcagtcttggcttactgcagcattgacctccctgctcaagtgatcctcctacttcagcctcctgagtagctgagactacaggcatgcgcgatcacactcagataattttcgtgttctctgtagagacagggttttgccatgtttcccaggctggtctcaaaatcctgggctcaagtgatccacctgctttggcctgccaaagtgccgggtccatagatgtgagccacttcacctggccatatatatattaatatacgtgttttgagatggaccttgctctgtcacccaggctggagtgcagtggcgcaattatagctcactgcaacgtctgcctcctgggctcaatcaatccttccacttcagcctcccaagcagctgagataacagctgtgcgccaccatgcccagcaaatttttttattgttgttgttttctttgttttttatttattttttgatagagatggagttttgccatgttgcctaggctgatcttaaactcttgggcttaagcaatctgcctgccttggcttcccaaagtgctggaattacaggcatgaaccaccactcctggccagctcttgaccttacaggttttcaaagtctagttttttttttttactacagagaaactaacttagaaactgctcgtgaatttcaggaaaaaattatatttgttattttaggtatgcctaatgttaatttaaaaattctttgattttacttatgttcttattcatagagcaactggtgacaatgcaaatattagcaaagataaaatattgagagctgcttatgtttggccatggtttgggggctggggatacataggcctaagagatgccctatgcctttgaggacacggaaagacaggatatagacattaaagatgaaagtacaaaaaatggtttcaaattggtggtatcaaaagtttcaccgggctcggtggctcacgcctgtaatcctagcactttgggaggctgaggtgggtgaatcacctgaggtcatgagtttgagaccagcctggccaacgtggcaaaaccccgtctctactaaaaatacaaaaattagctggacgtggtcgggggtgcctgtaatcctagctactcgggaggctgaggcaggacaatcgcttgaacccaggaggcagaagttgcagtgagctgagattgtgccattgcactccagtctgggcaacaaaagtgaaactccatttcaaaaaaaaaatcagtgtgtcaggagttcagagttgagatttattgccatgtgcatactgtatggttggaaaggaaggttttattgagtctggtcttggaaattggaacatctgcatgagagggggccagatataaatatagaaacatgacgatgaactcaaagtaaaaatgggccgggcgcagtggctcatgcctgtaatcctagcattttgggaggcaaaggcaggtggatcacttgagctcaggagtttgagaccagcttctacaacatggctaaactttgtctctacaaaaaatgcaaaaattagctgggcatggtggtgcatgcctgtagagggaggattgcttgagctggggaggcacagagccatgatggtgccgctgcactccagccagcctggcgacagagcaagaccttgtctcaaaaataaaaaataaaagaaaaatgggaaggccagtttggcaggagcagsaaagtttatgtagggaaatagcataaattaggattggaggggtggattgaagcaagattgtgctttgaatattaaaccaaggagtttggaaattatctctgaggggtaaagaataactgaaaattgtgagcaactttgtacctttattcctactttaagtcacttatttatttacttattttattttattttatatcttttgagatggagtcttgctctgtcacctaggctggagtgcattggtgtgatcacggctcactgcaacctctgcctcccaggttcaaacaattctcctgcctcagcctcttgagtagctgggattacaggtatgtgccaccatgtccagctagtttttgtatttttagtagagacgggtttcaccatgttgacgaggctggtctcgaactcctgacctcaagtgatccgcctgtcttggcctcccaaaatgctggaattacatgtgtgagccaccgtttctggcctactttaagtcttatatgaaacttccagatgttgtttttaatgtttttggtgcagtgtgtttattttagttaatttttttttttttttttgagacggagtctcactctgtcgcccaggctggagtgcagtggcgcgatctcggctcactgcaacctcctcttcctgggttcaagcgattctcctgcctcagcctcctgagtaactggatttataggcgcgcaccaccacacctggctcatttttgtattgttagtagagatggggtttcacaatgctggtcaggctgrtctcaaactcctgacttcatgatccacccgcctcagcctcccaaagtgctgggattacaggcttgagccactgcacccggccttgttaatatttaatgacaatttatattgttcacatcttcttttcccatccaccaaaggactacatccttgttctgtgttatttctaccttttgttttgaagcctctaataagaatatgtcattgaaatacctccttttcatttttttaagagacagaggtctcactatgttccccagggtggtcttgaattcttgggctcacatgatcctcccgcctcaacttcccaaagtgctgggattacaagcgtgagccaccaggcccggcccattcttacattcatttagcaagtacatactgaagtcttgtgatgtgccaggctctcttatggtcagtgatgactgcaagggaaccaattaggcaaaaatctcttttcttatggagttcagattttcttacagagatggtcaatacatgagataaataagtaaaatgtatagtatgctcagtgctaaggagaaaaaacaatgcagggaaartgtgtggcatagtagaggctgaaatcttacatagggtggccaaactcactgaagaacatgatactttggtaaagacctaaaggaagtaagaggtctgggatggtgagcaagtgcaaaggtactaaggtagaagtgtgtctggcacgtctgacaatacggctggagcagaatgaatgagggagagagtaatagagtgactatatgttcttgtttatgtctgttgtcttgaaattattgatactgcctacttttactcccaatagagtccagatattgagtgatgaattatatggtctcctggtaataggaggtgaggtaggagaggtaaggtggtgaggagcagataatggagagctgagatgaacatttgcaggattttgaacacgggagccctatgatttgactcatgctttacaggcttactctggctgctgtgttcatagtagactaggagcaaagactgaagcatagttagttaggaaactattgcagtaatccaggtgagatatgtggtgctttgggacaggatggtagcagtaaaagtgttgagaagtagatagattctggatgtgttttgaagatacacatcaggatttgatatggattgggtataggatttacgagaaagaagggagtcaagaatgatagagtttttggcctgagcagttggaaggatggaattgccattgattgagatgggaaaggccgtctttttgtggggagggaagcaggtgttttttaggggaagatgaggtcagttttggacatgttttaattttgagatgcgtattagacaacccaagggagatgttgactaggcagttgcatatatggatttggcattcaggggaaagggacagactggagatattaatttgggaactgttatcactttgatggtacttaaaaatgattgagactgaatgagattgcctaggaagtgagtttagttagaaaagaaaaaggtctgaagattgagccttggggtaatttatccagtgtttcaaaatcagggagataagggaactaacaaaggagatagactgagtggagaaggacaggagcaaacccatgagaatgtgggtgtcctagaagtcaaagaaagtttcttaaagaggagagaggtcaaccatctcaaatgcttctgttaggtcaggaagaggaggaatgatatttaccatggatttagtagcatgtttattgttgaacactagtagttttgagtagtggagcaaaactgatgagtgcgggtttaggagtggatgagaggcaagacacctctttgaaagagttttgttgtaaagggaaggagaaaaaatggtatggaagctgagaggggaaagtgaagtagagagatttctttttgtataagatgaaaaatgacagcaagtctatatgttggtgaaaatgatccagtagagagaaaaatatgaacgtggggaaagggtggctggatttctttagcattgcttttaagtaaatatgaagggaggaagccagtgttcaagtgaggattggcaatgaccagtagaaaagcagttcattcaaagtaaaagcaagtagaaagagcatagatgtagataagtcaatgtaagtatgatactgtgagcttgtggaaagtctctttctcattgcttcatttttctcaatgaagacaaaagcgcggagccgaataaggataagggaagaggtgttggaagtttgagaagaggaaatgatatgaattagctgccttggagagtgggacagtgggggatggattgggaaaatacagtgtgcatgtgtcacaacagtaagcgtccatctagggtttgtgataatggggttaaagtgataatagccagacatggtggctcacacttgtaatcccagccaaagccaggaatatcacttgagcccaggagtttgagaccagcctaggtaacacaatcagaccccatctctacaaaataaaaatttagctggatgtggtggtgcatgcctgtggtcccagcctctggatgctgaggtagaaggattgcttgagctggggaggtcaaggctgcattgagccgtgatcacattactacactccagcctgggcaacagcragaccctgtctcaaagtaaaaaaaaaaaaaaaaaagactgggcataatggcttcatcccagaactttgggaggccaaggcaagaggctcacttgagcccaggagtttgggaccagcctaggcaacatagggagacctcatctctcaagaaaaatagaagaagatagctgggtgtgatggcacacacctgtagtcccagctactcaggaggctgaggagggaggattgcttgagcctgggaggttgtggctacagtgctgtgatcatgccactgcactccagtgtgggcatcagagaaagaccttatctaagggaagaaaaaaaaggatactagcgttgtcatgtgtgtgtgtttccccagctacatgtgtggatgaggcagaacatttgatttaactgggattgcggtttagtctagtgaggagggcaggttgagggtgcattcaaggaagtgattataatgattggccatgggatttacactagctaggtaaggagggaagcaaaaacaggaagcaggtgaaggttagttaaaaaggtggtaagatcaatggcttgaaagtcttgttgtggggtcatatgattgttggagttgtgtggtgttggagaagtaagaaaagactgtagtatgtgcctgcaagagagggaggatgataggtggtatggtttaatgaaatgagattcaaagctggggtttttaatggtggagggaggaagagtggtgtgaaagtggacccatagtgtgaaggatatgggagagaaaacagccttacctaagaggtctatagaggaagccatgttcccatgggaaagccagattttagttaaggcaggaaggtaaagagaacctctccagaaaaggttcaagttacagattttctgataattgaacttgtgttccaggagccactgtgaaaaggattgaagaggtaaggaggagcaggaggtgagataggaagaggtgatgtacaaagctatccaggtgccaggcacggtgactcacacctgttatcccagcactttaggaggctgaggtgggaggattgcttgagcccaagagtttgagacctgagcaacatggtgagactctgtctccacaaaaagcaaattttaaaaattagctggctgtagtgtcatataactacagctactcgggaggcggaggtgagaggattgcttgagtctgggagatagaggctgcagtgagccatgataccgccactgcactccgcttggatgacagcaagaccctgtctcagcaaacaaaacaaaaccataagacaacaacaacaaaagaaacacaaagctgtttagagatttggttttgcaggataaaggatgacctggaagttctgactttattatgattgacatgaacagaaataaagggcagactaaactaagacttggtggtccagggtagatttttttttttttagacactcttgccctgtcacccaggctggagtgcagtgttgtgatctcagctcactgcaacctctgcctctcgggttcaagtgattttcttgcctcagcctcctgagtagctgggattacaggtgtgcaccaccaagcccggctaatttttgtatttttactagagggatttcaccatgttggccaggcaggtcttgaactcctgacctcaagtgatctgcctgccttggcctcccaaagtgctaggattacaggcgtgaaccaccacgcccggctggtccagggtagattttgatggggttggcagtaagggctgagggaatggagaggagaagatcttcttgccaaatacatgcaggattttctggggcttccatttggcttctgatactggaagtatggagtattaattaaggggagtcttaattgagcacacaggctctcctgacttctgcagatgttttaatatattctggcactattgggaaatcattaatggctttcaaaaggaattctggagggattgggaaggattatattaactgttgctttggaaataccaatctgacagtgtagggtaggttggagagagaagaaacttgaagtataggaacatgttaggaaatttttccagttgtcatggatttatgatatggaatttggttatttgcagaacaattcaaaaggaaaggaccaatgtgagagtagaacttggtgacagaccttgctgaggagaggatggttcctgagtttggagtctaggaacctgtttgtgccatgacagaaatagaaaagtctgaaagagttgctggttttagaagggagattgctatgctctaggatatgtttgaatcttgggtgattggactcttaggtctcctttcatcatacctgtagtgacttgtaatttccttgttcttagcttcacagttgactaagctttatgaggacagagattgtgtctgttttgttctgtattgtcagtgcctggcacagtgaatacatttcagaaataattgctgaattaaagtagagaaatggctttttttttttttgagatagagttttgcttgttggccaggctggagtgcattggtgtgatctcagttgactctaacctctgccacccgggttcaagcgattcttctgcttcagcctcccgagtagctgggatgacaggcagctgccaccatgcccagctaattttatatatattatatatatataatataaaaatatatatattatatatataatataaaaatatatatattatatatttatattaaatatatatttttatattttatataaatatatattttatgtttttataaaatatatacatttttatattatatataatataaaataaaatatataaaaatttttatatttatatatgaaatataaaaatatatatatatataaatatattttatatatatatatatatatatatatatatatatatatatatatatatatataagtttttgtttctgtttttgtttttttgagatggcgtctcactctgttgccagtctggagtgcagtggtacagtctcagctcactgcaacctccgcctcctggcttcaagcgattcttctgccctagcctccctagtagctgggactacgggtgtgcaccaccatgcccagctaatttttgtgtttttaagtggagatagggtttcaccatgttggtgatctcaatctcttgacctcgtgatccgcccacctcggcctctgaaagtgctgggattacaggcgtgagccactgtgcctggccaatttttatatttttagtagagacagggtttcacagtgttggtcaggctggtctcgaactcctgatctcaagtgatccacccgcctccacctcccaaagtgctgggattacaggcatgagccactgcgcccggccaaaatggctttttttttttttttttgagacggaatctcgctctgtcgcccaggctggagtgcagcgcgtgatytcggctcactgcaaccttcacctcttgggtttgagcaattcttctgcctcagcctcctgagtagctgggactacaggcgcgtgtcaccatgcccggctaatttttgaattttttagtagagacggggtttcaccatgttggtcaggctggtctcaaactccagacgttgtgatccacctgcctcagcctcccaaaatgctgggattacaggcgtgagccaccgtacccagctaaaatggtttttttttttttttttcaaactttcctatggtgctgagagaaatggcttttaataaacttttcaattctgaaattctgtcttgatattcagatgttttgcaggtagaggaaataaagaatttaagctcagtcaagagataagggctggagacactatgttttgtgtggtatttgggtgtaaactcaaatgaagtagatgtcatcagaagccaaataaagttctataaaaaccaataggtaacaggaactttaaggagtaaatttttaacagaactagaaattaaagtagatgttactgacaaaatgtttagattagttgattgagagcaagtgcttctttcgagtcagacagaactgagtttgtttgaatcttgacttagctacatactagatatgtcaatacttttctcaactgtcaaatgaggataatgagagtacacctgtcacagggttgtaagagttcaattaggaaaaagaatagcagagtacttggcataactcctaaataaatgctagtttgatattaatattattattgttagtttgatggtcatgttattgttacttttcaggaaacaaactgatttatttcctaatgtctgtacttttctgttgtcttcagtattgtaaaaattttcctacttttagttattcatgtctaaattttatttaagctattcctggtgaccctgaactcctctgatattatagtggtgtcttagaaaagcagaacaaattggtatactttttaaattatcaaacccttttcctcaatctttttttttttttttttttttgggacagggtctggctctgtcacccaggctggagtgcagtgacacgatctcagctcactgtaacctccgcctcccgggttcaagcgatcctcccatctgaccctcccaagtagctggcattcaggtatgcgccaccacacccggctagtttttgtatttttagtagagacggggtttcaccatgttggccagactgatcttgaactcctgagctcaagtgatccgcccacattagcctcccaaagtgctgggattacaggtatgagccaccatgcccagcctcatgtgttaattttttaacgtaaagttgtgtttgaagactttaatttctaaattgcatgaattggctcatattttgctgtgtcattgaaaacattttatgttctctttctatcttgaacaatatttcaattgtaattaggttgtgagctccttgagattaggcgatttggctaggctccagcgaaactcagtcatatatttgttcaattacattgaattaagcagcaagaaaggcacagtttgagaatttctaaagtattttaccccattttttaattatgaaaaatttctaacatacaaaaaccattgaaagatagcacagcgatcattatatacctaccacctcagttcaacagtttatatttwgctatatttaaaaaaattctcttaatgtttttgctgaaccatgtacaagttgcagacatcctaacactttctttctttcttcctttttttttttttttgagagagagtcttgctttgttgcccaggctggagtgcagtggcacaatctcggcccactgcaacctccacctcccgggttcaagcaattctctgcctcagcctcccaaagtgctgggattacaggtgtgagccaccacacccggccacatatagttcttaggtttttttttttgttttttttttttttttgagatggagtcttactctgtcaccagactggagtgcagtggcgcgatctcagctcactgcaacctctgcctcctgggttcaagcaatgctcttgcctcagtctcctgagtaactgggattacaggcatgtgccaccatgcccggctaattttgtgtttttggtagagaccaggtttctccatgatggtcaggctggtcttgaactcctgatctcaggtgatccccttgccttggcctcccaaagtgctgggattacaggtgtgagccactgtgcctggcctttttttttttttttctcctatttttttggagacagtctcgttctgttgcccatgctggagtgcagtggtgcgatttcagctcactgcaacctctgcctcctgggttcaagtttctcctgtctcagcctcctgagtagctgggattgcagccacctgccaccacgcctggtgaatttttgtatttttagtagagacagggtctcaccatgttggccaggctggtctcaaactcctgacctcaagtgagccacctgccttggcctcccagagtgctaggattacaggtgtgagccaccgtgcccaacccaagaaattttttgctaacttgatgactgtctgctgcccagacacacaatattatgttttgttatctgtgccacaggtatttctgttgttgatttaacatttgtgatctggcacaaattctagattcaagggcatagcttaaataataatgctttaaaatatgtgtgctatttgtatcagtttgtttagctgctagataaataagagtagtgagatttcatttattcctttggcaaatatttattcaactcctgctgtgaactaggccgtctcctagtccctgaaattacagctgtgaatgaacaaagcaaacaaggcttggccctgctgtcacttaccttctagtggggaagcctcacaataagcacgattaacatgcaggtagatatctgtaatataatgctagataggggcagtgcttttttaaaaggccagaagagggattaggaagttatattttctattttagaaggagttgtctgagaaggcctttctaaatacacgtttgagtggagagatctgaatggaatgaagatactggataaccttccagacagagaggtcagcaaatgtggacactttgagagagggacatgcttggcctgttcaaggaacagcaagaaggcagatgttctggagctgtgtgaactagggtgggattgtaggagaggaaattggagaagtagccaggggtagatcatataggaccttcagatttcattctatcatgaaataaagcctgtggatggtttccagtaggggaatgaagtgatctgacttaagttttgttttgttttgttttttgagatagagtctcactctattgcccaggctggagtgcagtggcatgatctcacctcactgcaacctccgcctaccaggttcaaacaattctcctgcctcagcctcccgagtagctaggactacaggtgtacaccaccacacccaactaatttttgtatttttagtagaaacggggtttcatcatgttaaccaggctggyctcgaactcctgacctcaggtgatccacctgccttggcctcccaaagtgctgggattacatgcgtgagccaccgcgcccggctgtgatctgactttttaattcactatgctatgtagagaacagactctagaagtacaagaaaggaagcagcgagatcacttaggatgtggtgattatgcacctcctagtgagaattgatgtgattagcaatggaggggggaataagtagtcagattttaaatatattttgaagatagaatcaacaggatattttgattgtgattagaaagagcacagtcaaggataactctggggttaacaaatagacattgtatttgaggatatacacagggtttacagcacctgtctctaagcggtggccttagcagtgagcttttttttctttttgcttatctgtatttaccaatttttctatgctgaacctgtaatacttctgtaataaaaagatagagattatttgaaaattagagttaaaagtggcatcaaatgtaacctaattttttttttttttttttttttttttgagaacgattcttgctctgttatcaggctggggtgcagtgatgcaatctcagctcactgcaacctctgtctcccgggttcaaggaatccccctgcctcagccttctgagtagccgggactacaggcgcgccccaccgcacctggctaattttttgtgttttagtagagacaggggtttcaccatgttggccagggtggtctcgatctcttgatcttgtaatccgcccgccttggcctcccaaagtgctgggattataggcatgagccaccgcgcctgcccaaatgtaactgaattcttaaagtattctcctgtcccttttgattttagaaaagaacttaagtgacatacataaactttaaatctttatctttttactcttagtgatcagcctttgagcctttcccacattgaagatggtgaaactagatattcatactctggctcatcacctcaagcaggaacgcttatatgtaaactctgagaaacagctcattcagaggctcaatgcagatgtacttaagacagctgaaaagttgtatcgtacagcatggattgcgaagcaacagagaatcaatttggatcggcttatcataaccaggtaaagagatgattttcaggttttaagttttgtgaaccactatgattctgtaaataaattagtaactataaataaatgaatctgtttccaacaaagtgcattatttaagataatttacatcaatgttaaggtgagtctttgcttataatacagtttatttggattattaagtaacttaggcacttttatagaaaattgtaacttaagcattgacattttatatcacaccaattggttttgtgtctttgtctatataaaatgttattgttggctgggcgtggtggctcacacctataatcccagcactttgggaggccaaggcgggtggatcatgagggcaggagtttaagaccagcctggccaagatggtgaaactccgtctctactaaaaatacaacaattatctgggcattgtggtaggcgcctgtaatcccagctactcgggaggctgaggcagagaattgcttgaacccgggaggtggaggttgcagtgggccgagattgtgccactgcactccagcctgggccatagagcgagactctgtctcctcaaaagaaaaaaaaatgttgttgtagagagtaaattatctgttctgcttttctcctaatattatttaatatataggtttccagctgggtgtggtggctgacacctgtaatcctagcactttgggaggccgaggtgggtggatcacgaggtcaggagttcaagaccagccaggccaagatgatgaaaccccatctctactaaaaatacaaaaattagcggggcatggtggcatacgcctgtaatcccagctactcgggaggctgaggcaggagaatggcttgaacccgggaggtggaggttgcagtgagccaaaatcgcaccactgcactctagcctgggtgacagagtgagactctgtctcaaaagaaaaaaaaaaaaaaaatatatatatatatatatatatatatatatatatatatatatatatatatatatatgtatttccatgttttgatattgtatagctatttttcgggtttagaaaccacattttattgtcttaatacctacgaagaacatttattttattttattttttttttgagttggagtctcgctctgtcccccaggctggagtgcagkggcacaatctcagctcactgcaacctctgcctcctgggttcaagagattctcctgcctcagcctcctgagtagctgggattacagacttgtgccaccatgcctggctaatttttgtatttttagtagagacggggtttcaccatgttggtcagactggtcttgaacttctgacctcgcagtctgccccctcggcctcccaaagtgctgggattataggtatgagccaccctgcctggccaagaacagtttttaactctaagaatatcagtgctgttgagaatataagccagatgcaaaagaatacatactgtatgattctatttgtatgaagttcaaaaagagrcaggactgatctttgatgacagaaatcagaataatggttactttttgggcttgagagggtggtattgactgggaaagggcacgtgaaagcgttcttgggtttttaaaatgtwccatgtcttaatctgagtggtgattactgggtgcatgtatgtgtaaaaattgttcaagctgaacacttgacatttgtgcactttactgtattttacctcaataaaaatgagtttaaaaaaaaaaaagaacagtgctgttgtgggcattgtggttttttccccacatcttttaggcttattttatttggatttgtttccagaagcaaaaagcctagttaaaggatgtgattctgcaggtcattacatactggcatgttgctgttgagaatggttgagcaatatgctgatatcgacttcatttttattattttttagtacttgagtatttgtaaactttcttatgtccataaataagcataagcagtttaactgtagctgatttttttttttttcagacaggatctggctgtgtcgcccaggctgaaatgcagtggtatgatcttgagtcactgctgtctcaagctcctgagctcaagcgattttcccacctcagcctcctgagtgctgggcctacaggcacacgccaccacatctagctaattttcatatttttttgtagagatggggtttcaccatattttccaggctggtcttgaactcctgggctcaagtgatcctcccaccttggcctcccaaagtctgggattacaggtgtgagccactgtgtccttcctgtagctaattttaatttaatccataagagggcagctctggacagtttttaggatctacaaactgataattttctttctttctttctttttttttttccagacagagtcttgctttgttggccagggtggagtgcggtggcatgattgcagctcactgcaacctctaccttctgggttcaagtgattctcctgcctcaattttccaagtagctgggattataggtgcctgccaccatgcctggctaatttttgtatttttagaagaaatgggagtttcgccgtgttggccaggctggtctcgacctcctggcctcaagtgatttgcccgcctcggcctcacaaagtgctgggattacaggtctgagccaccgcacccagccccaatacttttcattgattctgatttgataagaggaaattgtcctttgtactttttagttttgttgtcctttactcattgagttgctgttagtttaaaaaattttagcaattcagagtgacctcattgttgggaccataatcaactcacatatccatgtttggatatagtatatgtgttattattattaatactattattttgcttgtttgctctttttttttttttttttagtgctgaagcttcccctgctgaatgttgccaacatgccaaaattttggaagatacacaatttgttgatgggtataagcaattgggatttcaggagactgcttatggagaattcttgagtcgattgagggaaaatcctcgtcttattgcctcctctttggttgctggagagaaacttaatcaggagaacacacaaagtgttatttacacagtttttacctccctgtatggcaattgcatcatgcaagaagatgaaagctacctccttcaggttttgcgatacttgattgaatttgaacttaaagaaagtgacaaccctaggcgacttttgaggagaggaacttgtgccttcagcatcttatttaaacttttttctgaaggactgttttctgccaaacttttcctcacagccactttacatgagccaattatgcaactgcttgttgaagatgaagatcacctggaaacagatccaaacaagctaattgagaggttctctccatctcagcaggaaaaactctttggagagaagggctcagatagattcaggcaaaaagttcaagaaatggtggagtccaatgaagcaaagytagtggctttggtgaacaaatttattggttatctcaaacagaacacatattgttttccacatagtttaaggtggatcgtgtctcagatgtacaaaaccctctcctgygtagataggctggaagttggggaggtcagggcaatgtgtactgatctcctgttggcctgcttcatttgtcctgcagttgtcaatccagaacaatatggaataatttccgatgctcctattaatgaagtagcacgatttaatctgatgcaggtatgcttttgctattattattaacgtggcatttagtttaaaattcagttgattgggctgtgggggtgggaacaaataatacgatgacagtatttgtatattcttacaactttttctcaaccagtcctaagtatttgcatcttattaaataaaagcagtaatactgggatttaaaattattgcggtcacaaaacattttgtctttgtctgttttttgagacagggtctcactctgttgcccaggctggagtgcagtggcgcaatctcagctcactgcaacctccgcctcccgggttcaagcaattctcctgcttcagcctcctgagtagctgggattacaggcgcacaccaccgccctggctaatttttgtatttttagccatggggttaaaatttaggtcaggctggtcttaaactcctgacctcagatgatccgcccacctcggcttcccaaagtgctgggattacaggcgtgagccaccactcctggccttgggtgattgttaaaaaatgattagctcaagctgggtgtggtggctctcacctgtaatcccagcactttgggaggccaaggtgggtagatcgtttgacatcaggaatttgagaccagcctcagcaacatagtgagacccccaactgccccatatctattaaaaaaaaaaaaaattggccgggtgcggtggcttacgcctgtaatcccagcactttgggaggccgaggcgggcggatcacctgatgtccagagtttgagaccaacctgaccaacatggagaaaccccatctctactaaaaatacaaaattagccaggtgtggtgtcacatgcctgtaatcccagttacttgggaggctgaggcaggagaattgcttgaacccgggagacagaggttgcgatgagctgagattgcaccgttgcactccagcctgggcaacaagagcgaaactccgtctcaaaaaaaaaaaaaaaatcagaaaaaatgattagctgtttttaatgatcagttatatcaccttgggatgtttagcaattcactgtatagaaatgcctgaaataaaatttttaactttttttaatgtttataaatttaaaaaaattataatatggaacacttcacaaatttgtgtgtcatccttgcacaggtgccatgctaatcttctctgtagagttccaattttagtatatgtgcttctgaagcgagcacaaaatttttgacatgaaacagtaggtttttttttgtttgtctgtttgttttgagatagtctcactctgtcacccaggctggagtacagtggtgccatcttagctctctgtagcctttgaactcctgagctcaagtgacccttctgcctcaccctcctgagtagctgggactacaggtgtgtaccagcacacctcgctcatttaaaaaatgtttttgtagagacagggtcttgctttgttgtccaggctggtcttgaactcctggcctcaggtaatcctcctattttggcctctcaaagtgctgggatcataggcgtaagctactgtgcctggcccatgaaacacttaaatttattcttatggtagataatgtatttgtagttttttttgtttgttttttttgtcattccagtagagatcaaattacatattttcagaatcagtaaaaagggggcttgtcccagatattaagaagaggatgttgtaataactttcatcattagcctttaaaaagagtgcagtaacaaattttgccagtaaggtacttgttctatgaattagtatttactttatcaaaccagcttatgttaggaatcatttgcttttaaatctagggaaaaaattataccttgattgctttgtgaacgctataaggtaatgttcttaatattaacttaaggcaatttaatgaatgagtcagcttttacaaattaatttaaaaagctctaaacaaatgaaaagtacaatgtcagaaacaaatgtattgtgctttttttccctaatgttgatatcttatgtgttaaagagaaattaaagcaaaaatttatactttctctaactcttaatctaaaaatagtaaaagctgacataaggtacacattttttgggggatactatttcatatgcctggtcaggtgatatgaatagtattatgaaacagatttttagaacagaatagacgtgcttgctttcatagagacgtatttgtgagyatctgtctgtagcttatgtctccctaccactgctttgggttgcaggtaggccgccttttgcagcagttagcaatgactggctctgaagagggagatccccgaacaaagagcagccttggaaartttgacaaagtaagaataaatatgatttatagaaaattctgaagtattagtgagcctaactgttctctttattaaatcttgtccttaggtgatatctaaattaaatgttcttttaattagctacagtattggatcagcagcatttaaagatgattaattcccacagatgtattgaggagatgccgtcgtaagagaatcaaagagctgttaagattattttattttaaaaagtttttttttttttttttttgagatggagtctcgctccgtcgcccaggcggagtgcagtggcatgatcttggctcactgcaacctctgcctccgggttcaagcaactctctgcctcagcctccccagtaactgggatcacaggtgcctgccactacacccggctaatttttgtatttttagtagagacggggtttcaccttcttggccaggctggtcttgaactcatggcctcgtgatccacctgcctcggcctcccaaagtgctaggattacaggcgtgagccaccgcgcctggccaacttttaaattttcgagtcagtgtctcactctgttgcccaggctggagtgcagtggtgtgatcatggctcaaactcctgggctcatgcagtccttgcaccttagcctcccaagtacctgggctataggggcacaccaccatgcccggctaagtgtttttattgttatagagacgaggtcttgttatgttgcccagactggtcttgactcctggcctcaagtgatcctcctgcctcagcattccagcgtgctaggattacagatgtcagccaccatgcctggtcgataattgtttaattttaagtgtagtttataagttaacatctatgacattgttcaattaatatagttaaataaaattttaatcagtcttactttgattaagctgtacattcaaccaatgaaaattcaaggatatttgagtaaaatttcccttccacatctcatctctagtcttcattccctgcccccacaaaacattctttttttttttgagacagagtttccttcttgtcacagaggttcgctgttgtcacccaggctggagtgcagtggcgtgatctcggctcactgttaactctgcctcccaggttcaagcaattctcctgcctcagcctccgagtagctgggattataggcgtgagccaccacgcctggcccccaaaagattcttgatgttattaggttgtttttccttctagaggtccatatgtttacaggcaaattcctacgtacactatatacttccaaccatcccttcctttccctttcagaaatagtagcacaatgtgtatactgttctgtgttgtgttatgtttgtctccaacatcttattgttattttcttttttttttgagacagggtctcactttgtcacccagtgatgccatctcagctcactgcagcctcgacctccctggcgcaagcagtcctcccacctcagcttcccaagtagctgggactgcaggtgcgcgccaccacacctggctaattttggtatttttcatagagacaaggttttgccctgttgccccaagtggttttgaacttccgagctcaagcagtccacccaccttggcctcccaaagtgctgggattgcaggcatgcactaccacacccagctccaagatcttagactatatcagtacaaaaagagtttaatttttttaggttgggtgcagtggctcatgctggtaatcctagtgctgagcgcactttgggaagctgaggtggacggatcacttgaactcagaagtttgagaccagtctgggcaacatggtgaaaccccatctctacaaaaaatacaaaaattaggtcaggcggggtggctcacatttgtatttttggcactttgggaggccgaggcgggtggatcacctgaggtcaggagttcaagaccagcctgtccaacatggcaaaaccccatctctactaaatatacaaaaattagccgggcatggtcrtggcacctataatcccagctactcgggaggctgaggcaggagaatcacagtgggggaggaggtgtgcagaggttgcagtgagctgagatggtgctatttcattccagcctgggtaaaagagtgaaactttgtctcaaaaaaaaaaaaaaaaaattcaacatcttaaaaaaatatgatttttaagatgtttaaattttttcatgcttgtccaccttaatgagaaatttcgttccagtattttaaagggaaatgtttcactgtttttttcctgttttaacagagctgtgttgcmgctttccttgatgttgtgattgggggccgtgcagtggagacccctccattgtcttccgtcaatcttctggaaggattgagcagaactgtggtttatataacctacagtcagcttattactctggtaatggcttcattgtttaagagaatttctcgaaagtcttttagctaagcrtgagcaaaaacatacatgagtacattgtgtgggaaatacatattgtatttgaaaaagtgatttcattagctaatgttytttgcttttgccaggtgaattttatgaagagtgtgatgtctggagatcaactgagagaagatagaatggctcttgacaatttattggcaaacctacccccggccaagccaggaaaaagtagcagtttagaaatgactccctacaatacacctcagctatctccagcaaccactccagcaaataaaaagaatcgattacctataggtaaagagaatttctcgtattggagctttctcttaaatctaatatttcattagcctttgttattgctsagtgttttggaacatatgtttaagtacttgggaaagtctttctcttcatgtttactgatggtatttcagtttttagaaatcgtatcagattagttaaggtttatcagtagtctttagctttgcctacatacttttcataattaattgaagtcatgctatccacagtatactttctttaaattttattgtcttttcttgaaaaaattttggaaatgttataagtagtcatctttaaaactatgtagccctcagcctggtgtggtggcacgtgcctgtggtcccwgctacttgggaggctgagatggggagattgcttgagcctgggaggtcgaggctgcagtgaaccatgattgtgccactgcacttcagcctgggtgacagagtgagaccctatctcaaaaaaaaaaaaaattatgtagccccctcctttctacaaagttctaaataatataataaacaatattattttagaagtttccatcaataaagtggaaaataatagtattttctattattttcattaayaatcagtcttttatcaactgagctaagatatcttaatrttacaaaatgaagcaaaagtttcattttattttttcaagtttgtttatttaagaattctatttaattaagccttatttgcttggttaacatttgctatctatctgtctataaaaaaattaattgagcatataccatgttccatactgtgggtaggcactttataaatgttgtttcatttaatccccacagaagtcctgtgagagtggatgtgtcttgcacatgargcactgtgatagacactggatacaaagaccattaggacctgcccttactgtcaagttggctgttgatagtttagttagggagagcaagaagagactagtacccttcagcatactaagcgttctgaggagataaatatgagggttatggtgacacctaacttagccaaaatggtagtggtatcaggagaagatcttggagcaggtgaagtctgtttgcactttgtgatgaatgggagttagacaaagtaaacaagatgaggaaaaagtgtttaagccaggggaacaggagtattttagtgcctgcctatttataacgaggaactcagcaacacttagtgaacatagttctttttaatttatgcattttgaagagagggattttacttttaaacttctgtgagctaattttttaagaactgccagtttcttaaaattaatctaccttatatttaacgtaatgtggaattgtatcaacaggagtgtggcatcatactcttcaagtctttgtcttattgtatcaccccaaaatgtcagttttcaaaataaaaaatagaaaaagcgattttacacttattggtgtttttttttgtttgtttgttttttgtttttttttgagatggagtccccctcttgttgcccaggctggagtgcagtggcacaatcttggctcactgcaacctctgccttccaggttcaagcgattcttctgcctcagcctccccagtagctgggattatagatgcccaccaccacgcccggctaatttttatatttttggtagagacagggttttgccatgttggccaggctggtcttgaactcctgacctcaggtgatccacctgcctcggcctcccaaagggctgggattacaggtgtgagccaccgtgcccgggcacttaatggttttttgtgggctatttgcactctgttcacatgatgaagtaaatgatttttagtaaatcagagattttttctccattgttgactgctatacattagttttttcatttcccgttatccaaaagtgtcattaaatatgagtctgatggaaagtgaatttcaaatgtatgcccaatattattttgtatagtcttgttacctggctattgcatttatttcgtatcttaacaaatctgtccattgttcagagggttgattttctttctatttaatgcttttgcaacccaggacaacagttagcagccatcactgcctgggattcctcagctaccaatattacctctcatattacastagtaaccccgtttggtgggtaataggctgttcttcctcttcttttataattttatttaagaaatagtttataaaagtatgctccatgtgcatgttgcttttactttatgtaaattgctacataaaatttgattgcttgcatttttataaattatagttacagagtttgttatgattcatagatctgtttatgaacttgaatttaaatttgcaattcagtaaaagatagggtgagcaaataaaggtatgagtaggcctattttagacttggaaattgatgtgtgctctgaattttcagattaaaagtgattaatgaacattaatcagcattgtaaagaaaggtgattgtttatatttctgcctctgtcttcaagtgggtcagctttcatacaatgtgaagttgacttttgctgctactatagttgtttttgcyttatgtctgtattttttattattttgtaccaaaacataatttctatttagtattctggttgtactgaattttattgtcttctgaaagaaaatagaaactttttttcttgatttttttttttttttttgaggcggagtctagctcttgttgcccaggctggagtgcaatggcgtgatctcggctcaccgcaacctctgcctcctgggttcaagccattctcctgcctcagcctcccaagtagatgggatcacaggcgtgtgccaccacgccagctaattttgtatttttagtagagatgggttttctccatgttggtcaggctggacttgaactcccggcctcaggagatccacccacctcagcctcccaaagtgctgagattacaggcrtgagccaccgcgcccagccttcttcttttttttttttttagacggagtttcgcttttatcgcgcaggctggagtgcaatactgcgatctcggctcactgcaacctccgcctcccgggttcaagtgattctcctacctcagcctcccaagtagttgggattacaggtgcctgccaccatgcccggctaattttttgtatttttagtagagacggggtttcaccatgttggccaggctggtctcaaactcccgacctcaggtgatccacctgcctcagcctcccagagtgctaggattacaggtgtgagccactacacccagcaattattttagaaaaaaatatttttcatctgcttatacacaggggaaagaaacaaaaataattgaagcctttattaatttatactgtttccaaagcagaaaggacctcttctccaaacataaataaattttctctcttttatctttgaaaagacattaatgcatttcagggggggaaggtacatttaaaaactgattctgggctgggcacggtggctcatgcctgtaatcccagcacttggggaagccaaggtgcgtggatcacctgagatcaggagttcaagaccagcctgagcaacatggcaaaaccccgtctctactaaaagtacaaaattcaccaagtgtggtggtgtctgcctgtaatcccagctacttgggaggctgaggcaggagaattgcttgaacccaggaggcggtgatcgcaatgagccgagactgcgccattgcactgtagcctgggcaacaagagtgaaactccgtctcaaaaaaaccaacactgattctggttttgttaacagttgcctaacttaaagtatcctatttatgtggctattaggttttcatataaaattttctttattgtttctttttttttttttgagatggagtctcactctgatgcccaggctggagtgcagtggtgcaaacttggcccacttcagtctccgtctgcctggttcaagtgattctcctgtctcagccccccgagtagctgggattacaggtgcatgtcaccatgcctggctaattttttgtattttagtagagatggggtttcaccgtgttgccctggctggtctcgaactcctgaattcaggcaatccacctgcctcagcctcccaaagtgctaggattacaggagtaatccctcatatgaaattttctaatgcttgtaagctcagttattggtatgggagacctgtagcagttacatcaatttataggaaaaatagtgaaggtatcttaaaaagataagaaatgaggtaatgcttttcttgtcactccaagtcttaaatttattgtgacatgtttgctgttctgcagatgtgatcatctgtgtggcacttcctgtcagatgcacttggatcattgttcttgattatcagttttgaaggagaatctttattagtcagtagagtaactgggaggatctggtttgttttgttttgttttgttttttcttatttatattttttaccactcttgtgcatgtgcaaatgttctgcactaatagaaaatatattcatatttagcataccattttcttcatttgtctatttctctaaattattttatttgaaattttttattagcaactcggagcagaagccgcaccaatatgctaatggacctacatatggaccatgaargatcatctcaagaaaccatycaggaggtgcaaccagaagaggtgttggtcatttccttaggtacaggtccccagcttactccagggatgatgtcagaaaatgaggtatgaatcagttgcttctataaatcaatattcatgtcttagtccatacaggctgctgtaacaaaacaccagaggttgggtggcttataaacaacagatatttatttctcacatttgtagaggccaggaagtctatagtcaaggcagattcagtgtcttgtaaggatctgtttactggttcatagatgatgtattcttgctgtgtctttgggcttatttttttttgagatggagtgtcactcttgttgcccaggctggagtgcaatagcacgatctcagctcactgcaacctcccaatcccgggttcaagcaattctcctgcctcagcctcctgagtagctgggattacaggcatgcatcaccatgcccagctaattttgtatttttagtagagacagggtttctacatgttggtcaggctggtctcaaactccccaactgaggtgatccgcctgcctttgcctcccaaagtgctgagattacaggtgtgagccaccgcgcctggctggttgggctattttataagggcacttattccatttgtgagggccctgccttcatgacctaatcacctctccaaaggcccgatctccaaataccatcaccttgggggttagaatttcaacatacagattttgggggagcacaaacattcagatcctagcaatgaatttttttttttctttttctttttcttttttttttttttgagacagagtctcactctgtcacctaggctggagtgcagtggcacgatctcagctcactgcaagctctgcctcccggattcacactgttctcctgcctyagcctcccaagtagctgggactacaggtgcccgccaccacgctcggctaattttttgtattttcagtagagaaggggttccaccgtgttagccaggatggtctcgatctcctgacctcgtgatccacctgcctcggccttccaaagtgttgggattacaggcgtgagccaccgtgcccagccatttttttctttttttttgacatggagtgtcactctgttgcacagctggagtgcaatggtgcgatctttgctcaccacagcctctgcctcctgggttcaagcaattctcctgcctcagcctcctgagttgctggtcttacaggcatgtgccaccacacccggctaactttgtatttttagtagagacrgggttttgccatgttggccagactggtctcgaacttctgacctccagtgatccacccaccttggcctcccaaagtgctgggattacaggtgtgaatcactgcacccagccaatgaatttaatgcttaattctttgttatcttcagtggtcccaccatgacacaccatcacatgctaagctccctgtgaacagttgtgaggcccttcacattaatacatctgtggcactgaggttggtgaataggtccaagcataaggaattttccaggcagtagcagaagagagatgaagccaggagattgtggtatggaaattaaagagacttttccagtgacttgtaggaaatgttttgtgttcattttctttctagtggtatactagtagtattcctgcattatagagccaaaaatatgttgagatgtattttgagatacatgttgtattctttggctggtcargaaaaaatggaagaaataatggaaaactaagaaaataaatttttttaagaaatggagtttgaggcttgggaatcatttttaatatatttgtaacaaaaagcttggcttaaaggtgaatgaaaagaaggtcaggcctggtggctcacacctataatcccagcactttgggaggccgaggtgggtggatcccccgaggtcaggagttcgagaccagcctgaccaacatagtaaaaccccatctttactaaaaataaaaattagctgggtgtggtggcgcatgcctgtaatcccagctacttgggaggctgagacaggagaatcgcttgaacccgggacgtggaggttgcagtgagctgagatcgccccattgcactccggcctgggcaacaagagtgaaactctgtctcaaaacaaaacaaaacaaaacaaaaaacagaaaaaagaaacaaaaagacaagaagaagaaatcttgactccctaaagataggagtctcttctcatagaattgtgaaattgtgacctcctgaaaaagtagcagcttcttttttttttttttttgagacggagtctcactctgtcacccaggctggagtgcagtggtgcgatctcggctcactgcgaggtccacctcccgggttcacgccattctcctgtctcagcctccctagcagctgggactacaggcgcccgccaccacgcccggctatttttttgtatttttagtagagacagggtttcaccatgttagccaggatagtctcgatctcctgacctygtgatccgcccacctcggcctcccaaagtgctgggattacaggtgtgagccatcgtgccctgccagtagcagcttcttatattcaacagtgattgcttgttattcaagaaaatgggctagaaagaagaggccagttttagtgattgataaagtgatggtggttggtaaagctgtgtttgggactatgacatgataccccatagggaagaagaccaacaatcttcgaaactccatcctccacacacacacacaaataagctggcaaaaactgtcagaatcaacttatttggaactctggaatctaataaaaaacttttaacaacaaaggaatgcttaatgaagaaaaagactgctgaattttgttaagagagctctgtgatcctaccctgttaccatcttcaacccccagcccagtggctgctttgaagacagcttatattactgtgcagtgtgctggtacttgagggaggaatgtggaccttattctgaaagcagcatggttgtgtattttgatctgtctggtaggtcctgaaagatcgtctcaaaggcttggctttgttttgcctgcctctgatctttcccagggccgaggcagctacacaggtggcatttgtcaaaagtattgaaaagcagatatattagttgcttctgcttgcattaagggataacagtcagggcaatccgcatacagatccaaatgcttatgaaggaagaggcttgggaaggagacaccagggggcacaaaggctttgaaaagctcccacgtgttctggggaatctaccaggttgtacacatacccagggctggtcatgtgctcaggaaagaccctagaagatccaagctctcactgctgggtaaccttcaggctgaacccaagtaggaagtgaaggctaaggtacagttgcaaactgcctggctaagtgttgaagttccccaaaacagagccaatcttcaaagacttggaaatgttttgttttgttattccaggtgttaaatctgccaaatcacgtgctcaccactaagctaacagaacagaaacttcagaggccacacatgacagaaaatttagagagatcattaaatagtcactacaacaagcagcaacaaccaactaggggttaagggtatataatctgatttccagaattgccactttgtaacatttatttgtttattttttattttaatttttttattatactataagttctgggatacatgtgcagaacgtgcaggtttgttacataggtatacatgtgccatagatctacattagatatttctcctaatgatatccctcccctaaccccctacccctgcgacaggccccagtgtatgatgttcccctccctgtgtccatgtattctcattgttcaactcccacttatgagggagaacatgcggtgtttggttttctgttcctgcattagtttgctgagaatgatggtttccagcttcatctgtatccctgcaaaggacatgaactaatccttttttattgctgcaaaccactatggcacatgtatccctgcaaaggacatgaactaatccttttttatggctgcatagtattccatggtgtatatgtgccacrttttcattatccagtctatcgttgatgggcatttgggttggttccaagtctttgctattgtgaatagtgcttcaataaacgtatgtgtgcatgtgtctttatagtagaatgatttataatcctttgggtatatacacccagtaatgggattgctgggtcagatggtatttctggttctagatccttgaggaattgccacactgtcttccataacagttgaactaatttacactcccaccaacagtgtgaaagtgttcctgtttctccacattctctccagcatctgttgtttcctgactttttaatgatcactttataatatttaaaatgtctgcttttcagcaaaacttatgaggcatataaagaaacaaaaatatggccctttcacaggaaaaaagttaatagaaaatgtccttgatgggccaggcgcagtggttcatggccgtaatcccagcactttgggaggcgaaggtgggctgttcatgaggtcaggagttcgagaccagcctgaccaacatggtgaaaccccgtctcgactaaaaatacaaaaattagccaggcgtggtggtgtgcacctgtaatatcagctactcaggaggctgaggcaggagaatcgcttgaacctgggaggcggaggttgcagtgagccaagattgcgccattgcactctagcctgggcaatacagcgagactctgtctcaaaaaaaaaaaaagaaaacgtccttgatggccgggcggtggctcacgcctgtaatcccagcactctgggaggctgaggtgggtggatcacctgaagttgggagtttgagaccagcctgagcaacatggagaaaccctgtctctactaaaaatacaaaattagccaggcctggtggcacatgcctgtaatcccagttactcgggaggctgaggtaggagaatcgcttgaacttgggatgtagaggttatggtgagctgagattgtgctgttgtactccagccagggcaacaagagcgaaactctgtctcaaaaaaaaaaaaaaaaagaaaagaaagaaaagaaagaaaatggccttgatgaagcacagacattggacttactcaagactttaaatcaattttttttttaatatacttaaagagctatggaaaccacggacaaagaactaaagaaaaccaagagaacaaggtctcaccaaatagaagatatcaataaaggggtagaaattacagaaggaaccatatagaaattctggagttgaaaagtataataactggaatgaaaaatacactagaggggttcaacagcagatttgtacaggcagaaaaatcagtgaacttgaagatggatcaattgagattatctagtctcaggagcagaaagattacaaaagacaaagacattatatgttgataaatagtcattaagaagatacacccagcactttgggaggccgctctcactgcagcctccgcctcccctgttcaagtgattctcctgcctcagcttccctagtagctgggaccacaggcatatgccactatgcccagctaatttttgtatttttagtagagacagggtttcactttatgttggccaggttgctctcaaactcctgacctcaggtgatctgcccacctcagcctcccaaagtgttgggattagaggcgtgagccactgtggccagctaaagtttttttagcactcagattctgtggttttagtttaatccagagtttgcagatgctctgatttagaagcatgaaattagattttcgtattttatactccagtgtgtattttgtattttatactccagtgtgactgactttgtacagtggctttctgtatggcgtctcaaaattgcttgcctttggatatgatttggaaaaaatatcttcattgtgttatataatcccttttctgttaattcacgtgaatctccagaccttgaaatgatttttctcctgatgttttagtttcacatcactcactatggtgaatagtttaagttatctaatttaaaatatttatgttggccagttatggtggctcatgcctgtaatcccagtattttgggaggctgaggtgagaggattgcttgaaaccagaagttcaagaccagcctgggcaacatagtaagaccttgtctctacaaaaataaaaaaatttccagggatggtggctcacacctgtaatcccagcgctttgggaggctgaggcagaaggatccttgggtccaggacttcaagaccagcctgggcaacttggcgagaccctgtcttaataataaataggccaggcgcagtggctcacacctgtaatcccagaactttgggaggccgaagcaggcagatcacttgaggtcaggagtttgagaccagcctggccaacatggtgaaaccccatctttactaaaaatacaaaaattagccgggtgtggtggcacatgcctgtaatcccagctacttgggaggctgagacaggagaatcgcttgaaactgggaggtggaggtggcagtgagtcaagatcatgccattgcactccagcctaggtgaaagattgagactctgtctcaaaaatataataataataataataatacgaagaactaaaatgaaaaaaattagctgggcttggtggtgtgtacctgtagtcccagctactcaggaggctaaaacaggaggattgcctgtgcctaggggttcaaggctgtggtgagccatcattgcaccactgcactccagcctgggcgacagaatgagttccatcttaaaaaaattttttttaataaaaattttatgtgtatttaatttttttttttgagatggaatctccctctgtcacccaggctggagtgcagtggtgcaatcacagctcactgcaacctccacttcccaggttcaagtgattctccagcctcctgagcagctgggattacaggtgtgtgccacgacgcctggcctatgtctattaatttcaagcaaatagggaaaaaaaaacttttttttttttttttttgagatgcagtcttgctctgtcacccaggctggagtgcagtggtgcaatctcagctcattgcaacctccacctcccgggttcaagcgattctcctgtctcagcctcccaagtagctggaattacaggcgtacaccaccacacctggttgattttgtatttttagtagagatgggattttgccacgttgcccaggttgaactcctgacctcaggtgatccaccggccttgacctcccagagtgctggggttacaggcatgagccgccaccgctcccagccaaaaamcctgtatttaaaggcatcatgtgtaaatgtataaaaccatttcaaaacctttaatttactcagagccaaaacagcaaccaagaattttttttttctttctgtttaaaaatcatttatcttttagctgacaaaattgtatctatttatggtatacatgttttgatatacattgtggaatggctgaatcaagctaaataacctgtatcgcctcacatatttttcattttttgtggtaagtttttttctttgtaagtgagggtactattcttccttcatatttcagcaacagccaagggagccaaggcctctgagttcaagtccaaggtgtacctaaaacatgctatgtgactttcaacaaagcacttaattcttcattaaggtggagatatacacacaaagctgagttgtgaggcttgtagggagtagtgagatgtagttatgttatttggaagtcatctggcaaatggaaagcatataaaaaggccatcagtctaagctggagatgtctgtgaagtcatactttagtttctggtgtggacttttgtggccctgtatgtatgttgtgatcaagtggacgttcagactagatggattaaatcttgatgcctacaaaataacatgattacacgttttcttctagttgaatttatttacttttatttactttaaattttatttaaattttgcaaatttagtatgtttaaaaattttatttattgattttttatttttatttttttgagatggagtctcactgtatcgcccaggctagagtgcagtggcgcgatctcggctcactgcaagctccgcctcccaggttcacgccattcttctgcctcagcctcccgagtagctgggactacaggcacccaccaccaagcccggctaattttttttgtagtttagtagagatggggtttcaccatgttagccagcatggtctcgatctcctgacctcgtgatctgcctgccctggcctcccaaagtgctgagattacaggcgtgatcctctgcgcccagccttgttgatttactttctttaaattttgcaratttaatacgtgacatgacaactgttttatgtgcatctttttacttaattctcaacaattacatggcatacatactgttactgtcaccattttatagatgaagaaactgaggcttagagaatttcaataacttgcctatccaaggttacatagttgacacatgacagaattagaaggaccagcgtgctgacaccaaagacttctgatttgtataattctcaccactactcatctggtagtctggttgcctgttctatctgtaacactcgtagggtaatggaaaggcatggcttcagctgctttaatttatatacttttattccacaggtatttaaaagcttgacagaccttctamataggtttgtagttaaaaattgataatttaagattaaggagttaaatatgcatttgctgtggtttgtttccttatcagtaatctttccattgataaaccaaaattgacattttattttttaggtcctaaacatgcagctttcggatggaggacaaggagatgtccctgttgatgaaaacaaactccatggtaaacctgataaaaccttgcgcttttccctctgcagtgataatctggaaggaatatctgaaggtgaagggttacttcattcaaggagttgtgtggttcaattaatagtttgttttgtgttttttaaaggagcttataaattataattataccatctgtgcttctcactgaggagactaatgaagatttcctctaatgagcctgaacagttggctgtaaagattgtttcctgaataaaattaaaattgcaagatgcctttggtcatataaaatggagaagatatgtctttattcagacttaaatagaataacagcaagttctgtttctgcagtattaatatataccaaagcttatagagctcctttagaaggatatcatgcatgtckaaacgggaaaaaatggacttactagtatttcaatatgttgcacatactcttaaatgttctgtattcctttactcacactcacacatacctttatsaagcagaagacaatggaaataggtattaaaaagaaaattcaaagccaagattgtgaaatgagaatatgtcattttgcctactagtaccaattttttttttttgagacagagtctcgttcgttgcccaggctggagtgcagtgtcgcaatctcggctcactgcaagctccgcctcccgggttcacgccattctcctgcctcagcctcctgcatagttgggactacaggcacccgccaccacgcctggctaattttttgtatttttagtagagacggggtttcaccgtgttagccaggatggtctcgatctcctgacctcgtgatccgcccacctcagcctcccaaagtgctgggattacaggcgtgagccaccgcgcctggccccgggtttttttttatttaaagacaatagttcaaatttactgacatttaaaaagaaacctaaaatataataacttcatattttaatctgacttttccaaaaaaatgacatgtaatgtatgttcattctacaaaacagagaaatagaatcacctataatctcaaaattttgttgatagcagttgacgttttagattattcacagcaaaattaggtttatcctgttttgtaaccttttgtaatttaataatatggcattaacatttccctttgtaatttaacattcttaaataacatggtttttatggctgttttccttaacctcacatggcatatcataatttttttcaactttcttctgtgattaaatctatagatttcttccactttttggacataataacttctgggctgggcgaagtggctcatgcctctaatcccagcactttgggatgccgaggtgggtggattcactgagctcaggagtttgagaccagcctgggcaacacggtgaaaccccatctctactaaaatacaacaaattagctgggtgtggcagcgtgtgcctgtagtcccagctactcgggagactgaggcaggagaattgcttgaaccagggaggcggaggttgcagtgagccaagatggtgccactgcattccagcttggacgatagagcgagactctctctaaaaaaaaaaaaaaaaaagaagaaaaagctctataacaagcaactttagattaattattattattattttttgagatggagtctcacttttgttgcccaggctggagtgcaatgatgcgatctcagctcactgcaacctttgcctcccgggttcaagcaattcccctgcctcagcctcctaagtagctgagattacaggcatgtgccatcaggccggctaatttttatattttttgttttgttttgttgtgttgtgttttgttttgttttttgagatggagtctcgctctgtcgcccaggctggagtgcagtggcgcgatctcggcccactgcaagctctgcctcccgggttcacgccattctcctgcctcagcctcctgagtagctggtactacaggtgcccgccaccacgcctggctaaatttttatatttttagtagaggctgggtttcaccatgttagccaggatggtctcgatctcctgacctcatgatccacccacctcagcctcccaaagtactgggattacaggcatgaggcattgcacccagcagattaatttgttattagcaccttaggataaattcctagaagcagaatttctcaaagggcatgtgtttttttaaggtataaaaagtattaaaaacactttaatcagttgttagtcttttatcaaggcatgaaaaattgtgtggtggctcatgactgttttaaaaagattgctcacactataaacatttctctaggtccttcaaatcgctccaattcagtgtcctccctagacctagaaggagagtctgtgtcagaacttggagcaggaccttctggcagtaatggagttgaagctctacagctgttagaacatgagcaaggtaaagtgaagttgaacacagttgcctaagtagcaaagaatttacctgattgcaagatgagcagtgtgttttcattaagttggcttggttcagtaagagattaaatcaccattaaacttaacatttattcatcattccttcagttcttcaaaatctatttagttggtaagtggattgtttaggcttaataaattaatataaattacttgaaattcagtaatatttgatattttaattatgtaatattttagggatacaatgtaaatactcaaggctcaaggaacttagaatagggaaagaatagtacacaattgatttaaagtatcatgaaagtatttggcagttctgagtgagagatacatatggttgaaagtatagggaaagctgctgggcccggtggctcacacctgtaatcccagcactttgggtggctgaggcgggtggatcacctgaggtcgggagttcaagaccagcctgaccaacatggagaaagcccgtctctactgaaaatacaaaattagccagggtggtggcacatgcctgtaatcccagctactcgggaggctgaggcaggagaatcgcttgaacccaggaggcggaggttgcggtgagccaagatcgtggcattgcacaacaggctgggcaaaaagagtaaaactccgtctcaaaaaaaagaaagtatagggaaagtttattggaagaaaatattagccttgagggctggctggcattgccttggcagaagttggagataggtcattctaggtgaaggacaagcataagcaagtcaaagaggtgggaagccatagtactttttcaggtatcagttagggaaatggagtgaggtaaggattaaaaagtaggtggatccctgttgtggaaagaaggatatcagtattttagtagtaagctggaagccactgaaggcttttggttcagtgaagatgaggaagtgaggtgccttaggaagattaagttgaaagagttttttggatttgttcatttaagatgatgcccttggccaggtacagtggctcgtgcctgtaatcccagcactttgggaggctgaggcaggtagatcatttgaggtcaggaatttgagaccagtctggccaacatagtgaaaccccatctctactaaaaatacaaaaattagccaggtgaggtggtgagcacctgtaatcccagctactcagaaggctgaggcacgagaatcgcttgaacctgggaggcaggggttgcagtgagctgagatcgcaccactgcactctagcctgggcgacagagtgagactctgattgaaaaaaaaaaagatgggccgggtgcggtggctcatgcctgtaatccctagcactttgggaggccaagacgggcggatcatgaggtcaggagatcaagaccatcctggctgacacggtgaaaccctgtctctactaaaaatacaaaaaattagctgggcatggtggcaggcgcttgtagtcccagctactcgggaggctgaggcaggagaatggcctgaacccgggaggcagagcttagtgagcagagatcacaccactgcactccagcctgggcgacagagcgagactccatctcaaaaaaaaaaaaaaaaaaaaagatgatgccctcaactaggtttgacacagtgattttagcatgcataagaattacctggttagctttttaaaaattccatttcccaagtcttacttctaaaaaagaagtcagtttttagaaagaaaaagagtattgtcattggagtgtgtgtggcttgaaaaaagtaatgctgtattttactggatttgtttatcagtgtattaattaggattaagtttgttgcaagcagcagagaaaactcaagtaataaagtagtacctccttatccatggtttcaccttccatggcttcagttacccatgggcaaacttggtgcaaaaatattaaatggaaaatttcagaaataattcataagctttaaattctgtgccattctgaataatgtgatgaaatctcacacagtctcactctatcacatccaggacatgaatcattccttagttcagtgtatccacatatacactacctgcctattagtcactgcttatcagatgaaaacagcatggaatatataggatttggtacgatccgaagcttcagttatccactggaggccattgcataagtggaggaggaactttcatatgagcttatgaaagaagttgaacaaatgtcacctctttagcaaacttcctgggagattctgagataggtggttggcatatgcaaaatgctagattaagaagtgaattgataggccrggcacagtggctcacgcctgtaatcccagcactttgggaggccgaggcgggcggatcacctgagattgggagttcgagaccagcctgaccaacatggagataaaattctttaaagttgattaaaaagtcatagctgtgctactattttaaaagtgcttaattttgtttttgatagctacaacacaggataaccttgatgataagctaaggaagtttgaaattcgtgacatgatgggattaacagatgatagggacatatcagaaacagtgagtgagacctggagtacagacgtcttgggaagtgactttgaccctaatattgatgaagatcgcttgcaagaaattgcaggtaactgccatttaatgtctctgaaatatcacggtttagttattcaaatccaccaacctttcatgggagggagcaccagtgccctgacaaacattgtgtgtgttagcaccatctgggaaactgttataactgtatggaacaaggcatttgggtacttttttctttacttaaatataactagtgtttttcctttctacatttaatcccaccccttacccatcctcctcccagctgcccaaaaaaaaaaaagaaagaaagaaaaaccagtgttttgaattagcttctggtcaagtgttgtttgcagggcatagtataagttcttagtctgtctctaattagtatattctctgtttgaagccaaacacctaaccttaagatgaaaattcttatagattatagccataaaatctttcacaacaatatgatactgctgttctctaaaaaaatgaattcacttctggaagagttaattcagttcctaagggtaaccaggtttttctttttcttcttcttacatttttatttattttcaaatagagacaggatttcgctttgttgctcaggctggtcttgaactaatgagctcaagtgatcctcctgccttctttttttttaatgtgaagtttattcaggtgctatgtatatacactaaaattcgctcctttttggatactgttttatgagttctgaaagatatatagtcttgtaaccctcatcttcattttgtttttaaatcatggaaaatttattgatatgtttatttttcttcaacttttattttaggttcagggggtacatgtgcagatttgttacatgggaaattgttagagcaaattgtatgttgctggggtttggtgtacagatgattttgccacccaggtagtgagcayagtaaccaataggtttttttttgtttttgtttttttaatttaagatagagtcttactctgtcgcccaggctggagttgcagtggtgcgatctcagctcactgcaacctctgcctccctggtttaagtgattctcctgcctcagcctcccgagtagctgggactgcaggtgcccaccaccacacccagataatttttgtatttttagtagagacggggtttcaccatattggccaggctggtctcgaactcctgacctcaagtgatccatccgcctcggcctcccaaagtgctgggattacagtcatgagccattgctcccggcctaaatcatggaacattttaaacaaatacaagagatggtggtatcatgaacccagtgtacccatcactcagtttcaggagttagacccacatggccagctttctttcatctgttctcctatccactaccctcttctctcccctcattatgtttaggcaagttccagacattattttatttctaattattttatgatatagctttaaaaggtaacttttattagtaactttttttctaattttttttcatgccctgaagtagaattattcttttattaggtttaatccaaagtagtgaagccttttgaacttcagtgtttttaacacagacgyataataatgtttaatactttcgatttgtatttttaagtagtgcaaatagatttctttttttttttttttttwaatttatttttttattgataattcttgggtgtttctcacagagggggatttggcagggtcatgggacaatagtggagggaaggtcagcagataaacaagtgaacaaaggtctctggttttcctaggcagaggaccctgcggccttccgcagtgtttgtgtccctgattacttgagattagggaktggtgatgactcttaaggagcatgctgccttcaagcatctgtttaacaaagcacatcttgcactgcccttaatccatttaaccctgagtggacacagcacatgtttcagagagcacagggttgggggtaaggtcacagatcaacaggatcccaaggcagaagaatttttcttagtgcagaacaaaatgaaaagtctcccatgtctacttctttctacacagacagggcaaccatccgatttctcaatcttttccccacctttcccgcctttctattccacaaagccgccattgtcatcctggcccgttctcaatgagctgttgggcacacctcccagacggggtggtggccgggcagaggggctcctcacttcccagtaggggcggccgggcagaggcgcccctcacctcccggacgaggcggctggccgggcagggggctgaccccccccacctccctcccggacggggcggctggccgggcaggggggctcacctcgggaggccgaggctggcggatcactcgcggttaggggctggagaccgcccggccaacacagcgaaaccccgtctccaccaaaaccagtcaggcgtggcggcgcgtgcctgcagtcgcaggcactcggcaggctgaggcaggagaatcaggcagggaggttgcagtgagccaagatggcagcagtacagtccagcttcggctccgcatgagagggagaccgtggggagagggagagggagagggagaggtgtaaatagatttcttaattggttttacattactttgttccagatgccaaagtggtattgttcttggcagttagctgtatttgcgcaataagctgtatttgcagttgagtgagtgctatgaagatgtgtattttcctgtgaatgtatcttattgccctgaatagtgactaatatgctggaagaaaaaatatttggccagcataacattctgtggttaaactctcagtgtttttaatctttgtagggctataaattttagaacgatattaaggacccctgtaaaatttgctgagaaatcaaagctaaagctgttgaaattacttgacttaatgatgtgtgttttctctatggagagtcaaaggtgaactggaggaaactggtgaaaagggtattgtgccattgtgaccaaagtaggaacttgtgtttttagtggtgtgcttgattgaagttattcttactttggcctctttcttgtaggtagagaggaatttggtggttttttttttttttttgagacaaagtcccaaaatgacacggccatttttatttttgagacagggtctcactcacattgaccaggttggagggcaatggcatgacctcggctcactgcagtctctgcaccccctgcaacctctgcctcccgggttcttgtgcctcagcttcccaagtagctgagactaccggtgcacgccaccatacctggctaatttttgtattttcagtagagacggggtttcgccatgttggccaggctggtgttgaactcctggcctcaagtgatctgcctgcctcagcctcccaaagtgctgggattacaggtgtgagccaccgcgcccagccaggagattttgttagctagtgtttggcttttctccactatcactgcactttcctccaggatctttgttaaccctttgcttcccactggttatacaggtgctgcagcagagaacatgttaggcagtttgctgtgcctcccaggttcagggtcagtgcttcttgacccctgcactggttctaccatatcagagacaacaagtgaagcttggagtgtagaggtattgccaagtgactcaggttagtatgctgtcattgtttgctttttcatttatacagaagttttaattaaatgcaaggtatcccaactctgtattatgtatattttgtcaaatacactttttttttttttttaatggagatggagtcttgctcttttacccaggctggagtgctgtggcgcgatcccaacttactgcaacctctgcctcctgggttcaagcagtcttctcgcctcagcctcctgagtagctgggattacagacatgccccaccatgccgggtaatttttgtatttttagagaaacagggtttcaccatgttggccaggctggtcttgaactactgacctcaggtgatctgcccaccttggcctcccgaagtgctggaattacaggcatgagccatcatgcccagccagttatacatttgacaaagatgaggtgatcacattgctaagaatgtcaaatggaaaattagtttagggcattttctgtccattaagggaaaatgctctgttagatagcatagactgtgatggcaggtgctttcagactctgtgttgagttattttgaaagcaattttctgtgattatcagagtccgtgtgaatcattgaatttagtatcttccacaaactcatgacaggataagagtagcaacacagttcaaactgagtgcttgcttggtaaacacatttagatttatcacaggggagaacttgactctctaaaacatgcttaatgtgtttttgaaatacgttgaaattgagattctgtaatcctgaggatttttttttttgtgcaggttattataaatgtatataaagtgttttgtactttgtcttttcatatgcattgcatttttttctgattatgaagacgcatctttgctttcaactaaatgtcaactaccagaatgtaaatataagtaactgtgtatctgcattacattctgttgatttacttggttcaagaattattaagtgatcctgatatgtgttttataatttttttttttttgagatggagtctcactctgtcacccaggctggagtgcagtggtgcaatcacggctcagtgcaatctctgcctcctgggttcaagtgattcttttgcctcagcctcccaagtagctgggattacaggcacctgccaccacgcctagctagtttttgtatttttagtagagatgggatttcaccgtgttgggcatgctggtctcgaactcctgacctcaggtgatctgccggcctcgacctcccaaagtgctgggattacaggtgtgagctaccacggctggcctgttttataatgttaaagcattcagatatgctagccttgtttgaagaccagttggggacaataggattagcttaccagctgttgagtattcataggagttactttttaggaagtggttgatttaataccaggctattccatactctcttgtccagttcacatgttaatcaatagcatactctgtgacattagtgatctagaaccacgttttcatctgtgcacagtgaactggcttatattgggatgaaaatcacaactttgacttaacacttaatctaactagcattaactagtccagacttacacatgtatttgcactgattttattcatgccctggtagctttgtttatctgggtcacaraagctgaaattgtggtgtgctaagagaatcacaaatgtaacatacctcttatcttctatttagaggccccagacctaaagcaggaggagcgtctgcaagaactggagagctgttctggactgggtagcacatctgatgatacggatgtcagggaggtcagttcccgccccagcacaccaggcctcagtgttgtgtccggtatgtctgtcttgttttaaggagtagggatttgaaggtgttcaccccctaccccctcctatttataaagttgatacaaaaagatatgttatatttaagagctgagtaatttccagaaaacaaacttatttccattgcacctgaaatctttgagaacttaatgtgtggccttatggagcctgttgaagtaattggcaaacagtctctctacaactgtttctgttcttagtagcctgtcctactttagaattgtacgattctgattatgttgtgtaaagcaaggtaagtatatttaagcagtagtaccataaaggatataatactaaactcacatgtatagaactgggacacraaattcgagaatgtttcagtttctccaaatttcatatactttttgtgtggatattttgttcttcttcctgtttattttttactattgttttttaaaggcataagtgcaacctctgaggatattcccaataagattgaagacctgagatctgagtgcagctctgattttgggggtaaagattctgtcactagtccagacatggatgaaataactcacggtaagagggggaaatgaggatgacttaaaaaatgaccacatccgtggttgaaactggcactgtgacacattgctggtgacagcatctgttggtatagcactttgggacatactttgtcagtatctatttaaggtcttaaatgttcacattctaaatttagtcaggttagttccacttctaggtgtcagtcataatgaaaaaattccatgtgtagagaaagtccttagcacgaagatgttctttataatgttttgtattggcagaaaactagaaataacttaaaaaattgaaaagtggaatggctaaataattttgatgtaactgcttattggaatttatgtagctattttaaaatgcattaaggaatatgaaatgacttagagaaaaaactagaacatactacatggaatttattttgtagaactttacacacaaaataataaaacttctgttttttttttgagacggagtcttgtgctgtcacccaggctggagtgctgtggcacgatcttggctcactgcacttccgcctcctgggtctgctgggttcaagccattctcctgcctcagcctccccagtagcttggattacaggcacccaccaccacgcccagctaatttttctatttttagtagatacgggggtttcatcacattggccaggctggtctcgaactcctgacctcgtgatccacctgcctcggcctcccaaagtgctgggagtacaggtgtgagccaccgcacccggccagtaaaacattttttaaaaacctatgcaagaagtaagtactggaaataccaaaatgctagcagtggttttatatattgggtgttaggttttgaggtaccttttgtctttttttttttttttttttgagacagagttttgctcttgttgcccaggctggagtgcaatggcgcaatctcggctcaccacaacctctgtctcccaggttcaaatgattctcctgcctcagcctcccaagtagctgggattacaggcatgtgccaccacgcccagctaattttgtatttttagtagagacagggtttctccatgttggtcaggctggtctggaacccccaacctcaggtgatctgcccgcctcggcctcccaaagtgctgggattacaggcatgagccaccgcgctctgcgaggtactttttctatttttacaatttttttttgttctaaaccagggttttttaaccttaacaccattgacattttgggctgggaaattctttgttgtgggggcctgtcctgtgcattttaggaggtttaagcagctctggcccctaccagtagtatatgccctttaccccctggggttgtgacaacgaaaaatgtctctagacattgccaaatgctctcttgggggacaaaatagccaccaatcaagaaccactgttctaaaccagcagtctcaaagcatggtctccatggaccactgaggtcctaagaccctttgagggaggagtgtagatgaagtcacaactgttttcataaaaatcaaagttaactgtccattttcaccgtgtcgacatttgtacttacggtgcataggcaaagtggataaaatttgctggggccctagcaggatgcaagggcaccacactgtattcttcactcacagttaaaaaaaaaaaaaaaaaaaaaagttttacttaggaatgtctttgatgaaggaataaaaattacttaatcacatctcaacccttgagtatacacctttttaatattctgtgtgaagaaataggaagcacccatattgcgttttcaccgcattctgagatatgatgagatgtctcaagaagcacttatggattatttgagttgttagctgaactagccaatgtttctccttatttttatttggtttttcatgaaatattatttttacttggaagaatgacagataaactgtatttcttatgaatacgtaattgggtatttggcagacatctcaaaaattaacaaagtgtggccaggtgcgttggctcacacctgtgatcccagcacttcgagaggctgaggctggaggagtccttgagcccaggagttcgacatcatcctgggcaacatggtgagacctcgtctctacaaaaataaaaaaataaaaaaattagccaggtgtggtggcgcatgcctgtggtcccatctttaaaaaaaaaaaaattaacaaaatgatcctgtttcttagagaagcaactaatagagtggagtttgttgccagtgatgaaattcaaacttttggacaaaaattagaattttggaaacgtgtgtctacctgcatgagcttgacagctttctgttgtttaaagacttttctggtgagattggtggtgatatgaaaaatgtgaatttagcagaggacaaaaagttcattgatttggtttcaaattctaccttgtagctatcctttaaaaaactatacttctcaagatgtggtagagtatcaaagaataatatccacaattttctgaaaaggctactaacatattgttccttttccaactacatgtccgtgtgaggccagattttctttatatacttcagccaaaacaacattttcaacacattgaagcagaagcagacatgagaatccagctgtcttctagtaagctgtacattaaaaatacttgcaaaaaatgtgtcattctcttcattttttattttggaaaataatagttatttatttatttatttttaatgcttttttgtgttaccattaaaattttttctttttttttttaaaaatggggctgggcgcggtggctcacgcccataatcccagcactttgggaggccgaggcaggcggattacgaggtcaggagatcgagaccatcctggccaacatggtgaaaccccatctctactaaaaatacaaaaaattagctgggtgtggtggcgtgtgcctgtaatgccagctactcgggaggctgaggcaggagaatcgcttgaacccaggaggtggaggttgcagtgagctgagatcacaccactgcactccaccctggtgacagagtgagactctgtctcaaaaaagcaaaaaatggacagcctcccaaaccagagtaggttcagagagactcttgtattaccatttaatgggtatatttaaatgaattaataaatatttaaacttcagttttctaatatagaatatcaatagatataaccaccataaacaaaagctattagggtcagtaattttttaagttgtaaagatatcttggccaggcatggtagctcatgcctgtaatcccagcactttgagaggcagaggcaggaggagtgcttgagcctaggagttcaagaccagcctgggcaacatggtgagaccctgtctctacaaaaaataacataaaaattagctgggtgtggtgtgctcacagctatttgggaggctaaggcaggaggatcactcgagcccaagagattgaggctgcagtgagctatgtttgcaccactgcactccagccagggtgacagagcaagactttgtctccaaaaaaaaaaaaaaaagcctgagaccaaaatttgagaactgctgttttagtccatcttttataatgatctaactatagaacaaaagtaaaaatcaaaaggcataatagtactctcattcattatcaaaagatatagcttgagaccaaaaaaaaaaaaaaacaaaaaacaaaaaatagcttcagactaaaaacatttagattaataatttttttatgtttgaaatttccatcctctgcatacttatctattttaaagttatttgctgagagcagtgttagaacttcaagatttacagccttttatttgtacgctgtctgtacagagtattgcccctatgtttataatttatttattttttaatttttagttcttgtaaatttttgtagagaccaggtctcaccatcttgcccagactggtcttgaactcctgggctcaagcggtcctccctccttggcctcccaaagcactgggattaaaggcatgagcccctacacctggcctgccccctatattttcaggtgaggggaaggcgaggctcagggaagctgtgacattctcaaaacattgatggtttaggtcttccggctttgttctctttgcatgaaccatactagcatttggccattagaagtaacaggcatgtagatgccagaccacttaaatgtaaagaaaatctgtgtatgaagatactcataaaaacagaaaatgaattggaagtaatcataatttgattttttttttctggtatgcctctcaagttctaatggatcaaaaaaggaaccgtcaaagaatacttaaaaccctttaaactgtgttgagaccgtctgtcctgcgtcctggcttggtctcacagtttccctcctgttttaggtgcccaccagctgacctctcctccttctcagtcagagtctctgctggccatgtttgatccactgtcttcacatgaaggtaaaccagtgaaatgaactttttcacttatgtcacagacaggaggaggaaaccaaatccccttgttaatgcctttgttagatatgttgtgtctcagttacaaaactttttttcctgtgttgcaggggcttctgctgtggtaaggccaaaggttcactatgctaggccatcgcatccaccaccagatcccccaatcctggaaggagctgtgggaggaaatgaggccaggttgccaaactttggttcccatgttttaactccagctgaaatggaggcattcaagcaaaggcattcttaccctgagagactagttcgaagcaggagctctgatatagtatcttctgtccggagacccatgagtgaccccagctggaaccggcgtccaggaaatgaagagcgagaactccctycagctgcagccattggtgctacttctttggtggctgcacctcattcatcatcttcatccccgagtaaggactcctcaagaggagaggtatgggacataggccgtgaaaaagaattatgttctgcctgcctagttctcttgatatctgaaattaacatggaatatataaatctaggattacagatagagagtagtcatgattaaagatgatttgtcaatctatgggcccacaaccataaccgcaggaaacctgtacaactttggttttgtagtgatactatcttgcatttttatgacacttttagtttctctaagcaattttgtatctgattttatttaaaccttacaatatctttctgagatgttagatgagttgttttttgttttttgagatggagtcacactctgttgcccaggctagagtacagtggtgcaatcttggcttactgctacctccgcctcccaggttcaagcgattcctctgcctcagcctcctgagtaggtgggactacaggcatgcgccaccacacccggctaattttttgcattttattagagacggggtttcaccatgttggccaggatggttttgatctcctgaccttgtgatccgcctgccttggcctcccagagttgctgggattacaggcatgagccaccgcacctggccccatgagtattttttattttaaacaattttaaagttacaaacaagttggaagtacaataaaagaacactccctccccatttgtgagcaagttgccaacctgatgctccagtacccctaaacacttcagtgtaagtttcctacaaacaagcagattctcctacacctcatggtacagccatcagcttcagcagatgaacattgatacattactaccagttacttatcacaccccattcatgtgtcccagttgtccctgtaacattttttatagtaaaaaggttctattcagaatcacagactgcttttagttgtcatgcctttttagtctccttcagtctagaacagttcctcagttttttcttgactcatatgacctggacgctcttgaaatttacaggccatttgttttctcgaatgttcctcaggttaggttgtttgatgttttcttgtgattagactgaggttattcatctttggcaggaatatcactgaaatgacactttttttcattgcactttgtcaggtagcacagttttaatttgtcccatttctacagtgttcatttggataatttgaggaaatgttgtcttccaggctttgccactgtaaagttactcttttacctttataattaataagtatttagggggagagggtactttaaaaatatgtaactatctgttctccatcaaatttttaacttacctacttattatatctgtggtctcatggttttctgtcttttaaaaaaatttgtgtgtgtgtgtgtgtgtgtgtgtgtgtatatatattttttgttgttgttgtggtttgtttgtttgttttagatagggtcttgttttatcacccatgctggagtgcagtggtgccaacactgctcattgcagccttaacctcccaggctcaggcaatcctcccgctttggcctcccaagtagttgggagtataggcatgcaccacatgcctggctaattttttcgtttgtttgtttttgtagagatggggactcactgtgttgcccaggtgcttatcttgaactcttgggctcaaacagtcctcccaccccagcctcccaagtgttgggattacaggcgtgagccacccacagtgcctggcccagttttctgtcttggttagggtttgtcactattacttattttgaagcccagttgtccctaattgggccartgagagccccttcaggctggctcctgagttcttttgatgcactgctactattctttgagcatatctttactttctggcaaaagatgttataggcggatactgtactttgtcctagttagctctttctcgaagtacccttatttcttttaatgaaaaatgcttttttggaaattgagatctggatacagtgtttatttgctgtaggagtgttgctgctcccaggactactcagtgaatagagctagggagtgtgtgtgttacacacacatttacctgtatatttcatttatctacctttctccataaataagaccatgaacttacactgacacattcaattctagtccaaacacaacagagtttgtttcgtctttcttcctttccaaatttgtaactcatttctccaacagtgagaaatctactttcactattcttcatgggcatatttattccatcagttctcctgtatgtattcaatttctcatccccactgttaagttaactcttccctggcacagatgccctcatctctctgctagggttctgataattctttatcccaggtatgtagatgaaaatggaaattaagtgatttgtccatggtcacrtgataggctattaaaggaattacagtccctgtcctttggcctgttttttgtttgtttgtttgtttttgagatggagtctcactctgtcgcccaggctggagtgcagtggtgcgatctcgggtcaccgcaacctccacctcccgggttcaagtgattctcctgcctcagcctcccaagttgctgggattataggcgagcaccaccacgcccggccaatttttgtatttttagtagagatgaggtttcaccwtgttggccgggctgttcttgagctcctgacttcaggtgatccacccacctcggccttccaaagtgctgggattacaggcgtgagccactgcatccagcttctttgkcatgtgttaatgataacttaatataattggtgatcaaaacatgaactttaaagttgcttaggtctaggtttgagtcctcagctgtgccacatataggctgtgtaactttgaggaagagggggaggtaacctttctttagtctcatattttttatcgataaaaaaggccgaatataggacctatctctgaggttactgtaaagattaaatgagattatacatatccttactatgctcagcatttggcacatagtacacayttggttttattattattaatactactgctaccatctctactgcccttctggagtttatttgtactgcatttacttttttcataagtatttattgagtgcctagtctataccaggctctgtattaaggcttcagtttattaacagtaatgagatagtgcctgccctcaagcagatgacagtggtgctgaaaaggtaaactaccgtgctccaaaagtcacctacgtggcaataagagttgtgccttaaggcaaacaagactgactttcttatttcacaaacttacttaaatcctttttagcctgagcaacatagtaagaccctgtcyctacaaaataaaaataaaaaattagctgggcatggtggtgtgtacacctgtggtcctagctacttgggaggctgatacggggaggatygcttgagccasggaagtcgaggctgcagtgagctgtgattgtgctactgcactccagcctgggcaacagaatgagatcctatctcaaaacaaaacaaaaacaaacaaaaagaaatccttttcttagtaatttatcctgctatccaactccaaataaagcctccaactttttctacagactgaagaacgcaaagatagrgatgatgagaaatcagacaggaacagaccttggtggagaaaacgttttgtttcagccatgcctaaaggtaattttataaaatattagaacgctgtattagcaataagaagcaaagccccagaatctctttcagagagccaatgtctcaactcctctgtaagacttgctgggcttaagtttctagctactttgagggtgtagaaagtggttccactcagatgaatgctaaggcagagctttagaaatgttcttgttctttgcaggaagtgatagtggtttcataaatggaagtcatgcctgtcactattgtttaaatatcatataccattgaagttaaacatatagaggacttctgacatatatattgctattaattattgcaggaaaatgggacgttattggtaattaaacattgaaaactcatcctttacattcctggaataagttgaagctttttatgtctatgttcattgagaatgtttatactgtaaatatcagtgagtgtttattttggaaggtagctgtataaaattgtttacttttttggtgaacagcctggcatcatttgagttggcaaaagcatctcttcctgaaagaagagagcatccaggagtaaagctagaaacttmttccaaaggcctcttctcagcacggtggcactcaggaactctggggagagctgctttcacgccatactcaagcgcttgatgaggaggagagaatgaagctaggagttttgaatgtgtttttgagcagaggttaagagtcagtggttttgattttagtcccartggattcctgttaaattattcttcctatgacagatgactccgaagcaggttmtgaaagttcctttaaaaaccttcattactattttaaggacaattatcagtcaacacttggaatttcttagcttttaaacttttcagcctcctttcacttagaaatgttggcacaccagttaacttccgagtagtgcagtatgttatatgtcacactactgactttatttaatttccagctcctataccatttagaaagaaagaaaaacaagaaaaagacaaagatgatctggggcctgacagattctcaacactcacaggtttgtagacccatggacttcctggctccttcattcccagagcacatatttcataacactttttcttgggtgccataagcgttgcctttctagaagagtgtgtctgtgtgtacagtggggagtatgttcttcatagctctgtggtttccagttggtggccacagtaaacctgtgtgctcttcctgcagactgccaccaccatcatcatcctcattatcataactccgtttatgatgaggcccctgatcctgagcctctaggcataccctacaactcaacatctagtgggatgatgacacacagtgccttttaggaaagtgtggtgacagttttggtgctgtgcatgctgtatctttggatcattgattgaatagttttctctaacattgatcgtagaattctacatttattttcatctacagtttgttcttgattattcaggatcacagtgaaattctgttttacctaatcgtttccttttttgtgataaagtgtttgttcaaacagtatcataaatgccaaccattataatgaaagttttaaaaactttactaattttttacagcttgaaccattttaacattgccatctgacccaaggaaaatacagctgggrgttgggtttttacctgattaagcgtttgtatttctgcagctgctttttggcacattatgaatgagcaccctaaaaggacagtttgagagtagtgttaatgacccagtcttgggtttgatagctgtgtattgtttccagtggctattatagagcatcttgagcaagtttgttcaacccacggaccgcagaccacaggcagcccaagacagcaggacagcttcgaatgcagcccaacacaagttcataaacttaaaacagtatgagatttatgcaggaaccctttttttttttttttaagctcatcagctatcattagtgttagtgtattttatgtgtggcccaagacaattcttcttcttccagtgtggcccagggaagctaaaagattgaacacccctggtctagaggaaagttcatttctcacctcttttttttgattttgaattgttttcctactaagttaaagtgaaaatttttttcattaaacaattttatttaaaaatgggatagataataggataagaacatcctcatcaaagagttcagcattacaggtagaatcccattttaatgcctattattctaatggttggttccatatatttatatgtatttccatatcctagcatataagtccttgctttatttgaaatggtgatttccccagaataaagggttttgaacagcaggagatgtgcttacaggccacagttccctgctgagagcagctaagcctgtcctattcaatcagtaaatacttgttgaccatgtgactcatgccaggcactgtgctaagtgttgtgggtattaagtcaaatcacacatgactcttcaggaccttccagtctgattgggaagagctggaaagacattgtccttttggcaaagtatttctgtatccttacgacatgttcctaatgttagaagaacactagcgtttacaaagtgaattactcttaatgacatctcatgtttttaaaatgttgaatcaacaattctgaagaagttataaattattattatggtttgtttgtttgaaggagttatattttacttatcctctttaggcaatatatttttcttggttcttgatactggaactagaagctaagtagagtagaataagtctttttcataaagtaatttattttctttggctgtgattcaagcagattagcttccttactggtccagaaatttctacccagtccttattaatgactcattgaaagttttcattaaaccaatttaaaaatgttataggaggaaatttcctagcagtctgttcataattctgtgaccctaactactgttcttttcctgttatctcctaatctttttccatatttgtacgtggctttttcttgactgaattagattatgcatgtgactttgtattcttcttttaccaagttattttataaaacctcccccaatttttagacatagttgggttttatatcatttttattagctataaaataatctgtcatggttttactgcagtgtaaacgttctcttactaatggctatttaaattgttcccaattttttattatgaaaatattacagatttatataaattgcattttttgtttaattattctctgggggtaaaatttttaagaacagtgttaatagaaataaagattataagcaacattgtggctctcactgtgtttggccataatgtattgtattgtccctttttcagacctctcaacagcactgaaaagtaataaccaactgagtgaggtggagcatgcctattatcccagctctttttgggaggccaaagtgagaggattgctggaggccaagagtttggggttacattaagctatgtgccactgcactccagcctgggtgacagagcaagaccttgtttctattaaaaaaaaaaaaaaaggcagtagccacaacgtacttccccttcaaaacaagattctgtaatgataaatgctttatcagtttacatttggagacagatcagattttattaagaatctcttatgaattcaaatactgttatagcaaaaatactaaattactttgggaatcctgtctatatacaattgtccttcagcatactcagggaattggttccaggactcttgcccccccacttcataccctaatccgtgcatactggagtcctgcagttggccctgtggaaactgtgtatgtgaaaagttggccttccctatatgcttgtttcacagctctgtgtgaaatgtagtgttttctttttcttttctctctctcttttttttttttttcttttgagacagtatcttgccctgctgcccaggatggagtgcagtggcgcgatctcagctcactgcaatctctatctcctgggttcaagtgattcttctgcctcagcctcccgagtagctgggattataggcatgcgccaccatgtccagctaatttttgtatttttagtagagttggggtttcgccatgttggccaggctggtctcgaactcctgaccgtgggtgatctgccygcatcggcctccaaagtgctaggattacaggcgtgagccaccgtgcccagcctaatacagtatcttcaatctgcatttgattgcaaaaaactgtgtataaatggacctgtgcagttcaaacccatgttgttcaagggtcaactgcagtttactacaatttcacggagacatgaataccrtgtgtttgtttcatgagaacaaaagaagagccgatgagcatgctacttaagctgtctatgtcttgatttcgtcttctgtaaaatgaggatgataacaacgtttctctgtaaggttgtttgatcagtagttgagataatctctgtaaggtacttagcacagttcctggcatgtggtaagtgctcaataaatgttagctgctattagctgctggaaacacaacacacacacacaaaatacgtatatgtatatatacacataagtgtgtgtgtgtgtgtgtatatatatatataaaatctagtgatttcratgtgtttgtataatttttagaaaatgggattctaccagaatgtgaacatttatggtcacctgcctggcctaggactaacccaggagtttgtgtttcactatggaactttgtcctgtagatctatagcaatcccttgctttaacaacccagttgactactattttagattccaggataatatttttgatgtgctgattttgacagagtaatggtcctgtcagtaaacagtgctgcatttgtgattgtggtacgttttttctctatgcatctcaggtacaattccagcactccccaagaatgtctagattctctaggagtgcctctgacatcattgcatgcacaaaagtgctctattccagcagcagcactgtcatggtgagatctagtgagatagaatatgaatattgttagttttcaaatgcgtggagagagattcataaaggaagaatggaaaaagacatttgttattatttaaaggggtttaagtctaaatttgaatagttttttttcctccttcagcatagagatgtctgaataaatgaagtctgcatgtaaaaatgcactgttggaagttctgttagcatgaattgctgataacagtgatttgagtgcaaacactttagaaatccgtcatccattcagtctgccctgaactttgacactgtcattctggtgatgatgagaaggtggagctactcttcccaatttcctgctttggcaaggctctcagacctagaaatgggatgagtaggcagctgcatggtgcctcttaacattgagatatgtgctctttttaagtcttacctcctaatctgcctttgggattatgctactggtgtcatactaacatcagaggtggtacaaacccaaggggctaattctctcactctcctttcccttgcagatgatcccagccctagactcagtgcacaagctcaggtggctgaggatattctggacaaatacaggaatgccattaaacggaccagccccagtgatggagcaatggcaaactatgaaagtacaggtgataatcatgacararatttgagtagtaaacttttatatcatagtgataaaggtaatctgaatttaagtggcctttaaaagaaagaatagctaagggagtcagtttactacctcaaaattacagactgcctaaacaaatgtttaaattgatgtccttctctggattctcccrctagmcctgggtacccctgaatgttcaaatgccttagagttgtcctcctttgcatctggggtgactggcccacagagagttggggcatattttaatgggaggaggttctttttcaatgtctacagctttgtaattttatccagttatgcactctcaatatagctgtgggagcaacttgtcccaaaagggacaagttatccattgtcacctggtacttattttaaaggattctgttttcctcataatagaatactgaatagctttcagaaaaatgagatatagtccccaagataaatgaagagaaaaagtgtataaaagtataaataggggctgagcacggtggctcacacctgtaatcccagcactttggggggccgaggtgggcagatcacttgaggccaggagtttgagaccagcctggccaatgtggcaaaaccccatctytaccaaagatacaaaaaattagctgcaagtggtggcagatgcctgtaatcctcagatggttgaggcataagaattgcttgatcccaggaggcggaggttgcagtgagctgagatgacgcttactgcactccagtctgggcaaaagagcaagaccctgtctcaaaaaaaaaaaaacaaacataaatartatactgcataaatatgtgtttatgcttatatgcacgtagagtatctcctggaagaatctcccaacaaactggtcacatgagttggctctgaggaagactcctaggaagcctcagagggagagtgggcagaaaggagaacttcctgtatttttttattttgaatagtttccaaatagcagaagaattgaaagaataatacaatgaaggttcatctaccctctatctagacttatcaattcttgacattttgccacgttccgccatatatagagagtgtgtgtgtgtgtatatatatatgttttgtttttgtttttgtttttttgtgagacagtctcactatgtcacccaggctggagtgcagtggcacaatcatggtttactgctgcagcctcaaccttcccaggctaaagtgatcctcccatctcagcttcctgagtagctgggaccacaagcacgttccactgtgcccagctaacttttgtatatttttgtagagatggggcttcgccatgttgcccaggctggtytctccctatattttttcctgaagcatttgaaattatttccgaagaataaggatattttcatatatgaacacaatatatttattatatttatatatttttttgtagaggtgaggtctcactatgttgcccaggctggtcttgaaatcctgagctcaagcgatcttcctgcctcatgcctgtccaaactttttattcgttttgattgtatacatgtatgtgttgtattatatgttcttttgtgtgtgtggtttttttcgagatggagtcttactttgttgcccaggttggagtacagtggygcaatcttggctcactgcaacctccacctcccgagtttaagcaactctcctgcctcgacctcccgagtagctggaccacaggtgtgtgccaccatacgtggctgatttttgtatttttcatagagacagggtttcaccatgtttttcaggctggtcttgaactcctgacctcatgtgatccacccaccaaagcctcccaaagtgctgggattacaggtgtgaggcaccgcacccagccgtgtattcttgattaagacataaaaccaactttggaaaccacagatctgactttgttgcatgtgtgatttggtcccttgactcactcttgggtgtagcaggaagacctccagtagagagaatcaggagaccttaacccatagtcaaccttggccattggccaaccaagaaatttagagcaagccattttctgactgggcaggagtccatgtctataaaatgagggtataaaatgatttttgaagcctcttttagttctctggttcagtgattctaagatgttaactttattaagttaatgtgaactttcattattttgcattagttcattgttttgcattagtattgggataagaagtaaaaccactctcttctcagcaactagtctcttgatacataattgttgctattgataattcagttaagtatttgaagtttgttttttctttcttttttttccagagaactcttattattagtcaatggtaatttattcttgagttgctcygaatacctactagtgccataatattccaaatgaacctgggtatcygtttcttgggggtgggttttgtttagaggttatgggtgatggtgaaagtgcacatgattctccccgtgacgaagcactgcagaacatctcggctgatgatctcccagactctgcaagccaagcagcccacccgcaggattcagctttctcttacaggtatttcttttataggatttgggactttagggtttggacttttcagcaccattgcagtcacgtcaagtcaagtgatgttttgagtcaataaatgtataaagcagggagagaaaaatgaaatgctgtttactaagaagactttgtttcagttgtagatgttatgtatcaaaggtgttaattcaaggatttaaaaaactcgctgggcgtggtggctcacgcctgtaatcccagcactttaggaggccaagacaggtggatcgctggagcccaggagttggagaccagcttgggcaacatagcaaaatcccatctctataaaaaagaaaaaggaaaaaaaaaaaaagaagaaagggtttcttgtcaggtagtgagcttattttgtggcgtcatcagcgtttctaaagagatgtgccagaaggcattccaaatctgggtgttgggrgcttctgacttccgtggtccctcccactctgccataatatgcttttccgattcttatagcacccgtcatggaactcagtgtatgaaaaaaggtcagaaaggatttgttgtttgattctggtgctttaaagaatggtccttgccccgagcacacctggctccttgggtaattagaaagcctgttcttttaagtggagtgtcagttaagaatcatcttctttaaaatgtttgaaacatttgagtcctaaggtaacattaatttatatagtaaatatttgtaaaatgtgaccatatctggataaagaaattaatgtattttctactcatttttcagagatgcaaaaaagaaactgaggcttgctctttgctctgcggactctgttgccttcccagtgctgacccattcaacaaggaatggtttaccagaccacacagacccagaaggtaaattgctgcaggatcgtttaatttttcctatgtttatgggttgcaccatatgaaattgccagtattcrgctgttgaagctgtacagcaattccatatggttcaacttaatatgtttacattagtatcacttaagggcactttgattactgatgatttattaaagtattttctaattgggagtggcaatacagcttagttctaatgatacrtgacaaagcagaattgacgtcccaaatgctgaattagcttatttaagcacatggaaattctcaagaataacagaattcttgtatcttttatttagacaatgaaattgtatgcttcttaaaagttcaaatagctgaagcaattaatttacaagataagaatctaatggctcaacttcaagaaacaatgcgctgtgtgtgccgttttgataataggacttgtaggaaactgctggcttcgattgctgaggactacaggtaatataccccacctgttcagcttttaaacctagttgttagctgcaagtgttttcttttttatccttatttcagaaatgaatctaggcttcctacaaagtgcttggctgtattttcctggatgtagatttctgtgttagtctgttctcacgctgctgataaagatatacccgagactagccaatttaccaaagaagaggtttattggacttacagttccatgtggctgggaggcctcacaatcatggcggaaggtgaaaggcacatctcacatggcagcagacaagagaagagaacttgttcagggaaacccccctttttcaaaaccatcagatcttgtgagacttattcactatcacgagaacagcacaggaaagacctgtccccattgattcaattacctcccactgggtccctcccacaacacatgggaattcaagatgagattcgggtggggacacagccaaaccatatctttctgccccttgcttctcccaactcatgttctcacatttcaaaaccaatcatgccttcccaacagttgcccaaagtcttaactcattttagcattaactcaaaagtccacagtcaaaaatttcatctgagacaaggcaagtcctttctgcctatgaacctgtaaaatcaaaatcaagttagttacttcctagatacaatggaggtgcaggcattgggtaaatacagccattccaaatgagaaaaattggcagaaacaaaggggctacaggccccatccaagtctgaaatccagcagggcagtcaaatcttaaagcttcaaaatgaactcctttgactccgtggctcacatccaggtcacgctgatgcaagaggtgggttcccatggtctttcttttttttttttcccccgagatggaatttcgctcttgttgcccaggctggagtgcaatggtgcgatcttggctcactgcaacctctgcctcctgggttcaagcagttcccctgcctcagcctcccaagtagctgggattacaggcatgcgccaccacgcctggctaattttgtattttttagtagagatgggatgtcaccatattagccaggctggtcttgaactcctgacctcaagtgatccacctaactcagcctcccaaagtgctgggattacaggtgtcagccaccacacccagccagggttcccatggtcttaggcagctccgctcctgtggctttgcagggtatagccacttttctggctgctttcatgggctggtgtggagttgctggcttttctaggtgcacggtgcaaactgtcagtggatctgccattctgaattctggaagacagtggctctcttctcacagctctactaggcagtgccccagtagggactctttgtgggggctccgatcccacatttcctttccgcactgcccttgcagaggttccccatgaggaccctgcccctgyggcaaacttctgcctgggcatccaggcgtttctatacatcttttgaaatctaggtggaggttcccaaaccccattcttgacttctgtgcacccacaggctcaacacctcatggaatctgccgaggcttggggcttgcactctctgaagccacagcctgagctctgtgttggcccctttcagccatggctagagcggccggagggcagggcaccaagtccctaggctgcacacagcatggggaccctgggcctggcccatgaaaccatttttcctcctaggcctctgggcctgtgatgagagggtctgccatggagacctctgacatgccctggagacattttccccattgtcttgggaattaatattcagctcctcattacttatgcaaatttctatagccagcgtgaatttcttctcagaaaatgggattttgttttctatcgcattgtcaggctgcaaagtttctgaacgtttatgctctgtttcccttataaaactgtatgctggccagcatggtagctcatgcctgtaatcctagcactttgggaggccaaggcaggtggatcacccgaggtcaggagttcaagaccagcctggcygacatggtgaaactctgtctctcctaaaaatacaaaaaattagctaggtatggtggtgggttcctgtaatcctagctacttgggaggctgagacaggagaatcgcttgaacctggaagcggaggttacagtgagctgagatcacgccactgcactccaggctgggcaacaagagtgaaactctgtctcaagaaaaaaaaaaaaatgaatacctttaatagcacccaagtcacctcttgaatgctttgctgcttagaaatttcttctgccagatactctaaatcatctttctcaagttcaaagttccacaaatctctagggcaagggcaaaatgccaccagtgtctttgctaaaacataacaagagtcacctttgcaccagttcccaacaagttcctcatctccacctcagcctggaccttatcgttcatatcactgtcagcattttcgtcaaagccattcaacaaatctctaggaagttccatastttcccacattttcctgtcttcttctgagccctccaaactgttccatcctctgcctgttacccagttccaaagctgctttcacattttcgggtgtctttttagcagtaccccactctcggtaccaatttactgtatttgtctgttattatgctgctgataaagacatacctgagactgggcaatttaacaaaagaaagaggtttaattggacttaacagttccatgtggctggggaggcctcaaaattatggcggaaagtgaaaggcacatttcacatggcagcagacaagagaagagagcttgtgcagggaaattccgttttttaaaacaatcagatctcttgagacttagtatcacgagaacagcacaggaaagacatgcctccatgattcaattccctcccacaacacatggaaattcaagatgagatgtgggtggggaatacagccaaatcatatcaatttctaagcaacatatttggatatttactctggaaatgtagttacaaatgagcagttccaaatagaagagtgcaatttacttcagctttgcacaaaagcaggtaaagaggtatgcctatattttgaggctagaacaactagaatatcatatttcttttcttagtggtgataggaaagcctactttcctggaccagagaagcagatgtaagtagccttaggaattgctgtgctttttctgctgccagtcccctgctcatgattatggagaaaaatgtaactgagatgcttaggtagtgaggaggcttcaaggcttagggaatgggcactctagtaaatgtgacatttagactataagcaagtaattggtgggggatgtttgtgacctagtgacatataacctgtatttgttgttattgttggtcatctgtagctgtcaatttcctattaagtatgaggtcctatagctccagtataaaatacaccaagtatgcagaggggcttagtaacatttagtgaattaggtaactaagtcttcagccccatagatcctcccaaacaaaatgcaaaatgggtgtctgttctgcagctggcaccatgatcagtctctaccatgtctgcagcctgacatgctactttgtatatgtgctactgaagagagcacagacatgctrctttgtaaaaccagtctgtgcagtaatttttctaaagaaaagttaggacccttattcttcaaagagagtatgcactgaatatatctgatgtcatgcaaagtatttttccttttagaaaaagagccccatatattgcttatctcactcgttgtcgacaaggactacagaccacacaggctcacctggaaaggctattgcaaagagttttgcgggacaaagaagtggccaatcgatactttaccactgtctgtgtgagattactgcttgagagcaaagaaaagaagatcagggaattcattcaaggtaactcaatacctttagtttaagcatctcttcacctgtaatactgttgggaagatttagaaatactgttttgttttgctagtttgttcaagtatctgcatgccttaaatacccaattattttatggaatcttaataaattaaactttgatgtcaaaccaataaattgcatttttctcctggattgaatatctgtagcttactttttaaattggggacattggtaaatttttggatctatacaaattttctcattttttttaaaaagccaaacatattttttttagaaacttttgagacggagtcttgctctgtcgccaggctggagtacagtggcgtgatctcggctcactgcaacctctgtctccctggttcaagggattctcctgcctcagcctcccaagtagctgggattataggcacgtgccaccacgcccagctaattttcatatctttagtagagatggggtttcaccatgttggccagaatggtctcaatctcctgacctcgtgatccgcccacctcggcttcccaaagtgctgggattacaggcgtgagccactgtgcctggcctagaaacatatttttataacaaattccttgcacttaaactttcacatatttcttgctttttctcctgatttaattatatggctacatattgtcctaaaataaactacactgaaacacttttggctttaagatcatggtgtctgcatagctagtgattaaaattatttctatgatttcctttttaaaattatttagatagtttttattaaactatttaaaaattattattttgctttggagactttcagaaactcaccgcagctgacgataaaactgctcaggtagaagattttctgcagtttctttatggtgcaatggcccaggatgtcatatggcaaaacgcgagtgaagaacagcttcaagatgcacagctggccattgagcgaagcgtgatgaaccggattttcaagctcgccttctaccctaatcaagatggggacatacttcgcgaccagtaagtacttctatgttgagtgcctatgtggaactacatagggatctaccaggtarcccatattttaggcaagctatacgtgtaacttagtgtctgattgtaaaaggaaattcattggttaccatttttcacctgtcagagttacatgatcacaaagaataatacccagttttcagggatgtgggcagtcaagctggaaggagtagaaattggtatagcctctttggaaagcactgctgtttactctgccttaactaatcttcccttccttctcgtgattaagtcttacttatgcttcaggtcttgacttaagtatcgtttccctgatgaagcctgtcctgactaggttacatcctgttagggctctctcaggcctcggtgcctttctttagtacttgccacagttgccatttgacatctgtttgagtcatggtttctgaacccagccctactaacatttggggccagattgttgatgatgtgggaggctgtcctgtgcattataggatctttaggagcatccctgacctctacacacaagatgccagtaataccccaccagttgtgacaaccacatgtcttcagacattcccaaatgtcccttgtgggggcaaaattctcccctgttctttttttctttttcttttcttttgagacagggtcttgccatgtcacccaggctggagtgcagtggcatgatcacagctcactgaagcctcaacctcccrggcttatgtgacaagtgatcctcctaccttggcctcctcccaaattgctggtactataggtgcacaccatgacacctggctgattttgtttttatttatttatttagacagagtgtcactctgctgcctaggctggagtgcagtggcgtgatctcagctcactgcagcctctgcctcctgggcttaagcgattctcctgcctcagcctcccaagcagctgagactacaggcatgtgccaccatgccctgctaattttttttgtatttttagtagagatggggtttcaccatgttggccaggctggtgtcgaacttctgacctcagatgatccgctcgtcttggcctcccaaagtgctgagatgacaggcatgagctgttgcgctcagccttgtttattttttgtagagacgaggtcttgctgtgtttccgaggttggtctcaaactgctagacacaagcgatccttctgcttcagcctcccaaagtgctgggataagagctaggataacagggcatgagccaccatgcctggcctctcccctgttcttaatcactggtttgtgtgatcctttgatgaatgttctctccacactgccttattccctctgcgagaccaggaaataatgcttttattaaccattctaacagcaccaggcacagtggttggcttctaatatatgctcattatatatttattaagaatgaacagttggtcgggcttcatggctcacacttgtaatcgcagcactttgggaggccaaggcaggtggatcacctgaggtcaggagttcgagaccagcctggccagcatggtgaaaacccatctctactaaaaatacaaaaattagctgggtgtggtggcatgcgtgtatagtcccagctgctcaggaggctgaatagggaggatcacttgaacacaagaggcagaggttgcagtgagctgagatcgcgccactgcactccagcctaggcaacagagtgagactctgtctaaaaaaaatgagagagagagaatgaacagttaagtatttgaataccagaaaatgcttggaattgtatggcttgtgagttatatctcaataaagctgtttaaaaatattaatcctggctgggcgcagtggcgtatgcctgtaatcccatcactttgggaggccgaggcaggtggatcacctgaggttcaggagttggtgaccagcctggccaacatggtgaaactgtgtctgtactaaaaatacaaaaattagccaggcatgatggctcacacctgtcatgccagctacttgggagactgaagcaggaggattgcttgaacccaggaggcagaggttgcagagagccaagatcacaccactgcactccaacctggacaacagagcgaagctctgtctttaaaaaaaaaaaacacacacacacacacacacaaaacaattaatcttgggaaaaattaacctggaatagtaatagcgattatttttgggtaaagagactagggaagattttgcagttttatttttcctcctctgtattttctcctttttttgagatagtctcactctgtcacccaggctggagtgcaatggcgcaatcttggctcactgcaacctccacctcccaagttcaagtggttctcctgcctcagcctcctgagtagctgggattacaggcacatggcaccatgcccagctaatttttgtatttttagtagagatgggttttcaccatgttgctcaggctggcctcgaactcctgacctcaagtgatccacccaccttggcctcctgaagtactgggtttacaggcatgagccaccccgcccggccttctgtattttcttgagcactgcttcataaccctgtttctgacctcaaccatgttaaagttgttaccatgcttcttaacagtgacagtggcttactgtgcctgactcccaggggtccgtgtaataggatcctcggggtgtgggttatgtttgtatgaaatatttttcatggagattttcagatgttgcatagatatttgagagaattcactttcctgtgaagtgggttaggatccttccaatctgccttcctcatttgtttatggtctcacagtgtttggcccaccccagacttctgtgcttaatatgccagatggggcctgttttctctccagagcactagtttttgcctttaggcataggataaggaatggggacattcaaaccatatagactacaaacagcaactttgaaggagattatttttccccaccctccgtggcatttctgtggggtttatagagggtggaaagccaaaagaggaattggaaggaacacgagcagccaggaagctgggttcagcccctgttactgacacctgtgtagcttaggcaagccttttccctttttaagcctacttctcttcatctacaaagtgaaaggttgggtgaatggtggaggcccttctccatgtaattaatatctttggtttctggcttttgatccttctacttcctctcactttttccccccctctccttttcctctaccttacaaaataatgtgtccaagcagctcctaccaagggctcctctcctttcttccttgcagtgctgtctggtccagagaggaaagactccctcccctccctgcatccccttggctcactcagcatttctgagcagattagaaagaatacttatctaagaggctcaactctaactgtaatccatatctagctgtaatccrtatctagtcaacatgtttcacgtgttttgtaaaamtcaatgatgactgtttgtgtaccatattttctgaaatgaatgtttacatgtgtattttggggggttttcagggttcttcatgaacatatccagagattgtctaaagtagtgactgcaaatcacagagctcttcagataccagaggtaatacaggtttatatagcatgggtaatgttaaytaaatgctgcgtgttattataccatataatgttaccacgtgttcaaggaactgaaatgtgataaaatataaaacatcattttcactctatgtaattcagtctaactgcgaagttcctgaagatgctttcagggattaaaattccctggtatgaaatagtagaaagccagttgtgaggagcccttccttgatgccacttctcaagtcagccctgctctcaggggcagtacctctccatcagtgcttttatagtcaggtttctacagaaatgttttgaagaagtgggaggctgatagcactccaaagagtgagatatgctgtctcaggagaggtcattgagtctgcatgtgatctcagattaccttttagtcattgatattagcatttttacctgtcctacatctcttagaaaataagaaaacatgaaaatttcaggtatttgagctttctgtttgtttttgttacaacccccactaatgagacatgaattagcataaaattttaaattatctttrgttttttgaatctgttatttctggaattactgcaacaatggtacatatttttaaattaacctcttttatcacatgtgataaatctagttcctgtgtagagccagtttaagctagttttaaggaaaagtcctcttttagtagtttgtacttctggaatcagctactaaatgtagagaagttccattctagctatttaagaaagagaatggtttgaaattttgtgaattctagcttctgtgctgttgaatgccctttttctattaatggatatctggtttgctgtattttaaaattcagagcaacttatttaaaagttctaaagttacaatctttagtgaaggggaaaggggcctgcaatatggttttaccaaagagaggaaaaagcaaccacattatcctctgcctcctgacacggaggttgcagtagtcactgcgcagggttgccactggattcagaatctgtatattgtctatggtctcacttaggtttatcttcgagaagcaccatggccatctgcacaatcagaaatcaggacaataagtgcttataaaaccccccgggacaaagtgcagtgcatcctgagaatgtgctctacgattatgaacctcctgagcctggccaatgaggactctgtccctggagcggatgactttgttcctgtgttggtgtttgtgttgataaaggtgggccccttactactatcagttaaggagttatgtggcattctgagcaggtggcacagggcttcacacaaccatagatatcttggctcttttccaagtcacaagctctgggttactcagaaagaaagtgcctaatgtcaagatttgttcttttgagacagaatctcactctgtcacccaggctggagtgcagtagygtgatctcagcccactgcaacctccatctcctgggttcaagcaattctcatgcctcagccacccaaatagctgggattacaggcgtgcgtcaccatgcccagcgaattttttttcatttttgctagagacagrgtttcgccatgttggccaagctggtctcgtggtctccagctggcctcaagtgattcgcccgcctcagcctcctgaagtgttgggatcatagacatgagccaccgcgcccagccaagatttgttcttaccttaggattttcgaaagaaaggatgggaggactagattcctagatgaacattttcagctaaaaagcagtgcctaggttgggcgcggtggctcacgcttgtaatcccagcactttgggaggccgaggagggtggatcacgaggtcaggaattcaagacyagcttggccaagatggtgaaacctcatctctactaaaaatacaaaaattacaggctcctgtaatcgcagctacttggaaggttgaggcaggagaatcacttgaacctgggcagcagagcttgtagtgagccgagatcacactgctgcactccagcctgggcaacagagtgaractccatcttaaaaaaaaaaaaagcagtgcctgaagttcttagttggggctcagtatataattattggatgaatggatgagggcaggttctttatattatacttttaccatcttctttaatatggaattccttgcagtacttgtcatataggctaccaaacttaccaatctccttcctcttttagcttcttattttgtaattgtagtataaaagtactgacatctctagttcttgttgactttaaaattaaagtttcatcatttaaatggtttattttgaacattttgagggtgaccatgtagtttgggtgcacacagccactaagtgatcgtatcacttgtgtgttgcagtcagctcagcccagctgttgctgtctaaagtgtgtgtgacatatgtcttactatttcttagtgttgtgatatttctacaacctgaacacttagcttggagggagaaacccatggggttggtcgtcacagctcctcctgttggccatcgctcttctggcttccacatgtgataaatctagttcctgtgtagagccagtttaagctagttttaaggaaaaggccctagctcttcctcttaaccatttaacagcctgtgccctttctcaccacatgaaaaaggtaaaaaaaattcaggagatgtcctctgttacctctggcaacagagggcatgtcatcttttttagttttttctttctcagcttattctccctggacttaccagatataactcaatttgcctacagcatttattttgttatctaacattctgaaatccggggatgttgagtaagaccacagagattagttcagccttcttagaaatcagtgaggttaaggacttgcaaggatagaaacctctagatagattagctgagattagaacctgggttgcctttccagcatattattgctactcatggaaactagggttcacagattacttccaaaaaataactttggggttgttttcaaaaggattggtatgtctttcatwgaagaacattcgaagaacacttaaatgattttggcagagctatgacatctgagtaattgattcttttttatttttcacttctctaggcaaatccaccctgtttgctgtctactgtgcagtatatcagtagcttttatgctagctgtctgtctggagaggagtcctattggtggatgcagttcacagcagcagtagaattcattaaaaccatcgatgaccgaaagtgaccaagaccaaggcccaccaaggcagcagactgttaatcagacaaacagatctctgagaaggtgcatcagctgctttgaaggctgaagattgttttgtatgatactgcacagcatcaggcattttaaagcagatctttactaaacaggttaatgagctaacaagcaggttctctcgtctttgggctctttcctttctgagttgcatattctattttcttgtccccaagtagagactagtactacaaaaagggaccacatttttcaagtatttctaagtataaaaaacaaaacaaaaatctcttaggaaatgtctagacctccattcttggattccctttctttccttttattttaaaaaagaacagtacccctcttttaagatgctgtcttacattaatgagcatctaatggaaagaaggtatgagttgcactgaggattagaatagtggtgcgttagtggcattatctataaatacactcacctaaattgaaagctaagaaggaaatgtaaatataatatatatttatatttgatgtaatatggacatctgcagattctaataaacaaggactattgctgatagtaggctgtgacatactgtcttgtgaaatggtttccttgacaaaatttaagctgagcttaaaagcaaaaaacaaaaagtacacagaaatatttattaaaatgtaatacagtttattgaactttctaggtatggagtttgatrgacagggctgcctttaatgagtgtgaaggtcactaagtcacttagacatctcaccgtggaagtttgtgagcctgcattaggagatagactgattaccatacatgacataaaaaggaacagtggatagctcatactttatggtggttcttctcctccgaaataatatactgcagaaatcccagacagagctccttacaaacctttaattgtaatatatttttgatgattattcacattgaatgcacagaccaagaattcagtgaatgtcattttttaaaaaactaatttgtattgtctgctctagtgatacaagttttactagtgataaactattttaatcaaccatactattcttatggaaaaaaatatctattttggcaggtttctgtgcctttatttccctcttctgaaaaaaagtctgtgttttcatagtttggtttgcattgtatatcaataattaatcaggaatgggttttggtgcctgaaaaattggccatggaggcacaccaaagcttcaagcacaagtcttgtacatgggccatcactgtctggtttcacttcgtgtgtttcctaaacacatttagctgcttttttaacaaactcagccccatacttgagtcccttgttgttgggagcatttccaggcatcttttaagggaactgtgacaaacagcctcgggcagatgaacacggaggctctctgttgtctgtctctgagatctttgtgtctgggaatgcctaaagattttatttttttttctttgtttttattttattttattttatttttttgagacagagtctcaccctgttgcccaggctggagtgcaatggtgcgatcttggctcactgcaacctccacctcccagttcaagtgattcccctgcctcagcctcscgagtagctaggactacaggcgcatgtcaccaagcccggctaatttttgtatttttagtagaaacggggtttcaccatgttggccaggatgatcctcaatctcctgacctcgtgatccacccgccttggcctcccaaagtgcgggattacaagcgtgaaccaccctgcccagccagaaactagattttctttatgcctccaccccttcttattcatttactttacaataccaaaataacaaattgcataggagtgtgggatgtggtttctgccttctagakagagatcagaattaaactagtactatgaaatgtccttttgaatgttaggtcaagaaatccatgtacagagtcgtgcacttcattggctgtaactgtcaaacttgccttgtattagaagttaaatcccatcgtaaatacatcacgaggccagctgtgtgatttctgagacctagatgagagtccatttacttcagcctttgattcagtaaatgttaagcagcagaagacttcgaatggttgaaattcattgttacaggatttaactcataaaccaatgagagattttttttttctctgcaatggttgctaagtctattccatgttaacactgtggaaataaatatgaagatgtggacattgcatcggggctcttttctgtggaagagaaggtggtgggattggggtgaagggctacactggaggcaggagatagggctgtgctgtgttggagccggggctgagggtagaccccccagagatttgacatctgtgacacctgtgaaatgggttcgggtgctcatgactccatagctggcggaggagcacagcacagctgttgcaggggcagctaaggtttcctctgaaaatctgtcaggagcaaggactactttggcattaaccatcactgtttgatttcttgacaggtatgtgagatggggagtgatttgattttttttttttttttttaatagaaaagaggaatagttgttccccaaatgtttcttcctccactgccttccagtactttctttacatgaaagattagtgtaaaagtacaaaatcagcccaggaaacattcagcagccactagttactacatagaatttataaagtggatgttaaatggagagagagttggctcaggtcccctgaaatcttgtaggattaacttctctgaggaaaagaaaaatcaggtttgcattttgtattaatattctgcttttagaagtaatagaaatacaagttgaagattgtctttacttacaaaattatattttaattttttttgagacatagtcttgctctgtcacccagtctggagtgcagtgctgtgatctcggctcactgtaaccaccatctcccagtctctagtgattctcatggctcagcctccctggttgctcagattacaagtgtatgccaccacacccagctaatttttgtattttttgtagagacagggtttcgccatgttggccaggctggtctcgaactcctggcctcaagtgatccgcctacctcggcttcccaaagtgctgggattataggcgtgagccaccgtgcccaaccacaaaattatatgtatatatatttaaacgtgtcaaacattttgctttctttctccattttaggtaaaatctcagccacagtaattgctttcttctgctttttctttataaaaacctgcttatgaaggccttctgatacagatagttaaatcgctgtagtaggaggctcaggttttctaagggattgcaaatgtgctgcatggtttttctattcctatgtcctggaagcctttgtttaaagtgggctttacaaatgtgtccctgaggtgcgtgagcaagagaacaatctcagccccaatacgggggctgtgttcttgccgtaagaatctgtagctgactggtgtgctgaacccgggcactctttttcctattgtttgccatggaaatttccactttggaccgagtaaggtcaactaggtgttttaaaattgtttttctcctatgtgattgggtgtgaagagggaaagtaggaatacactcagaattattactggattgcataaaagtgatagaagtgtagtggggttcacttcctcaattggtgcttcctagatttttctctcccatctcttcctgctttgtttctttaaagaaaaggctgttgtctctctttttaaatatttaagtctagtgagtttattttgtacgcaattgctttaattttaagggaagtaaatctgaaactatcttgaagcccaaaggatttttagtaagtggattaacagtgatgaggtatttgcgattactttaaatgccaaaatgcttgagaactttgccaggttaaaaattacttaatatattttagaatgtaggttagaaagtagtaggacaaggaatagctttattactcttgagaacacttggataaatgaaaatatagtttgcttccgtgttaagttgtggttgagctatggagtgaccctggagctgccgcatcccacaggcctgagctcagcaagggttcaattcaagagagatgacgtctccacttggataatggcagacagtgtgggtagcggccatgcactaggggaattcacctctgtcaaattaatactctcctgtctactggattcttcttgtgcttcacctggattaaaaagctgtactgcctcttttgaaacagataaaacctttctataagtctcaattaatgagcttgcacaatcttgtatatgtacaggaaacccctcctgtctcctaatgtgattagtactgtaaaatattctataaaactgattaaaaggggagagcagtttgattcacagggttttatgtttctgtcatctattttatattcagaagcatttctgaaaacgtatttgacttccgaatgttctgatgttctccgtgaattcacacacatcttttttatctgaacaataagggtgtttgctaagtatggcacaagaaggaactagaatgacctggcagtaactaacacaatggtgaacatctaagggtttttttttttttttttttgagacagggcctggctctgtcgcccaggctggagtgcagaggcaggatctagggtcactgcaaactctgcctcctgttctcaaagatcctccagcctcagccttcccagtagctgggacaacaggcatacgctaccacacctgactaatatttgtattttttgtagaggcagggttttgccatgttgcccagtctcctgagctcaagcgatctgcccgcctcaacctcccaaagtgctgggattacaggcgtgagccactgcacccagaccttcatctatggatttaacagtttctgcctaatgcctatatttggtagctatttatcatttttcattttgaaagcaaaagtgttgccatctaatcacaatattcatttaggcctttattaatctttccagccaagggaagttacttttgacaaggagtactaactcattcttcaggcttcccttgctggtgagaaggcgcttttcttatattgattgcacttcatttagaaggaaatagttaaaaacttgcttacggcccatttccatttgctctgttcagtatttttttttttttttttgaggcagagttttgctcttgttacccaggctggagtgcaatggctcgattttggctcactgcaaccttcgcttcccaggttcaagcagttctgcctcagcctcctgagtagctggaatacaggcatgcgccaccacgcccagctgattttgtatttttagtagagacggggtttcgccatattggtcaggctggtctygaacccctgacctcaggtgatccacctgcctcggcctcccaaagtgctgagattacaggtgtaagccaccgcatccggcccactcttcaatattaaaacgagtggtatgacgcctagaaccaaaaatagcattcagcttttcttgccaacttggaatttacctgtgtcgcttggactgctgttacgcttgtacccactcaaccctttccgcaagtacagggctccgtagcttttcctcacaggatgctgagctactgacactagcttcacgagcctgcctgccatactgctgcaaaatgggtggtgatcctgtagagagaaaccagggctgaagctcctcttggccataaatgtgtcctccacctaaggattgaagtattcagcgaagagcttttgcttcacttatttcattccagaagaatcctttccatccacttagggtagtaaaatatagcccatagatttaaaaaaaaaaaaaaaaaaaaaaaagacccatgcccagagaaagtgttttagctcatgcctgtaatcccagcactttgggaaacsaaggcgggaggatcacttgagctcaggaatttgaggccagcctgggaaacaatgagacctggtctgtacaaaaaaaaaaaaaaaaaaaaatttaaataagccaggcatggtggcacatccctgtagtcccagctacttgggaggctgaggtgggaggatggcttgagcccaggagttccaggctgcagattgggccactgcattccagtctgggttacagggcgagatcttgtctctaaaaaaagaaaaaatatatatgaccaaagaaccatataggctattgtggagatccagaacaccgtccacattttatgctaaagcggaaacagctctcagttccaagtccttggacctgttgtaaacaatgaatgtgaaaaccatggtaatcttatttctgttagctgtttaggaattcagcgtattgctggtcgaaatatatgctgtgacccaccctgaccaactagatcatctttggggatggggcccaggatttggtgctctagggagttatactatataaactgtttcccaaacttccctgttgagaatcacctggtattcttgttggtatataagagtccataggggagggaaccaggaatctttgaacaagtcctcccagtgacttttattttccagagagtttttgtttttgagacagggtgtcaccctgtcacccaggctggagtgcagtggcatgatcctagctcactgtggtctcaaactcctgggctcaagtgatcttcctgcctcagcctcctgagtagctgggaccacaggtgcatgccacaacacctggctaatttcaaaaaagtttttcagagatggggtcttgcttgctatgttgccctctctggtcttgaactcccaggctcaagcgatcctcctgtctcagcttcccaaagtactgggattacaggtgtgaactgccatgcccagcctctccaagagagtttgagaagcaccaggagagcttgcacttgatgaagaatgaaccagtggcccgcctaccctcatcgcccacctggggaggttcataaaaccacagactcatgatcccaccccatacccattgaatcaatttctggggaagatgccaggaatctgcatttctagcaagctccccatctcactgaaactcatgaaaatgtatgatccactgtgaaagtggttaactcctaaacacttggcttcatagctcacaagggtaataagcatgaatggggaagcccctttaaaagaatgagaattgttagcctacagccaatccaatgattcctttaaggatagctctttttatatgcttagaatgaagcattttctttactcataactgcctgttatgtaacgctgtttccttagcctcaaattgctaaacatttccagagaatcatggtgttcaatgacatacccaaatttatgtatgaaaaattcttagagtctaatctttctgtgtttaagcttttaaaatgtttttttgtttgtttgtttgttttgtttttgggttttttgtttgagatggagtctcactctgtcacccaggctggagtgcagtggtgcgatttcggctcactgcacactctgcctcctgggttcaagtgattctcccacctcagcctcccgagtagctgggattacaggcatgtgctaccatgcctggctaatttttgtatttttagtagagactggggtttcaccatgttggccaagctggtctcaaactcctgacctcaagtcatctcctgccttggcctcccaaagtgctgggattacaggcgtgagccaccgcgcccagccagttgtttcattttgattgttttgtgaccattcataactggtgtcccatgtaaaataactgcattggttcccacagcccttgacctctgacttcacttttgtttccccagtgctgcctctgctgaaagtaaaagaatttctcctcttctacttctcctcccacatttgatgtgtggacttccatgcctgggttccctcccctaggtccctttacattttgatcactggcgaccctattttccttttcgtgtggctgtggcggtgacagcagaggctgcatctgctgctgctgctttggggcagcatgctgtgaggagaagagtgcaatggaaggggacagatgacaggaagtgctcagggccatccgattgtcgcagcgtcctcagggatgcccctgccacaagcccctccacagctaagtgggccataccaatgagcctgaactagtcctttccctccctgggccactcccgccat

SEQ ID NO: 6868 - DNA, 109725 bp, Homo sapiens
agaatgtggcaagcaacggcataagcatttgactaagtattgttcttttaatcctgagactagctccaaggagtatcagttatcattgtacccgttttacagatggagaacttataagaaaggtgttaagtaatttacccaaggtcctactcctttttgtagctattattggttaaattaaggtttgaaaccaagtgcatgctaggtaatcccaaaactccaggattggcacaaatagacagggacaaaggaaaataaccaaagacaaccttgcctcctcagatctttatgtgcaagctccaaatcactcaatctagttcatgaatcaaagaatgccatctttgcctttgggcaattgttacattaaatacataagaaagcacccataataatagacaactgggagctggagtcctcttggtgggtttgaatcctcttgctactatttattacccatgcaccctggacatttccctaacctctccatgtctcacaccccccatctgcaaaatgggaacaatgataggactaacccaaaggctcattgtaaagattaaataatttaatacatccaaactgcttcaagagtgcctagatcacagaaaatactcaatcagtgttagccactgttattctttgtggtccacaaaagaaatcttaagaaacctaagagagaaggaaaacaagcaaattatacttcctcacaagtatccaacccagctgtggaaaatcaaagaaagaaattcaatttgcattgatttcaaagctatatattccctctgtgacctgtattaagcccaagatggtttgagccatttgtattcatcacctcagcctgagctcagaccggtaaacatgatcaaaactgcctccgagccctctgttggaaatatacaactccacatcttctaatttagcttgggcaatgctagttttttaaacttttcctctttcccttcaacctccgaagaggcagccttttgaatattttaacaagacagcaccaggtggcttcaactcccctctccctgctgccagcccctgcaaagcccagaagtgcttcagatagaagctgggttccgtgctttcataaacacaatatagctatgcagagattgagctttttgttgggatttggggggtggggggcggggaagggaactacatcatttagcatcaaaaaactctacatagggcatcccagcttactaagcactttgtcttacaccctcttacttggtcttcataccaattttgaaaggtactcaaggtacagatttttatctcagttttataaaacaggaaaccagatgaatcccaagaagaagaggaggagcttcagagaggggacatgcttttctcaaggtaattcacattgtaagcagttgggccaaatagaacccaagactgtgtgctaatatcatatattttccattatgcagccaattagttgatcagtcaatcatttcataggaacattaatcaacctccaagtgctttgggtctgtacaggtgaaaagcacagtccttggcctcaaggagtcctcacagaccagctgggcaaatgaatgagtaaattgatgataacaattaaggtctctaatcatttcataaaagtcacttcaagaatgcctttattgcttacctccaaaatctgtgacaggtcgtatgctattctaaacactatgatatgtaggaatgatattcaaaataattaacaaataacatgacataggcagcagccatcaacagatgctggcaacaaagagaactgctgacaaacagatggaaaggcacagtgtctaccctcaggtgtccatgatctagcagggtaaacaggcaagagaaataaaatgtgcaacatactaaaagttaaaaaatggtggtgtagatgagcatgaaggagaggcccttctctctggatgtgagggtcataaaactttgttagaagaagcactatgaaggaactcttgaaaaaaataataaaggaatttgtcatggcaataagacagggttcttcctagggaagtgaatgtgcaaaggcttggagacttctaaattatttctttaaagattttacttgagagttttgagttgctataatccctgggaattccccacttgctaaccaggaccctgtgtgtcagcggggaaagcgattttcccaaagtcacacagcgagttgatgcagcatcaagacttagacactcaaccaatgctctccactctgctgtgctgaccaggcatgacttcttggttgatggcgcagctaaattgccatagtccatccatcagagaagctctcatatgtcttgccacacactccatatggtctttgaacttgattttgtcctttgttgtcgaaggaaaagcaagaagagttggaaaagaccactcaacaatgatctgcaagcaagttgggaaaccttgactctaacaaaatgcatttaattaaatgactggcccactgtgtgggatcagagatccatcccggctttggaaaagatttctggtaattatggagtcacatgagacttttggactggagttagcacaccagatgagatgaatcccgggaagaggaggaggaaggttgggaacagtgaaggagtatgtaatcagagtaggaagcaggggattccatggggaagtggacactcagcttcctcagcactagtcctggccaaaattccactcattgtctgttctgtctggaagaaaaagtattacatttaacagacctttaaagaaatgagaatgatctcacctgaggcaaaccatgacattcctctggtctctaaaccacagcctccaccagcaactcctgaataagaactgcaaacaagcaacaacaaaatcagtctttggcaggaagctctgtgcaggggtggtgtttacatgcattcattctaccctctcaagtggaaaaaagtgcttatgcttctcagaaggatgcaaccatgagggattagatgccaagaggtatggcctctgccaaacaggaggaaaaatggttcttcatttccataaacttcctctgctgtaatgtctagtgtggcttggttgctcagttctgattgtgacagttttcttcctggaaagcaggcatagtggcttcagacaagtcattcttcctctcagcaccccactttctgatctgtgcgatggaagcattggacacaataatccagtttccttttcaggttctatggttgtaaaaggaagaatttaattataaagcacaacatgtcaaacatttatttgttcctccattacttcattcattctataaacatttactgagcttctatgatacccaaggctctatgccaggtacagaaaaagcaagtgtgatcaccagcctcaggaagcctagcatctaggaggaaaatctagacatgcacatgtgtaattataccatgtagatgcaatggatgtcctaatagagttacaaatgccatagtgcatagaaacatctcttcctagatggatttcttccatttaggaagctccatagtgaagtcagatcagaaatggatgataaatagatgtgagggcatggaggtgaggagcctagggcatcatcctagcatgaacaaagtttgggtattgtagagtacctggtgcatatggacccatctaccagaaacagaggctgcgaacagtacagggatggaaaacacgtcctcgtctgggcactccttactcaaatgccaaaaagcttaagatgccacatagctttttggagaaaatgccttttacaagtagcctctcctaaaaatgcataaatcatctcttctctatgttatcagaatacacttatatgatagttgttaacttaacccataatagtattcttgtttgtcacctctgctagccttttcctgctttgagggccagcctggtcatatttggcttagtttccctgtgattgaccataccacttgtggtagacactaatcaacgattgtagaatcctaaagaactggggagaggagttcgagtttgagacattccccgaaaaagccatatctatctagttttctagcatgcgctcttgtcttatttaaaaactcacatagaattataaatatattgattatatgttctatacaaatatagtttatataccatatgacatatattgtacactattctaatattttaatccctaacccaagagattaactcagtaggaaccactcactgctggttgagacacagcttcatgctactgaaatatcctttggctaaagcacagaatttaaaacttcccaaacaaccaacatttgaatcagccaaaatggatcaaaagttcaaatgagcggttttatgacatgactatttatgggctttcttgctgtctgggagggtcactttagcagagaatcctaaaatactacagccaaagcaaccgtaggatgacctaatcgtgtcttgctttttttttcagatggggaaactgaggcccacagcaacaataataactgtggggatgatatcatttaatattgaaaataagtggataattgagacctccattattagtagttaatttttaaaaatcaaagatctctcctaattagctttatggagcaaataaatatattttccatattcaaatatggctgtgatttctacacaaatggtgttaacaatctaatacagcataaaacattgtttaaatatcatcataccctattcctaaacagtaacgtgtaatagatctctggagcccagtgttgtaatataaacacttcccaggtgtattcccttggtaaagtttcattacttctctaaacgtcagttttcttgtgtaaaaaagagacacttgtgtctatcctacttactggttacaaggatataataaaaatagtgaacaaaaatagtgttcataaagtaccctgcacagcacctgattatagacttaataagggagggctcaatggtagttgcgttttgaattacatttaatgcttcattttacttcactgtcacaaactactatgctctgcggcaggctcagaagtctctaggcacgggtgaagtgctacttctccactcccttaaatgcccctgtatgccctgaggatactcaatgcatgctaaccaccaaacgaacggatgactcagagcttggaggaaatccacggcaggctggaaagcaaaggcgcagcttatggctcaaggattaggttgttacctttttaaattattgcttttctttaaagaaagggctgtgggggacgcctttcagcactaagagaaaacctcagaaatccttccccctggagacccagctgagaagaccacaccaggcacagggcatgaacaatgtcaaaaagctactgccctgcaggacactggggctggaacaaagatgcctcccagcagctgggcaaggctggctcccacacaagaaaagcagggctgatgtgagcgtcccgcacgatccccacctgctgagacctaatcctgggttatctctccgctggcccagagaaacctgaaaccccccaggcttttgaagggctttatctcctctttccaggaactgggctcagtccctgtactcgctccgaggtgccactgagcagctgctgcccagagcccaggcgagccctggtcccatttccagcttgaccaagyacaagaggggagccagggctgcggatcctactccctcttgctccccaggcatccgtctcacaattagaaaacccgtgtggggagcaaagcaaaaatcacatttcactaacagctactcggggtcgggggcgggcaggcgggaattcctactttcgccataaattgtatgcaaatgggttccttccctggccgagagccaggagtgagtgcgtctttcatgagctaaccctgttccgctgggagggctgttcctttaattcgccaactgaaaaagtgggaaaggatgtctggaggcgaggcgtcccattacagaggaaggagctcgctatataagccagccaaagttggctgcaccggccacagcctgcctactgtcacccgcctctcccgcgcgcagatacacgcccccgcctccgtgggcacaaaggcagcgckgctggggractcgggggaacgcgcacgtgggaaccgccgcagctccacactccaggtacttcttccaaggacctaggtctctcgcccatcggaaaggtaagtctgttttgccctcatcactagagatccttatgatgtaaggattgcattcctggtaccaaatgagttgtgattttatattataattacaaaacatatggggtttttttttccaccgctggaaaaaaaaggagtgtgtattggttatatcagatgcaccttgacttttctggtcttgtaattttgtttgttttaactttatgaatagtcagacttggaaggaacttttcgtaaagttgttatcttctgctgttctgcagaggaaaagtaaaaattttctcttcaactgctctcctacttctagtctggctgattcacctgtatatatcttttattttgagggttagggcagtagagttttaaggcagactttgctcatagcctgcccctgggatgggttagagggagtttgatagaggagtgcagggagaatataaaagtttatatctaaacagcacttacataaagtttacaaagagttttgtacccattccctcatttggtcctcaaaatattcaccctggaaatgagagctgggggacagaagagaggaggtggctcctgggccagatgaataactgacaggcagctagagagtggtggagaacagctttactggggtgcctagagccagcagcgtcccacatgtctctagaatcacctcctcctcctcacctctcatcacagaaagatctgagcaacaacatcccccaggtatgggaaccctgctgcccctggtgtactttggaaagaacacaggggttcttctcacccatcagtgttgtaagaggaataagagcttaggtttgaagccagaggtgtttggtattctccccaccaccatacatatgaccctgagaaagatacatcacttccttaatcctcagttttcacatctctaaaatggggacaatagcgtctgctgtcgttttgaggagaaaatgaggtatagaaagatcagcaatgactgcttaataactggaagtttggataatcattgtcattgccaaaaactgccatcactctggaagttaaaagaggcattkagccagtcttggattgtttcttgtgtgttgttcctcagcccgcccccagcccccgctttttatctcacccaatctgagggtgtctcactaggctggcaggtctgagacttggctgtattttacaagcaggaggttgtgttggcacaggttggagaaaaggtagtagcccggggctggaagttaatgtcaaattttgattccagaatgtcaggaggttttgagtttaggcatctgcagattctaaagctgacagctatgaagtacgatgctgttggaaactctttggaaaagctttctgtcyggagggagggcaggacagggagcaccacttgaagaatgaatgcctctttttcatgtttttgtagactttttcccccatttttacagagctttcccatatgtgttttagaaaggaaaactactatccatcccagccaggcaagcccaattcaggactgaagaagatttattcagtcctagacaaccaagtgaagagtttctggctttgtgcgcatacaagtcatttgcaggagatgtaagtcagcgtgctttggcccttgcatttcaggaaggtgactgctttgtggggaagaaaaaggtgcacaatatgagtattctctggtttgctcaaacagggtaaattggacaaggattgaaagggatgttgccaagctctacagtcattaaatatttttttcctctatgctttgttttaaaaacctagcttctctattttatcccmcactaacctcctccttccccactctaagaagtgactaacgtttcagccctcaactttgtcattcatataatggagatgacaaactatgtctcacagggctcttgcaacattcaaatgaggtaatatatggcaaacwcttggcatagtaccttccacatattaagggttcaataaatggaaacttttcttagtttctctgtttatcattttacaaggacttgtccaagattaatattctaagatcatgatttttaaacttatttttaatgatgaaaatattcattacatgaatttagggcaaacccccagtatatgacaggtaaatgcagggctgctttggttgaagtggggtcacaaggtctaaaacttacacctttgctcttagcctctgggacattgccacagaatcttcaatgacaaaaagcacatttacaaatcatgaaaccaggctgtgtgcattctggttgccattctgcccttcaacaaggatttttgcccctctgagtcaccatctgtagcagaagtaagagcaagtccacaaatagtgtaatagacaggaatatgaatgagaaataaaagacttaacaaaggctattttaattaattctaatgacaatgatagccaaaatatatgatgagcctactctctaaactgtaggcttttgtgggatcatccacagcatgtctctgaggtatggactatatttgttggacaaagagatggcttcaagaacagggagactgaataactttaccaaggtcctagaactcagagtgatacagccaggtttcacacccaggtccccgtgatcaccaagtcagaggtacattctgccgtgttccttctgaatgcttctctgcttcttgcctgcctttagaaggaaaacacttcctttctgactaaatatgcccctccaggcagactgtggccacccataaatacagcagtagcctgatcatataaccagaatggaatttggaaagagaattcaagctgacagaatgaaaaacatatcccccttaatcctaccctttctaatgctaacaataaattaagagcacatattctctcctctctctctagatttctatagacacctagctgtgctttcttacaagaaaacatatccactggaccaaagcgcagcccccttcatgctgaagccacttcagtttgaaacgtaaaaagtaggttgcaaacatttagttggctcgaaatatatgtccttttgtgatggtaaaacacacaaacacaaagttaatagtgagggctatgtgtcacatatgtaataggagggtttgccaatggtttctcatctcattctcactcagacactacaaattataaattactagctcaattttaaagaaatcgacactcaaggaagttaggtgactcatctgaggtctttccgtaattgaggggcagagctggctttgacccaagctttctaactaataccccactgttctttctgctgtgctatattgccttctgaagtcaggctgtgctgaccaagtttagaaccttaaatggtgtctttcagtgaatgatcaagatggtggagaagcccccagctggcattggtgcctattgattttacagaatagccctgcatgtatcatttttcatggttctcagcaaaggtcagctctcaatggtgcaactctctgcctggaaacaggaaagttcaaatttcagccctggaagagagaagaatgaaactagaggtagcagtcaggtcactcctgctgattttcatctcagaaaagtaggcacacaggtgagccaaacatctggttttaaaagggctgattggtaggtaaagtgaaatcggccttggggccatgaatcccaggacagcttggaaatggttgtaggctccgagccacaaattgagccacaaattcagcggaagcctcagagaggaagattatgattcaaatacctctcactctgagaagattgtagggaatccccttgaatcttatcccgggccagtttgaacaccttcaacatgtgggaaacattagatgaaggctcccttccaaggaggaaaacccccctcaaagtgtgacatgaccagcctcctgcaaaccccaggccataattccattcaatgtaaaagacagagatggtgaacttacctaccttcgggggctatacatgctttgtgacttctctgtaaaggagaaaagtctgcaaaccaacctgattctaatcctggtggccagacatttttcagttatgcccttaagcctaaactcctttccctccaccttgtctcacatttccagcttctcttccactttagaaacaaccctgtcactatcattactctctttggcccttcatcatggaataaaagcaaaatgcccaagtcaaaagcagatcgcgaacggaaaatcccttccatgtgcatttttagtctatctgtgaatggagattttaaaaatatgtatttcatgccacgtcgtctcagaattttgaagtttcctgaagttcataggtccttcatgatatagccatggtaacttaaatagctttgtttggtcctttaaccctcctcaaataccctataccaagagccagagatatatcatgagttctgaacatagatagctttgcttcagaattgaccgttgttcacctctaaccctaaagctggctgctgctaacttcgacaagaatgtgtctgaaatgttctcctaggagaatcctaggggataatcgtaatagctaatatttactgaggactctataggcatcatgccatttagtcaaccatagcktctagtragtcttatcacccaccctattcaaatatgcacaatgtaaggctgaaaacgtttaagtagcttacccaataccatgcagaaagtacttggtggagttaaaaatcaaacccagttcccagtcctgagaggctagttataaccatttcagtaaggaagtcatgctcagctccctaattctattcatcttctgacaagagagagggctagacacagcaaagctaagaaagacacaaatcttgtctttttggccctggtgttctttgacagactggttaattttgctatctccagcttgctccttcaggcttcacctcttgaaaaaaactgtaattaaatgattagcatgtgacccataatgtaatacgttttctctactagactttaagctacatgagggcaaagcccgatccacatcacatccctgcaaccagcctgagacctgaagcatagacacacataagcaagtgctgcccaagggaagccatgagtgccctgcaggctgcctggaatccccctgctccaggttccaactgagctctgcacgtcccccgctgtctgtgtcataattacccctatgattgccttccctgccacactggactgtacaccactgaggtcaagaatgttagggaggcgggagctttgtctgctggagttcattttccccaaaaacggacccaccatgggcagacgcaccattagcacagtccccaaaggagatgcccaggactgtgggatggtcttgtgaaggtcgatgcacagatattgcagaggaatgctttaacttctaggtaggttactattttcttaaatctccttagggaatacagaattttcaaactaaaagggcttacgggcagcctctaagccagaatcttgcagactggattttaaaaagaatttaaaaagatttgggggctgctgtggagagacagggaggccaagcaggggattcccctcaaccttatttcaatgaaagcccctccacttatctattttgtacactgagcctcctcatgaaattttatttgatgaaagggctctgtgcagaaaaaacagaatgtttttgtaaattgctggcctaggttagcatacctcattttaaagagggtgaaactgagacatagagaagggaaagatctttctaagatcttccgccagttggcaacagggtcaggttggaatcctaggtcttctgactcttgctcttggaagccagggacaatcttaaaagtttcagaattaagacattcttttagaaaagaaaaatgagcagagtcttattctctcaacagccttaactcacacggaccgagccaaggatgactagtatctccgtattcattatctattactgcataccaaattactttaaatcaacactcatttattatctcatggtttctagaggtctaagcacagcttagttggattttctgcctcatggtctctcatgaggttattgtctgtgttggacagggttgatgtctcatctaaaggctgaattgggggatgattagcttccaagcttgttgatgtggttgttggctggactccatttcttgagagatattgaactgagggcctcagttccttcaaagctgttggtccaaggctaccctcagttccttgccacatgggcttctccaacaaggccatttacattaacaaagccaatgagaaagagagttaccgggcatggtcgctcacaccycttaatcccagcactttgggagcccgaggcgggtggatcacttgaggttaggagttcgagaccagcctggccaatatgctgaaaccccgtatctactaaaaatacaaaaaaattagcctggcatggtggtgggcacctgtaatcccagctactcaggaagctgaagcaggagaatcacttgaacttgggagtcgtaggttgcagtgagccaagatcgagccattccactccagcctgtgcaacaagagcgagattccatctcaaaaaaaaaaaaaaaaaaaaaaaaaaagagagagagagagaaagtctataagcaagaggcacatcacaatcctgtgtaacctaatcatggaagggatattccatcaccttagtcatattctgtttgttagaagaaagtcactgggccatcccacactcaaggggaggtaattgcacacgtatgagaatgccgggaggcagtatcaatggggccaccttagagtctgcctgccacagcctccagcactccagtgtcaccaatttctggcaacctcttatcaatgacaagttcactcaacccttcagtaccctcactgatgagtaataaaaaaattgatcgagaccatggtgaaactccgtctctactaaaaatacaaaaaattagctgggtgtggtggcgggcacctgtagtcccagctactcaggaggctgaggcaggagactggcgtgaacctgggaggcggagcttgcagttagccgagatcacaccactgcactccagcctgggcaacacagtgagactctgtctcaaaaaaaaaaaaaaaaaattctggcagccactaaagtggactagtttttatttaacatcctcccatgtatatagtggagccaagtgttttgattagttgttttaactcattggttagccataatttctcttgaatttcaccccagggaggggcctttcacggcaatgattccaaatgtattttattctaaagcaagacagtcagtgtgaccaaaactaaaactcatccattgttcctccctcaatctattcctctcagcagatataatgaatagtaacatcttcgattaattcttttttctttactaaccccacacacaaaatgttgtagtctctactgccttgacaagcaaatctgttcactgcctccccactttcttgatcaccaccccctgccccacctccattacccctgtagttcagatcttagcatctcacagatgggccactgcaacagctttcccactggcccccagcaacccagccttccccttcttcaacctgagacatagaggttaacattcctgggcctcaagatttccaaatgcttttcttctgcctgcaaaaaagtccagatattctgacattcaagattctccatgatcttgcttctggtctctaaacagatcctgtacttcagctgtcattcatactgttcacatcaacccttttattctttttatatccttgtaaatgccattccctcgtgcctagaatatccttttttatgtttttcacctattcatatttttctctcaaaattcagttcaggcaccacttcctccaggtaaattagatgcccttttactgtcatctcattctacctatgtttctttttttaaatctatcatctcctttatcatcctggaatggcctgtctgcccctcttgacaatatagttcctaaaagaaaaaattgtatctggtttatctgaaacctagcacaactggaataaagttaatctttagcaattaataggagtccttgctgtgtcccagatttggacatcctcttccttagcagtttgctcagaaagcccagagcttgaagttgttttcacgcttcacccactggcttgcaagtatgcagtgtgatgacacaacatgtgataggaggaaaccatcccagccctaggacaggaaactgtctcaggacacagacctcaaggaatgtgtttgctttcagaggtggccttcaggataaaaacacaaattgctttggatttggaaaaaccagtaccaaggacagaggagtcctgtctggggatttgaggctgagtcacaagagatagctgaaaatctggaggttataacaaagattagtcaacaactaataggaggaaagaacaggctcaagggtgggatggagacaaagagctctctatcttaggacatggagaagctcacagcccacaagaagaaatgaataatggttaagagtatgactttggcataagaatcctctgggtttgagaggtatttgcttgctatgtgatcttggccaagttacttagcttctttaagctaatttcttcttatccatattaaaagcaaagtagtagcacctagtttaaagtttattgtgatgattaaatgatgtagttcatgaacactgcttagcacagaaactggcattcaatataaatgttttgttgttgtcattgttttgttacctgttgatcaaatagttcttgatgataagatcccactagagaagcagttcccaaaagtgtgtcatgtggaaaagcattctcatgggaatcacctaaaaaagggttttgtggccaaatgagtttgggaaacacttggtactcttctgttcttggaaatgcacagctcatatgtccattcaatacatagttttagggctggtgatacaatagaaagcaatacagtcaagatccttttattcatggtgtttacattatggtggcatatcttagtttgtacaagctgctacaacaaaataccataaactgagtgacttacaaacaacagaaattactttctcacagttctggaggctgggaagtccaagatcaagatggcaccttatatgtcctcacatggcagaagacataaggcagctctatggggtctcttttaataagggcacaaattctatttatgaagcctctgccctcatgatctaagtacctcccaaagactctgccaactaatattgtcacactggtgattatgttccaatgtgtggattttgagggaacacaaacattcagaccatagcagggggaaggcagacaataaaaaggaatcacataaacttatagcacaatttcaggtagtgatatttgctaagaagaaagacaaaacaaggtaagggcataaacaatgactggtggtgagaggagtgctcttttagatggggtgagaggtgaatgtgccattgtgcagatgtctgaatgaaatgagagaaggagctctgtaggcaatggctaggagtttgaatttcattctgagtgtggttagaagccaatggatggttcagggaagtagagtgcatcatctgagatatcttgctgtaattaatctgttcaactttcgttagcccagtatctccaaacatacctgaccataggacatctacctaaaaacatcttgcaacgtagtctgggaaattcttcactggagcacaaggcttcatagattttaaagggactgcaaatttgctcttgttcatctagatctgcactaaaaatccaaacatactgcttgggacaaaataggcatgcccaggaaggaaaacctagctctagaggtagagacaagcaggatgtcatcctaattagcagctctttttggcaaagacaatcaatgagcacagccaggcctcagcagattctggaagcccatttgatgccaacggaaactcgccaatatctacccaaggctaataagtgtttgcaaacagtacaccttggcttaartattctccaaaaaggaagtacataaaacttgagatccagccagaggttctgggagaaaaacagaggtcaaatattttggtgcttacatgtgcacagccaccaaagagctgctgaaggtctaggaaatggaaagtgagttcatccacttgaatgctgatctctttctttatggagcagtaaaaatttaagtttttaccttatctgaactaagaaaattcctttaggagtcagcccagtgtagctcaatgtagttgaaagcagacattttagaaccacaaataaatcaggattcaaaagctrgctctgcctcttaagccagtcatggaaactccctgagtctcaaattaattttcaaataagcataataatacctaactcaccaggttgtcatgacaaatgacaagataaatgatagcatgaataaaaagcatttagtgtaagatttggcataaaaatgtatataataggcactcaacaaaatgttagtttccttattgttcaattcaatctgtatttagtttcataatagaagctgtcatttattgmataactactatattccagcagaggttagcaaaccatagggtggcagcctatttttgtaaataaagttttattggaacacagccatgctcatttgtttgtgtattatctatagctgctgcctctacaatagcagagttgaatagttgtgactgaaatcatctaactgcaaagctttacatattttctatttggtcatttaaggaaatgtttactgatcccttccagtcaaccttactaaatttttatacttactttccagtcaccttaacctaacaaggtggatattatcatacttgtgtatatagagattgaagcagaaaaaaaaaatcatctagtaagttcccctccaaaaacataatgccaaactctatacctaaaagaagttcagaataatgattaaaagttattcatttgtatgattcatcttcatttgcctctgccttcctctgactagtatttctctctggctaatttcttgaatttcctgccatatgctgaattaaatgatcctatttagaaggaattttccctcctttccttacttatacaaataagttgtttgttcatagaagtccatgctttcaaaactgaaagtggtaatttccagcccctctgaaacgctctctgatcttgactgatttcttggaaaccacacgttttttagatagtacatagtgtgaagcccagttttccagaaatgatagatttttagctcccccatctgctacttctcactgtatcttcctctcacttattaaccttctcttcaggtcagactcaaggagagcaggcttttctccaggggctttaaagatttgcctaagacacagatattatagtccacctggcctatgccctcccctcaagttcacaacagtaaataaaatagttatgtaaaccccaattcccaaacaccatcctaccttgttccattttgcaaatccaacaactctattcatattaatgatattgtgtttctctctgatagttagtagataaatattaattctttaacttgaacaatgaatcttacttcaaaggtaacttgatatagcagaaagagcatagactttggaattataagactgttcttaattctgattcaaataattgctgactaggccacttacttaaccttcttaagccttcagttctcttaccagtaaaatacaaacaatgctccctaattcccagagttggtaacatgattaaacagcatttgtaaagtgccacgcacagtataaatattgacctacttgcttcactcttagtttaaattgctcaagatcctctaacatagagcttcacattttatcccagagaggtcatagttaggtatatctctacttccttctaatacaggargaaatgaaaggagtaagggtctaggrtttgttctctatcagttcttcccccatcgtgtgccatccaacctaatcctgtgactcacttcaaacagaataatcaagtagatttgggaaacactctataaactgtccccttcttcgagatttccaacgagcatgaacctattaaacaccctggaaaaacctgaagtaaagaaagttgtgtaatttgtttggcttaaaatcatatttggtttaaaataacattttccaaacgtgtttaattaggaaatctttttccctcagattagtacctatcaacgtgttgtagattacactttagaaaatgctgtttaaagttacacagctaagttaaagcmaagttaagggggttagacatatctctatttttcagatttttctgcagtttttcctgtcctgcctgtagatcataaagatatttcattaccagtagtttctctggaccccgaccttagttatgcaaaccaccctttaacataattaaaacaagtgaatcagttcacctgatttaaatttctgttccccgtttctagctatgtgatcttgagctgtgtgagcctcagttttctcctccataaactgtgaaaaataaagacaactacctcagaagtcttggggaggattcaatgagataatccacagaagacacaaaaagcagtgtctggcacagacgacatatgcaatcaatgttcattattattatagcatttagatggtcccattttgggaaagggaaaatagacaatgaaagtatgtttgctttgcctgaggtcacacaaattaattacgggagtagtcttagttttccctgagagtctggtttcctgcttccagtcctagagacgtatttttgtttcatgagtcatattctatcaaaatgtatgagactttattgaacttgatttaaacaggattttgtaattgtcaatggctccatctggctccttctgatgcaaatcccactcaagcaggattccattcatttgaatattagcacattggatcgggaaagatttccaaagctgtctagttttgctatgccaaatatttggtgtacacgtcaacactctccactcctgtacccatggtggatattgctaatccatcacagcaccttttcccgaaagcctaatcatagccacagaatctttctcaaggcagttccaggtagctatgtcagctctttgagttgaaacataattgatcccaaaccaattctacttcttaaccagtgcttgaaccacctctacactattactcttttattttttaatatgcccaatgtcatggagctctctcataaagggagacaggaaaaggaaagaagaggagaagatatactaacatatgtgtaacgtttattattaatatgtcaggcacttatagctttgttgtcccattcactgcctcaaacaaccctggagagattttatagttgaataagccacaattcagaaggtataggacgttgtccaaggctccccagcagataagtagaaattggtcttaagtcttcctgactctaaaggcaatgcccctgtctctcccatcacaatgccttcttaaaatttttcagggtctttcgggactaaatttctgactttgggtggctgataacagtttcacaaaggcaaccatctcacagacccctattcagaagttctcttatttagggttgtgttgtaagtctgtctgtaatcggttcttcctagataaatctcttccatttcttaaccttggctcaagactttgagaactcactattcaatgcttctgaaagagccaactagatttcttaaaattctggatgaagaccaaaatagaagaggtcattgttccattgggaaatgaattcaaatttatttttgaaayaattttccagaattttacaggaatctatattgttgccacttgtccagaaccactttttattttcttttctgtctaggcaagaaatagaagagagaaagcaagtgctctgcagttttatttcaaaaattgaaaccagaccacaccagggcagtttgtggtctgaatgtatcaatggatctagtcatatttcatctgagcatttcttaggtatactaaaccacaaatatgaatctcattattgtgtctggatggaaatattttatggattaagatttgtggatttaatttggttggtaatggaacttctgttcaaggggcaggagggaggaagtcgtgaggcaccaccaatgcttaagccaaactatggaaagaaacactatttggagggtttgtacttaatgttggccagttgacttgggtctaaagtgaaattcaaaattaagttcaacaaaaatattgtgaaattagcaatggaccacagatcactggaaccaaagggatcttaraattggaaaccatacacagttgctcattttacaagagaaactgagacctcaagagtggatgcgacttgcccaaggtcacacaatgacccygytggtcagacctgcttggcagaagaggagctcagagcttctcctccagatcttccatttattgcacttcctgttatatggcctcataagaggccaagtatctgggaacttaaaaaaaagtaatgaaggtaaaaatttaaaatgagaaagggagacctatatttaacaacagtacaacaaaatgayaaatactgcaatgaaattgaaagggttactaactaataacccaggatgcttccttcacaccaaaaccaaattttcatgctgagtgcatcttaggcctggccaattccaccttctgccaaaggagtttacttgatcatagagaaatcttgtctcaaagtagaaagtactgagctcttaaaagcccttgggttgatgtctagaatctcatgggaargagctaggtctgtctttgtcacttttgtaccttctgcacttagtgtggtgtytggaacgtagtaaatactcactgaataactgaatgaattaaaacgaactaattacagaactgaggctgtgacaaattccttgatacatcttactgtagaasagattacaggagagctaattacattagggccatcaggaaagtaagagtatttgttcattcattaattccacaatataagaacctgctatgtgtaagttcaaaccaagaaatacattcagcttcatttcatttaatataaacatattgtgcatttactatgttctagataaagtgttttgtgttgtgcattcagagatgaatgtctcagatatatccctgccctcatagagcttatagtctacatacaatctaactgcacatatgcaaaccaactgtttatagactaatataaatacaatctagaattagctaatttcctaagagaaggagttatgcatgcataataaagccattccaaatctttttttaaatgataaatcaaataatatcatatcaattccccagacaattcagaagagagaaagataaatttaggccaaagttacctgataaacctttcaatagtagatttctttaagcagcatcttgaaggactgatagatttattcatgcagagatggcaaaaaggcttctagaagccttcaaggcatctggaaccctcgctgaatgatcactgagaaatggaagcatcccaaaygtatctgtcagcttgcttcatctccacagcagccacaggctgtctggcatcttaatggtctacttctrgaggattgatagtattctgctttgagccaggtgttgggaagttatatagtcagaggttggggctggtcttgactcatagctcctttgcttggccctccagcacaaaaggctgtataaaatcatggttcagagccctgactttggactcagatgggatttggttcaaatcctgactccataacttaataatgtctgaacttgcacaagccatgtaaagactctatgcctcagttttttcagctgcaaaatgagggtacaaatactatctcataattgtatgtgaatttgaaattggaaatgtaaaatgctaactaagcacaggctctggcaaaatcaacacttaataaattatagttaatgatatctgtattacttatgatggtgatgatgatgatgtcaacttcctgattattattattatgtcaacttcttaatgatcttccaaggccttttcaaccamtatttggtgattgtaattctttccttttctaggaagccccccatgaacttcccagtgcaaagtgkcacataattatctcattcaggctggcattaataccagaccttgcttgtgtatgatattctagtttctgagatctctaggaacaaaaaatagctccttacttggcctattttccaaagtacccagcacattgggaggtccatactaagtaaatagcatttcgctcttgaaagaatgttaacatttatactcttgctattggcttgggagagtgcaccatgttcccaacctgcagtggcacttaagaatatcacaaatactaaatcaactgtacatggagttaaaatcaattgcggccaggtgcagtggctcacgcctgtaaccctagcattttgggaggcagaggtgggcagatcacctgaggtcaggagttcgagaccagcctggtcaacatgatgaaaycctgtctctactaaaaatacaaaaagttagctgagcgtggtggtgggcacctgtaatcacagctactcaggaggctgagacaagagaatcgcttgaacctggaaggtagaagttgcaatgagctgagatcgcaccactgcactccagcctgggcaacagagcgagacttcatctcaaaaaataaataaattgtattttgtgactctttgggaggaaattatgagctttgcgattatacagaacatgtttatcttctttggtgttgtatcgtttatacttaactcagggcttggcacgtatgtactgaaaaagtagatagttggatgaattgatggatagatagacagaaaagtaaaaaactcatcagggccaagaagtctagaaatactttaacacaaatgctctccaggatcccaccactgatatttctctctggagatcattacaatgacctcagactaagaattactgaaagactttcatatgcatttttaaaggtttttttcccccagctttattgaggtataattgacaaattaaaattaaaattttatacatttaaggtatacaacgtgataatttaatatatgtatacattgtgatatgattactagattcaagctaattaacacatccatcgctttacatagttacctctgtgtgtcaatgataaagacacttaaggtctactactatcttagcaaatttgaagtatacaatgcattattattaactgtagtcaccatgccgtacatatgcactcctttttgaaggcctcccaatggtctagaggaagagatagatcttaatcgaattccttgacccaaaggcaaaatctctggattttaatatcagctttaggagttaattagtaaagtcaccactgattagctagtgactctgggtgtttcaattcagttattctcttaaataactaggtattatggcaaataagtttcatgtgatatactacctctatttatatactacttaattggctgcctgaagtgatgatttagaatgattcttaagtggggctcctcagaattgtgttgttatcgattagctgtgtctgccccatgcactagaatgaagtgttttgtgccacagacttgccatgcctataccaaatgatcttctacagttgcttctaagtcctgctcaagcatgattttgaycctataatttgatgtctgtctgtgtctttggaaagtactgagaagctgggccaaatgtttcccgttaggaacacagtcttgaaagactaaaccacaggcagtctattcagtagaaagccctggctcagcagcatggacagccatcccaacagcagcactgcccctgaggaaccttggccagggtcctgacctcccagaaaagagccccacaccaggctaattcatttgcttttcttgctactgagttagaagagataggataacaggaaaaccagggctgtagccacagcctccwyattttcctaaaaattttagagtgtccctgctacttgacaaattgaaatactaagatttatacatttccatggaaaaagcaacagtgggaaagagagggcttcccagatttgtcttatagatctcatccttcagagactagccttctgttagaaatgctgtctccaagcacaagacagaataatcatataataccaatacacaccagttgctaaggtctccatccttttaagtatttgttactgagtgttttgcctgtattatctcatttttctcactttcagttgaaagaactttattgtgcagttgatattagtgttaccattttacagatgtgaaaattaaggcccagacaggcaatgttacacaaccaaaacagctactggatggaaccctttggatttgctactacccaactatttctgacctaaaagagtggtgattccatgtggttcaaattaatagcaagtggcagagtaaagatctaacagtgtttgactgatgtagagcagatatcctcaaacattgcacagatgtttcttggatatttgtccatgttagtatttatcattcttcacaacaagtatctgtttacatgtctgctttctatacctgactgtgagctcattaagggcaagacctatccatcattggcttctgaaacaccccacsaccactaggctatcccatagcccgttyttacacttgttcaacacatctctgttgaatgcaagaataaaycatttagaaattaattctcagtcctcttggataatcactggctcccccagcatyttaactgggcaccagctaagccactgtgctgcctaaatggacaaccacttctcagttctggaattcttcaaacacctagggttaggagggtcttcgctttggcagttagagttttytcaattcttttatgacacaggttgcaccggactcactcaactatggagatcagatgtcctcaggaaaaaaaaaaaaaaaaaaaaaaaatacacacttaaggctgtttcctggctcctctctcttcctgacacattccaaaaaggaatttatggatgttgggaaggacaaagggtgaggaatttctaggacatttaagaacgcccatgtaagcaactctatgcttgacaggccatgcacaataaaactctttggcctgtaagcgagaagaaaaatttggtgtaagctgcctcatgggttgccaaaatgatgtggaaacaaattcatctgcatttctaaacaataggaattctcctygtcctcccaaacctagaatatttcatgtatgtgcttaagtcaacaagataaatatattccatgagctactaaaaatgaaatcataagtaactaattctgaaatatgattctagccagttggaagtttcatctttatctaaaaatgaagttgtttattctccagctgtgaccagggaaaaaatcagattgttgatttcttcgtctagcaatgatctttgtcctgcagtgaggtgcccaaaaataactgttagcctattccctgctgcttccaaaaggttagctaccaaacagctctactagtaaaagagaaaaaaagaaggatttgacagcaagccaagaggcagcttaatgtgtaaaattatgagctaaaaagccattacgactggcatgacactggccttggtttcccaacctggtaaataaatttttatctcacagtaatgctctgaataaaagtctataatgccaaaatctgaagaaatrattcaacactgataacatttaacaccaaggcaattgaaataagattaaagcttaacatttaacccttcttccaccccacactccccacaaaagctttcaggaccattgtttttatcttcttattttttgtagcgggctggggccataaatgtaccaggtatttggagaatggrggactaaatattaaagcctatattctacccagccttctcaacagatgactaactgtgagcagttaggcacctagccttacagaggtgccatattgcttactgagttaagtaccagctcttcatattgatcttttatatccttcccaatatggcttctgccaataccatgtagtctctacctttctgctttcctatgcattattttataccctagtagaacaagacctctccatattccctgcatgctacaccaccttggcatgtatctggcacccacaaggagatgccactattattacagctatcttcttaattctcctcaccacccatgcattccaacttctttgccttttctcatggtgtttcttttttctagggtgctgtaggcttcaatttgaacccacctactggagttgtatccaaccatttttcagaatcttgcccatctttcaagtacatctcaaataccacttttttgagatgtctttcttgggaccttcaatggatatgagttggccaatctcttttgttacttgttataatcatgaatgtatctccctgattcccccatcccttctggatacaaggttttctttctgatctattctctattggatcagtgttgttattaccgctgctgctatcattagctaccacatattaagcacaccttaatgtgtgccaggcactgtgccagtagcttaacatatgtcttctcatttcatcccactctcctgcaacactatgagatagacatatgtatctccagggagaggaggcggggaaattgaggttcagaggagaaagggaatggccatagggagcagctgctaaagtgatagaactggattcgaacacaggtttattttacaccaaagaccagactctttcccccacacgcaactgcttcattaatggaaatgtttagatggctgaaggatatggactgagtgccctcaaaactctggagcacagcagtgcaggacagcagagaaacgggagtcatgagttgtctttgacaagctcctccagcttctaaggagaggctgaagcagacagaaagagacattagacttggccagagtggttcctggagcaacttggttttagtttaacgtggggagaagattcttacgagactctaaggtgtgcagagggaggaagaaaaaaatatttcttaacccaaggacaaggctgggggaaaagatgctgatctgacacagggtagttatctcttcagatctgcaaaggacaatagcattgaggattgcttctcacttgtacctggatatgttcaaacatgtaaggtatggaaactacaatgcacatacatgcttgctatagttaagtgagttagttgctaaaaagaagccattttttctccctaatccccgggctcttgtgtctgaggtactcacccattttcattagtcaagaaacttaacaacattgaaactttcttatagactcttcttgatcgctttgagtctcagtttcctcattttgtaccatgcgcttagtaaaaacaagcaatcctctaaaccagtactgctcaataaaacttctttggatgatagagatgttcttcatctgcactgtctcatattgtaaccacaagccccatgggctcttaagtacttgaaatgtgagtgatacaactgagcaatgagatttttaattgtatttaattttcattaattttaataatcacatgcggaatatgggacagagcacttcgaattcaagaccaatgaattcgaagtgttttatctctttttaaattttctatctcacggggaagtttttattgtggattttatgttcaccagattaactagcttttgagacattgacagggatggagatacacagaaaatctcacaaaaacaatttcataagtcacaggtatttgtttgactctaaaaattaattttaataaagaaagcaaagtctgacacaagtgtgtcttgttttgcgttagatacataagctgaggyggagcaaaaagcagcacaacatgcttagcttggaaatagatttgtcctggatatgggaccccaaaaatctgcgttttgtgccaatgcaaagactatgtctcttcctgattcccttctttgcaatcattgacttaccagatccttaaatatcaccatcaaagatatacacacacttacatatataatatgatatgtaataatatattatctttcattgtattataatatgtaatattatgttacatcacatattataatattatatgtaatataattggagcaactattatattatatatggagatatatatatacatatatatatacatatatatatacatatatatacatatatatatacatatatatatacacataccacgacatgcatattttctgggatcactgagagaggaaaagttctcactttgctgtagaactcttgtctttgcttaaaaacagacatatgccaaagtaggggtttcaaaggttaggagaaagaaaatcctagaaaagaaaaacattcattaaagtccatatttttcattacaaatgtttccttttattaagctcttactgctaccaaagactgtttgccatttctttcgcayacattatctcatgcacttttcacaatgatcctatgaggactcccttaacacatttattgatgacagtactctggcttatggtcacagataataaccttgcacaaggaacaggaagtgatcaaacagtgattcaaacctaagacaatttgcctataaaacttgtgcccttcaatgccattctatttacattctggtgctttggaacctgctacattctcaaagaagacctttctattgggtaccaattccaactagaaaagtctttctcctgttgtgctgaaatttgtcttctcataaccaaccctccctccctgcatcatccccagcacataaacgcacasacacacacacacacacacacacacacacacacacacacacacacacacasaggcacttgttctgtccttaggggctacaagaggcaagccagtgcctgctttgccaggatttctacatggtaaccctgacccactcaaccttggttttctcaactacaaaataaacctgcccaggtctgtagtccttcctcctacaagatattttccagaccttttattgctgatcaattttcwataaagattagaatctgtgttttctaaagagtctytgtagaataagttgctcattctgaaattataaaagtcctactatcagaacatgattcttcatgtctgacctaaatacctycaactgcaatctcaagtaagtttccctgggttcatccacaaaggagacttaaaacagccagttgtctgcatgagaatattttacattcttaaaggtcattatttgcttcctattttttccctctctcatataaatatttctagttctagtaaatttacctcctcacccaccagtgatttctgcagctcctctttgatctagatccaagttgctgctgagtttaggactgtattcaactaggcrgtcaagctcaggcttaagtaaaaggaggctattgacatggactcttgttaggttttgttccccaggagcgcaacaaaataggaactactgtttaatgagtgcctactacgagcttgacaccatgctgggtactttatgtacaggtctctaatccttaattttctctggaaaggttttgactcctttgttatatatgaggtcatggtttagagaggataagtagcttgtcaaagttrcagggctagtgagtgacatttgaacccaggtatgcctaattccaaagcctaaccattttctacaacactgaaaatataatggatttttcccaaagtacaaaaacacccactgccctcagaccaccatgagccaataggaaatacacaatgctcaagaataacatactctttcccccaacgatgcaacmtttggtggtaccagtktacgtctcttaaacacacagtgagaaatcctcactctactcacactctggtcattattaccctaaactcwttgccttggagtctcaatcagcaactataatggctttttagatggaaatttaagtcatttagcaacacacagaaaagtgttggggagaagtccaaaaacatttcaaacttggcccatggccctttctaaaaaaaaaaaaaaaaagctaagaattgatggaaaaggggtaggaaagtagaactttgtgaaggtgaagagagttagagcagccattctagtagactatgcagccaataaatatttgtccagtaaacacataagatggccaaattggtttgaaaggagagaacatgccaagtctccttttttataataatcttcattcagtggccttacctacattacagacccacacattgttagttaagaagctaatttcaatgagaaagcatgctcaaaagagggttgggtattttttgtttctttgtttttgttgttgttgttgtttttgttttgttttgtttttgcagatattacagggacagttggtaaagtgtcaataagaatataattagaatgtggtaggtatgtggatasgaccttcttagttaaattcactagtgctttctcagtccttaggcccctgatcagtcatatagaatgcttcccagttcaattttccttgccacaattcctctctaagttttgcaaaggctttctgtcatgaggaaggagatggtcagttgggatcatgttgatgcattctatcattaggataaaatctttccagaaaaaaagttagaaaccttcttataggctgaataatccaagcaccaccactaattgacataaataactaacttacagtgtgcgagtataagaatatcatgggcatagggaaatgtcaatttgtaaatgacatgctaaaaaccaaatagcagccaggcacggtggctcatgcctgtaatcctagcactttgggaagttgaggcaagtggattgcctgagctcaggagttcgggaccagcctggggaacatggtgaaactccaactctactaaaaaaaaaaaaaaaatacaaaaaatcagccaggcatggcagtgtgcacctgaaatcccagctacttgggaggctgaggcaggaggatcacttgaacctgggaggcggaagttgcagagagtcragatcatgccattgcactccagcctggacaacagagtgagactctgtctcaaaaataaataaataaataaaatagctcttcaattatcatttgaattttactcgggtgcatctcctaattaaagaaaaccatgaatgacttcatatcgtgtatagatcattctcacatgcctccatagcattgttttagtaaatattataactgccatttcttcctgtctttatttagtttctcaactgcctctaacaagtccccttttctctgctacctgattgctcatacaggtgaatagctctaagagagatgaataagataacttggcaaagtgagaattgcttcatggtagcatattctcctccatattctgttcccatctaattcttctcactatttaaggctcagcttaaattttaccctccctttcccataagctatgccccacctttctcttgaccattcctttttattttcaaaccccataggcagttatacactataccacaaaacaaatcctatacattctttcttgctttgctccttaagtactggatggatgattccattttcttcttaattctattgttaagtcccctgatggtatgtatacacttggtcttatatttatttctaccaccctcagacctctgtaaaaatgctataagtacttgctgattggagaagacatcagaggctcttagacatcctttctgagctgtgagcctcagtttagacaactggttcaagaatattctgtcaggctcttctaaaaactggacttttgaaggttttggaaataaatcaaggagcagggaaactgaggtgcagaggagtagactgaatgctatactgacagtcatataactagtaagaagctcggctgggattaaaactgtttgcctcctagagtcctttattttaacctctgcctctcatgacagaagagaaccagcagatggtgtggaaatcagttttgaaaatcaataagaggcaagagttactgaacatctaccgggaccagggcctttataacactataataattcactcagaagacatagtaaatactgaaggaattaatgaatacacaaataacttctacatcattcttttaaccctgtcattagcaactatgatcttcactatacagaaagtgaaataaggcaaagaaaaattacataacgtatccaagggaccagagctacagccaagatacaaacctatgtctattttatttcaatattttacctttttctctctatttttctgtctccttaaatttacagaagttgaatagtgagtgaaatcattccttcaagtgacaaagttcttttagagaccattgtatgttatttcaagggtatataatgaaaaattatcaggagagcttcaaatacagggatataaaatcaaaattcacttggaattgtagatattcaatatattcaatagtagatactcataatttttttgttcatctttgcttgtagaaaataattctttcaagaagatcagggacaactgatttgaagtctactctgtgcttctaaatccccaattctgctgaaagtgagataccctagagccctagagccccagcagcacccagccaaacccacctccaccatgggggccatgactcagctgttggcaggtgtctttcttgctttccttgccctcgctaccgaaggtggggtcctsaagaaagtcatccggcacaagcgacagagtggggtgaacgccaccctgccagaagagaaccagccagtggtgtttaaccacgtttacaacatcaagctgccagtgggatcccagtgttcrgtggatctggagtcagccagtggggagaaagacctggcaccgccttcagagcccagcgaaagctttcaggagcacacagtrgatggggaaaaccagattgtcttcacacatcgcatcaacatcccccgccgggcctgtggctgtgccgcagcccctgatgttaaggagctgctgagcagactggaggagctggagaacctggtgtcttccctgagggagcaatgtactgcaggagcaggctgctgtctccagcctgccacaggtatgagctggtggcccgcccagtcccacactgtgcaaacatggagaaatgaagagcatagcagcatccatcacttgcttccaaagtgggctcactagaaaactagcttcccagagtgttcattacaaagagattttatgttcaaataagtgtggagactgcagccatctctctcctgcttggaggagtcacggcgacaactgcttctcagaggaattttcaggcttctgataagtcctgctttgaaaaaccctattttaccttaattataagtttctaaaacgtatttgaccatgaaatctacccactttctaccccraaacctatgagtacgccatgaaatttctaccccagagagcactctctgataggtactgctgtggccccatcacctcattttacaaatagagaaactgaggcctggaaagaggatgggattcctgaaggtcctccaataaggagtagagttcctcacatttcagtattcttacaaatgcacagtgctgcctgtgatagtgctgagttataagaattagaaaaaagttccaatttaatagcaattacaatgattacaatcatataagctccctctgtgtaacaggcactgttgtattatctcatttaatcctcccaacagccctttaaggtaaagattagatgaggggaagataagtcctcttctacagatcaaagaaatgaatctcaaggggattaacccactggcacaagatggcacaaagagcaataagagatagggtctttggctaggcgcagtggttcacgcctgtaatcccagcactttgggaggctaaggcgggcggatcacctgaagttaggagttcaagaccagcctggccaacatggtgaaaccccatctctactaaaaatacaaaattagcagggtgtggtggtgcatgcctgtaatcccagctactcaggaggctgaggcaggagaatcacttgaaaccgaggggcagaggttgcagtgagctgagatcatgccattgcactccagcctgagtgacaagagcaaaacaccatccgaaaaaaaaagagatagagagagagagagagagagagrtagggattttgcatgtgcctgtgtgtctccagagctcatactctcccatggatgccctgtttccacatgcatcctatttcaaggarttttgctgctttggaattatgtctttatctccaataactaaagttgataaagctacatgagtttcaacaacttcaaatcagagctgaaaatctgtttctgccactcagaaaaaaattaccaaaatgttcttcaacaattatttcaagagtaaacctaaccaccctaagtgaaatagtcttacggctctgcaggacaggctctaggtttctaaggcaatttttaaaaacattttctttaggcataagttagtttatcttccacttctgtcaactccctggaaaaatgcagatgagaatacacagtaggagtaatgctaagtagtcagttaaaatgattgtttagagcagtgctgtctaatgaaaatatgactcacacatgtaatcttaaattttctagtagtcatgttaaagaaaggagaaagaaacaagtaaacataattttagtcatctcttatttaattcaacagagccaaaatattggtttttcagcctgaaatcaatatcaaaattattaatggatacttctcagtctattattttatactatttggaatctgatgtgtattttacacttacagaacatctcaatttagactagccacgtttcaatgcctaataaccacatgtggccaagggccaccatactagatagtacatacttagactctcactttacaaatcagctttttttaaaaaattctttcttcctgctgtcaagaatgagataaaatatattaatacaagctgtttctacgtacagagactacagagtgaatatactctagtgcagagaatatagaactgggttttgtttcttctccttaagctccatggagatcagaccaatgacttctgcaaactgagctaaggcaatatttaggcctcaaggggctcgagtaatgtcaaccttgaccccacattctttaagttgacctccacttagccttcaggatagaaagaaataaaagataaaggcactatacttttctggggacagagccaaactgaaaggtgtccttatagaattagaaagccattagctacctcattttagttgcggaaaattagaatgttttggttatataaacccacataccaacttgagccaamcttccacaaaaaactttggaaaataaaacagaaaaaaataacaaggacacaagagtgagctcttaaggggtttacttaactcggatataccccagggaagtgggctattggcccaacttcacgtataagaaaactaagctccagatagtctaaatcccttgccaaatgtggcatagatattgaatcaaaaagtcagaattacattcagttcaacaactatttcttgggcatcttttatgtgcctggccttgatgaggcactaaagaaataataacatagtggccagtcgtggtggctcacacctgtaatcccagcactttgggaggccaaggcaggcagatcacgaggtcaggatattgagaccatcctggctaacatggtgaaaccccatctctacaaaaaatgcaaaaaaaattagccgggcatggtggcgggcgcctggagtcccagctactcaggaggctgaggcaggagaatggcatgaacccaggaggcggagcttgcagtgagccaagatggcgccgctgcactccagcctgggcgacagagcaagactctgtctcaaaaaaaaaaaaaarraaaaagaaaagaaagaaatagtaacatagccccagcctaatgcatttcacaaggcagtgactcataatcatcataggaatagtaagacttcttgaaaatgtgacaaaaactatgaatccgctccccaggggtggaaatacacacacacacacacacactatgcataatcacacactgttttggcatacaagcctataatttcagggaattcaggttatgaattcctacctggtataacasgatgtgagtctcatctgatttcacacactacaacaaatggttctcaagccagatgsagcctgagggtgcaaccgtccttcmgctgaatttgaatctgggtgccctgggtagatacagaaaaatgtggctgcttaagcctggctgagaacttctgtttcttttgttgcaggccgcttggacaccaggcccttctgtagcggtcggggcaacttcagcactgaaggatgtggctgtgtctgcgaacctggctggaaaggccccaactgctctgagcccgaatgtccaggcaactgtcaccttcgaggccggtgcattgatgggcagtgcatctgtgacgacggcttcacgggcgaggactgcagccagctggcttgccccagcgactgcaatgaccagggcaagtgcgtraatggagtctgcatctgtttcgaaggctacgccggggctgactgcagccgtgaaatctgcccagtgccctgcagtgaggagcacrgcacatgtgtagatggcttgtgtgtgtgccacgatggctttgcaggcgatgactgcaacaagcctctgtgtctcaacaattgctacaaccgtggacgatgcgtggagaatgagtgcgtgtgtgatgagggtttcacgggcgaagactgcagtgagctcatctgccccaatgactgcttcgaccggggccgctgcatcaatggcacctgctactgcgaagaaggcttcacaggtgaagactgcgggaaacccacctgcccacatgcctgccacacccagggccggtgtgaggaggggcagtgtgtatgtgatgagggctttgccggtktggactgcagcgagaagaggtgtcctgctgactgtcacaatcgtggccgctgtgtagacgggcggtgtgagtgtgatgatggtttcactggagctgactgtggggagctcaagtgtcccaatggctgcagtggccatggccgctgtgtcaatgggcagtgtgtgtgtgatgagggctatactggggaggactgcagccagctacggtgccccaatgactgtcacagtcggggccgctgtgtcgagggcaaatgtgtatgtgagcaaggcttcaagggctatgactgcagtgacatgagctgccctaatgactgtcaccagcacggccgctgtgtgaatggcatgtgtgtttgtgatgacggctacacaggggaagactgccgggatcgccaatgccccagggactgcagcaacaggggcctctgtgtggacggacagtgcgtctgtgaggacggcttcaccggccctgactgtgcagaactctcctgtccaaatgactgccatggccrgggtcgctgtgtgaatgggcagtgcrtgtgccatgaaggatttatgggcaaagactgcaaggagcaaagatgtcccagtgactgtcatggccagggccgctgcgtggacggccagtgcatctgccacgagggcttcacaggcctggactgtggccagcactcctgccccagtgactgcaacaacttaggacartgcrtctcgggccgctgcatctgcaacgagggctacagcggagaagactgctcagagggtgagtgccagggcgcagaccagcatataawggccatgatggagtggactcctagtatgggttggaaaactacgtttatatatataaacattcatgcacactgattctttgtacgtattaatatatccatttaaacacacacccataatgactttttaagggggccctgtcattccgttgttacaaggtgacctatttaagggctgaagggctcagagaggttatataattgtcccagggacacacagctgacacatcacagagctggtattcragtctgcctaactcatctacatagagtttaaaataaagttggagaggccagaacacatctagtgttcaagatgaggtagataaagggatactctctcttttgctaaatatcaactttatttcctactctccactgacatcaaaccaacagtaaacaaaatctctgtatttggatggatgtaaaaattcagctaaattgaatacgcagtgagattacataaaaacaactgtttcaaatgcatacttggctaaagacsaaatgcctattatctacaagattgacctgtcttttcattgtcttttgtaactggttttgtttttttgattgttttgtttttttaatcctaaagactgcaagctcctatccttaaaagggcactatttctagcagttagtatgggacctggtacatattaagtgcttagtaaaccctggttaagtgaaaacacaggagagaaaattaatgctcatatttaatgagtgtcttctttgtactcctctcatctacccatattatcattgtcataatggagaattttttcctttactaaagttattggtatctaaacataaataaatggctttgtgttcaatgtggcgcaagcagggaagcctggttggaaagaacaccaggctggcagggaggagatacaagttctaaacttgatgaggtgagcaagcttggtcaagkcgttctgtcttactcacctctataawataagaaagttggaccagatatgcccaaaataccctcccagtgctagggacacgtaactcaaagttcagagcagggagtgaggctcagactgcactttcccatgccaacagcctgcatctgagctaagacccaggaagcacagaaagttggagaggccagaaacaccmaaggscacactgctgacctgggactccagcctgaaggaaatggactaaggaacagccaccacaggtcttaagatggatcacagcagggggtscctgatgccatctgcattttagaggcaacagaagatcttcagacctctgtggctgacagtggaaaagacaggtcaaacaaacctagagagattttagaggacacactgttgacaccagatgtcctttcttattcctgccagtgtctcctcccaaagacctcgttgtgacagaagtgacggaagagacggtcaacctggcctgggacaatgagatgcgggtcacagagtaccttgtcgtgtacacgcccacccacgagggtggtctggaaatgcagttccgtgtgcctggggaccagacgtccaccatcatccrggagctggarcctggtgtggagtactttatccgtgtatttgccatcctggagaacaagaagagcattcctgtcagcgccagggtggccacgtgtgagtgagcagaactcttttgggcagcctcacctgaygtcagcccacccagtgtataaccctccctcgccacggcccctacaatcctatagttgttctttacagttataccaaataagagcctagaattaagtccatagaatcacttattaaagaaatccctcattttccatcaaatctttctccttgctctcctatatacttcctgccagagaaaatcattacaagtaacatttagcaagtgtttactgtgtatcagactttgttgtaagcagtctacatattagtataagagtcctcatttggccgggcatggtggctcatgcccgtaatcctagcactttgggaggccaaagtaggtggatcacctggggtcacgagttcaagaccagcctggccagcatggcraaaccctgtctctactaaaaatacaaaaattagtcgggcctggtggtgcatgcctgtaatcccggctactcaggaggctgaggcagagaatagcttgaaaccaggaggcagagtttgtagtgagctgagatcatgccactgtactccagcctgggtgacagaktgagactctgtctcaagaaaaaaaaaaaaaaaaaagagtcctcattatatgagttagtatatgtatgaaataggagctattgttaaccccattttacagatgaggaaactgagactgcatggttaagcatcttatcccaagtcatgcagctaacaaggagtagaggcaaaactttaaccctggcagtcctggcaggtttatgttctaaaccactctattacttttcagtggagatcactgactatttttctttaagtrgaaacattctggtttatgagtttagcatcagtataattaccttcatatctaaaaagcaagctctggctagaaattgacccttttttccttaataataacattggctgccatttattcaacttgttctgcatgccacgaaccaggcccagcagtctacacactggagtggagtatatcactcactcctcaatgcattcccaagaagtagayatatttaycttctttttccaagtgaagaaactcaggcttagagcaytgtgtgcaattgctcaagttcacattgatagtagagcttagattctaaccccaagtctgtctgattccamagcctgcgttcattttagatttaaacatatgaaattgccaaaattaatcataccatttttcctaatattaatttttatacagcctcatagagacctcatcccagaagaagctttaaaaggacacctgctctggttgtcagcccctgactgttgcagacatccagtctggtttagtggaatcgtggccgcgttgcccaatcacacacctgccctatccttacgttctatttatgttgttacttacagacttacctgcacctgaaggcctgaaattcaagtccatcaaggagacatctgtggaagtggagtgggatcctctagrcattgcttttgaaacctgggagatcatcttccggaatatggtaaggagtacaaaagagcagatccatttgatctcaargatttgaaagatgaccaaagggttctgaagacttctgtatcaactaattttccttagtttttggtggaggacaaggctctcattagcatcatttgtgtttgcatctatattttaagggatgttggtttttccctgattttaataagtaagtgtagcacttasggctgacaccctagacaaatagaagttgtcacctcaaggttccaattgtccatcatcaccttagaaatctctactcagaggcaaagaagagaagaaacagtctctccctcaaaataaaggtacatctcagatttgagcaacccttctctccaggcccaaaagtacatgtgaagcagggaacttgttctctgaatttaagcccaggctctgccaccaaccagctgtgtgactatccaacaatcaccctactcctctgatgctggcctcagtctacccaaggagggattgagcttgtgccttcagaattcctttggctctcacattctgtcatttgacttgcatgacaaaggggtaaaagtttacgaatgggagaaacaaactagagaaatgtctttatcatctctgtatcctcagtagcttacatactgatctgatgcatagtaagtgcctaatgaatcgatgaaagaataacagaggaatgaatgaatgcagagtgaatgaatcacataaattaagagactggcacctcccytaactcttaccaagctgcctctatctctcagaataaagaagatgagggagagatcaccaaaagcctgaggaggccagagacctcttaccggcaaactggtctagctcctgggcaagagtatgagatatctctgcacatagtgaaaaacaatacccggggccctggcctgaagmgggtgaccaccacacgtgagtatcacctttaatacttatagaatgrtaaggctgattgtacctcatagcacctcctggttgagaaagtgccttctcatatagcatctacatcatttaacttttgctgcatttttaaaaatccagatacagtggtttaaaataacaattctttgcatgttggtgatttgggtttgggctcagctgagcagcttatctgttcttgactgcactcctmatgtatctgtgtgcttaaggggtggattggcctaggatggcctcagccaggatggtgtctttctgtttcgcagagcctctcattctccaggatgctggtcctgttcacacagctattgaacaggttcaaaattggcattagatcacttctatcaaagcacatcccacggccagtttatatttaaggaatagagaaacagatccatctcttgatgaaaggagtttcaaaatctcctttcaaaggggtgtgactacctgaagataattaagcccattgctaacaatctaattagcatcatgtcactagtttaatattagcacccagttgtaggacagaggaagggaaaatattaatgttaaggcttaaagaagctaaatcactttaacatcccatagttaacaccatcaggggcataactttaagccagggtaagttttataactttaaccccatttccactaacattgactaggctctggtttatgtagaatgttgattccatctcttcaatgggaacctaaataaaatttcattcaatactaatgatgtcagaagttcttgggagtagaataggatttagcagtactagatcatttggtgagaaaaagacctgaatttggagttgctccaccaggaaacatttttttttttttttctgtcacccaggctggagtgcagtggaacgatctcagttcactgcaayctctgcctcccaggttcaagtgattctcctgccttagtctcccaagtagctgggattacaggctcccaccaccacatctggctaatttttttgtattttagtagagatggggtttcagcatgttggccaggctggtttccaactcctgacctcaagtgatccacccgcctcggcctcctaaagtgctaggattacaggcrtgagccaccgtgcacagctgcaattttttaaaaagaaaaaaatgcataattttgcacttccatataggaaaacctctttattttcttcaagataacatatgcgccaactctttaagtaatcgactcttcttggcagggggttgttggaaaaattaaatcagttgctaatgacaagaaagaacatcttgcatttaaatatttgcacattttgcctagctcagagccaattcaaaggattttctctttcataagcaagtgttttccatcatcctgacaccacctctctgtggtaggtagaaaagcaggtaccaacaggaaaaaaaaatcattagatcaccagaaagacaaagaaaagacaaagcaaatgcttagttgctatggaggaggtgcactgaactttttttttcactgctcttttgtttatctaaatttgggaattgtctgctttatttcttcttattttagaacaaacattccaacatttgaagttgcataatcataaatttcaacatagggggacaaatatttacctgttcattttgtatttttagtagagacaggatttcaccatgttggccaggctggttttgaactcctgatctcaagtgatccacccgccycggcctcctaaggtgctggcattacaggcatgagccgccacggccggccacaatttaccacatatacctgaaacctttaaacctttaaccttttttccagatgtaaagggccttaaacttctagttcagaacacatttggctccttctgtctggcatctatataaaggtggtattatacttacttttgaggtcaatatgtttgagaggtgttgtcatgtaaagggggaaaaggatgggctttggattcaatcagttctgagtttgaattccatctttaccattcaccatcaccttggaaaaatctatttctttaagctccagatccaacagctgaaaaatgggtttatagtattctccttgtggggtcrtcataagactcaagacataaataacaaagcaccatstttgcacctgataaatacagagcattgttagtttctgctattcaagggtcccaaatctagggggatatcagtgtccttgacggaaacccaacttctttaatgcaaggggtactaaggaaggtagtaggtacggtttgggtgcttgctagcacctataagaacacagagcaggcagcttctgtccatttttgcgacatcattttcattgtgcattttacatcatctgtgagctgggactgatgtgtcaacacctagacttcaaaaacagactctgcagttttctcacaatctgctgtaaattattgttccttttcattccctgtataaagccmacttcctgtcacttgttattgtttactgaaccaatgctgaaaacacatttaaaaaaaaaaaaaggagaagaagaagaaagaaagattcaaagattcactgaatacccagaatatgcctgtctctgctgggaatttaaaagactcactctctcartcaatgaataaccctacctaaattgactcaaactgtacagaaatctgttatgaaacaatgagacacgtatgatattagaatgctcttcaaggacagtggcagccacagggagggaatatgtgtttacctgactgaagccgggttaaaaaaaggcttctcattaggagacaacatttaagtgggattttgaaggatgcataggagatttttagagggaagtatgatcttagaaagaagaaatgagagaacagcatgtacagagaccaggcggtgcccaacagcataatgtgcttccagagctctgagcatctatcagagtacaacaccagagtaggtggggcagaaaaagtcaagatgagcctgcaaaaacaggcaaggcttgaaatagcaatgactttcttgcgtgaattctttctatcaaaaataagtttccatacactgtcaagacagtctattgcctcacttttctgcttggtaattctgatggaaaagtyttcaggaaacatccaggaagttttgcctaattaaaaatttaaagagactaagttcatcttttcaaataaagtatccccaaagcawgtttcctcaacttatgagaacagtaataataataataataacaaaagaacaacctttttttttttcatgtgacatccatgggccagtctctgtgstagatgctttgcaagctttatctctcttaagatttgaaaaaaacaaaaacaaaaaacactagaggtagctgctgttatccctacttatagcttatcaaaccaaaaactaaggttcagaaaggcaaagtaaagtcaagcagttagtataagtattcacccacaggtctggagagttacaaagtcctctctctgctaagcctcaggcaatggccctaacctctgaagcctctctgtcctctgcccatcataggcttggatgcccccagccagatcgaggtgaaagatgtcacagacaccactgccttgatcacctggttcaagcccctggctgagatcgatggcattgagctgacctacggcatcaaagacgtgccaggagaccgtaccaccatcsatstcacagaggaygagaaccagtactccatcgggaacctgaagcctgacactgagtacgaggtgtccctcrtctcccgcagaggtgacatgkcaagcaacccagccaaagagaccttcacaacaggtaaaaggcctccccctgttaacagatatagtaaaggaaagattgaaagatttccatcccactccatgttggggtatcttccaggctcattttacagtacgaaaaatgaaaggggtatttctactcctgtaaattttaaaatattgtagcaatttattaaytaatttttcaaaaaaaattccaaataaccttccaaagcacttttgggggtgggggacatatgtagaagatgctggtctgatattctcagacaaaagttctggttaaaataaagttcaaataaatatttttaaagtaaaatatggtatatggaaaacatatatgacaaatgagcctcctaacactttagcctacggcattattttaaaagttcaaaagtgtcaatttttcattcagtaaatatttttcagagctcagtaagtactttgtgagttattagaaatatgatgaggaggccgggcgtggtggctcacgcctgtaatcccagcacttggcaggctgatgcaggcagatcatgaggtcaagagatggagaccatcctggccaacatggcaaaaccctgtctctactaaaagtacaaaaattggggtcaggcgcagtggctsacgcctgtaatcccagcactttgggaggccaaggcgggcgratcacgaggtcaggagattgagaccatyctggctaacacagtgaaaccccgtctctactaaaaatacaaaaaaaattagccaggcgtggtggcgggtgcctgtagtcccagctacaggctgaggcaggagaatggcatgaacccaggaggtggagcttgcagtgagccgagatcgcaccactgcattccaacctgggtgaagagcgagactccgtctcaaaaaaataaataaataactgggcgtggtggtgtgctcctgcaatcccaggtactcgggaggctgaggcaggagaatcacttgaacctgggaagcaggggttgcagtgagccgagatcgcaccaacacactccagcctggtgacagagcgagactcttgtctcaaaaaaataaaataaagaatgaaatatgatgagaaaatgcaaaagaccagtttttacactcatgagcttatttttaagtctttgcattgtttctttaaccacaaagtctgagaaaaacacaaatgactaaagtgtcgcactcatccataatagggaaaggtgccaaatctgtagcacttgtttagatttgcacatccactatggggacagatgagtgtgctgagaattttgtaatttctctccagttccaggcacgtttcatatgtcagcttgagctgtcaaagactcctgctctcttgtgactgatatgttcaatacaaatgttccttctctcaaacaggcctcgatgctcccaggaatcttcgacgtgtttcccagacagataacagcatcaccctggaatggaggaatggcaaggcagctattgacagttacagaattaagtatgcccccatctctggaggggaccacgctgaggttgatgttccaaagagccaacaagccacaaccaaaaccacactcacaggtgagctctgcatctctgcaagcctgagccagccagccctagagsgcccttaaaggatgggcacctgctcccacatgtccccatttgcaaccctcagaaataagtccaatttcctgaaatactgcttatyggattgcagtgagttcttttgtaaaacattccgaaaatttgttgtagcctccagagaccaactcaaagccatttttatcatcctctgaaagtctctctgatttcaggatgaatctcaacttgcacattctctccttaggtctgaggccgggaactgaatatgggattggagtttctgctgtgaaggaagacaaggagagcaatccagcgaccatcaacgcagccacaggtggggcacacctggaattcccatcccactgagctgstgctgggcagatgagacagagtcaatgtggccaaaacctatttaaagagaaaaagtagaagcctggaggaaaaagggccctgtagtaccatctagccccaatgttgaaattcaaaaggaacataagtacggtccatctgtatgatgccaacatcatcccctgtatggaaaaggggactggagattttgtgtttgttgttgttgttgttgttgagatggagtatcgctctgccaccaggctggagtgtagtggcatgatctcagctcactgcaacctccgcctccagggttcaagagattctcctgcctcagcctcccgagtagctgggactacaggtgcataccaccacgcccagctaatttttgtatttttagtagaaatggggtttcaccatgttggccaggatggtctcaatctcttgacctcatgatccgcccacctcggcctcccaaagtgctgggattacaggtgtgagtcactatgtccagccgggattttttaaagaaaaattggaaccaggctttgtaagaaattcatgaacatgtgtaagttggtaatcagttgcatcttttaaataaaccattatctagtccaaacacaactgtggggttttctctgagaaaacacctaacttttatacccctgtcaagcagattataagtaacaggattgtagtttaagtccaggccctgcacttacctgttgtatcctgtagccgcagcttgtaggtgaggatgctgaggggctacctgatttgaggtcattgattctttcctcaagatttttttttccatttttctgggaagtttgcactgcaaaaagaaaactcctcctctgcctctcccccagcccccagcttacctccccacaggcactatgaggaagaaggaggctagtgtgtaaagaggagatggatcatcattgagcttccacattatgcgggatgcaaggccggacatttacatgccaattctttttttttaatcttttgattttgagataattgtagattcacatgcaaytgtgagaaagcatacagacagatcccctgtgcccatcacccaggttcccccaagggtagcgtcttgcataaatgtagactaatataacaactgagaaattgacattggcgtaatctgtccactctatttatatttcaccagttttgcatacactcattcgtatgtgtgtgtatatacttagttctatgcaattttatcacacatgtagatttgtgaatgcaccactagagtcaagatacagaacagtcttactacaagaatcccacatgctaccctttgcagccacagccacctccctccctttgcccctctgcctaaccctgggcattcatttatctgttcttcatctctatgattttgccatttcaaggaatgctgcataaatgggatcctacacatattagtccatttgagttactgtaacaagaataagaataccttagaccaagtaacttataaacagaagaaatttatttctcacagttctgaaggctgcgaagtccaagatcaagatgccagcagatttggtgtctgatgaaggcctgctttctggctgacagcaggccatctttttactgtgtcctcacaggacagaaggggcaaggtctcttttataagggcaccactcccattcatgaggcctcccaaaggtccctagatccaaatgtcttcacattggggattaggtttcaacataagaactttagagaggcacagacattcagtgcatagcaatacagcatgtaacattttgaaactggctttttttccttcagcataattctctcgagattcatctaaattgcttcttttatcaatagttggttccttttaactgctttaaatctgagyagcattttatggaatggatattccatgacattattttcaatcttctcagactccgatggggtcatgtgggtgatgtataattagacctattttacaaaagtaaaaagagagacccagagatgtgactctcctgtggtccctcagctcctctgtggcagacctaggattccagcccagatgcagttgactttcagccccagaagcagccctgycttgcagcctgaagagcattcatctctctgttctcctcccagagttggacacgcccaaggaccttcaggtttctgaaactgcagagaccagcctgaccctgctctggaagacaccgttggccaaatttgaccgctaccgcctcarttacagtctccccacaggccagtgggtgggagtgcagcttccaagaaacaccacttcctatgtcctgagaggcctggaaccaggacaggagtacaatgtcctcctgacagcygagaaaggcagacacaagagcaagcccgcacrtgtgaaggcatccactggtgagtctgccctgagcttcctccaaactctaggttgattctgaggttagcagatctcctcagccagggtgtcctcacatgagaaagccaaatgcaaaagcaagccactttctccatctctgaagcccctgaacaccactttgaaagggctgcttactcgtcttttctacctcctgtcaactgatacagcaaatttcccccactgggaaataggggttttaaaatatttcttcctaggagaactttaaacatcagggtttgtgtttgcatttacctatgatttttgttttcttttcttaactgtgcatcacagcatcttttcaattgtttcttgtttatttccttcttttagcctaataattaatttacttttcattttacttcatttaaagatgaccaagatgttggtaataatattttttttgttgttgttattttctacaaactgtttttattccaggtcttttgctttctgccaaggttacccctgaagagtggcacacggccctttgagacttccatggtgccctctcattttctcttttctcttagtcattaagacattaacctagtttgtctatgacgacagcttaatcctgacattgyggcccatgcaacttgtgtccaytctggcccatgcaacctgttcactgaacctgmggccatgsttactcggtggctaaactgaagagacaaccaggtttttaaaatatttcttcctttatgaaaaataagcctattcaattttggccaccaaatattcgaaatgtataggtggaaaatgttacttttccagggtttggcaagtaatagtctttacttccaatttaattagtaagcatgtattgagtacctactgcatacattgtaccgtactgatatttgaggaaaagtagttcccaaagtcagcattgttatgtggactcatttgtgcctgctcatagtgcttgyggaagactagatactcagaatgctagacagaactcgagaaaaagagtgatccaaggaaatcaggagagctggcaaaggtgttatggcaagrgatgttattccagttgaagcttgatatgcaagaaaagggttagaagtgtggacatatttggaaatggcttgaagagtctttctcacaatatcttcagtctcaaatcacagtcacttacttaagatagaagttggttttctttcttataaaatgaatctggagctgggaggtacagggataacttagtagtttcaaattgtcaggcacccaggctgcttctttcttttccaccatttttagtccttggcttccattctcaaagtcatctcagtgtcacaacatggctgctgtaatacagccattccatctgtgttctaggcagcataagggaggaagaaccaaaactyccaaagaggagcaccttctgggtgagtctttctggaaaccccaccaatcacttctccccatagttcattggccactcctagctgtaagggaggcagggaaaggtagtcttctgtctgaacatgttacttccacataaaattgaggtcatttgtaagagagaaatttggcagacaatgagcagtccctgccagagtctgaaatgagtttacgtggtcaattctgttgactctgcattgactgcttcccacccaactataagatgtttataaaggatgctctgaaagaatagtttaattaaaaaataaggtggggggcggggatagaaccaagaagaaataaatctatagtagagatttaaatttcagctttataaacatgagcttgttataaagtgtcaaggggcaacaaatgaatcagaaatrcccaaaaratgaaatccctctcttttctttctctttctctctctttcttccctcttccctcactcctgctcttcttcctcctcctccttcctctgccccyctcccttagctttcccttgagtttgataaatgctgtatctaagagagattcctattgcccctcaatcattccaccttctggtgatggccacattgcctccttcctccagtgagaaarcctcacacckgcgcagtcactgaagaagttttatctccctaagatcctgaggtgtggggcttctccactagagaaaggaggtaatgtggctataaccaggagatttactagctagaattattctgtttctgaatgagagccccatrttggcattccaaagcctcagcagttgcatttccccaccacgcctccttaatgccatttcaaagatatcatgtttcrtatttaaagacattcttcagtgtgggaaaaatgtgcaaagttctttttattggttcttctccactgtccacagactatttcccccatccctttctccacaggaaaaaatatayatgtttcatttaaggtgaagcagacgyttctttccctccttgaattctaacttttaaagccttctgcattcactcagtcaataaaatactatcaccatgctctgtgctaagttctggggttactagagcaaagaagacgggtatttaattccaaggaactcactgtgtagcgaacaaacagacactgagataacattctgctcactacgatcgagggtacagagggtgcagccagtgctcaggagacactggatctaacttcagagaatcaggaaaggcttacaatgggaagacgcttttggacagagacataagaggcaaacatagatgtgttaaatggaatagctaaagaagtagaagcccaggcacctgaccttggtaagcatagaggaagaaagaaaacaggaaaagygagagctcttgggtgaaggagccatgtggctataagtcctgaaatgttgcagagttttaggttcaaccatcagaagcaagaaccttccagctctgtatcactggattcttaatagcagaagcctgccaggmgccactcaatgtctgtggggcttacagagaaaaatgaagaatcagtggccctgaagaatttttcctggggaattccagggttttactgatggattgggccataatgtaagtctttttcttgatgtggcaccatactaaaaatatgcataacctggccacctatcacacctctcgcccaaagacccagccatgggttacagggccctacagaatctggcacggccagcccatcctctgacctcagtcctgccactcattcccttgctcacttcaccatggcctcttgggccttcacactgttccttaagcttgctgagcctgctcccaccctcgggctttggagtgtgctgctcccagtccctggataccactcttttcccagcacttcacagagcgtgctccctcatttcactcagcagctcagatatgacccagaacagagggcttctctgactaccagcctaaaaaggcacccccatcctgatctaccccttcaagctgctctaggtttccttgtgaaacttatctgccttgatattatgcaagtattggtttactgtaatatctatggcctgcctccccatcagtgagcagaatataaggactgactccatcatccactgctgaatcccagtgccctgaaggcagacaagtatgtggtatgagcttcatgagtgtttagggaccctggctacttcagagtcagcatttccatagaatcttctgattcttcccttccacctctgcattaacaccccaattctttccttaaggcataagggaaatcattcccttggaaagtcttcaattccgcttaatctggatagaaaaggaaggaaggaaggaaagaaggaaggaagggaggaaggaagggagggagggagggaggaagggaggaaggaaggaaggaaggaaggaagggagggagggagggagggagggagggagggagggagggaggaagggaggaaggaaggaaggaaggaagggagggagggagggagggagggagggagggagggaggaagggagggagggagggagggagggaggaagggagggagggagggagggagagagggagggagggagggaggaagggaaggaaagaagggaggagggaagaacgaaaggtaccgtgtctgttggcatttaaaaaaattagtgtgtaccaggcatcattccctctcctcctctcccattccctcccttctctttccctctcctccactctattctcctcccctctccttcctctcttctcccctcttctctctcctctcctctctctcccttttctctctgcttttgtactcttataaacccaactaaaccctgcttaaggtcaaagccatgaatttgctgcatgccataagagacaggaggcaggggtgataggcagaaacataaagccagcaaagcatattttcatagcaacataagccttgacagtgacaacccagtagctctcaggaattttggaagaagaaaggtggaattttgtttttagccacagctaccagtaatacagaacattctgctcttatttgctattttgattttctcacagaccaaactgaaatttattcaaatatttattcatccagcaaatatttatttcatacctactgtgggtcaggcgatgccggtgtatagaagagaaagaaacagcttctcttctcaagaaatggtgcacgttgctataagagagagaaccaaaacccaaattataacactgtagcttatctgttttagagggatttgtgggaggctgcaggagcatacagacaggtacccatcacagacctaagcaaagggaatgaaaagcattggagaaggctttttggaagaagtgatgtttggttgagttctgaaaaagaaaaggggctgggcaagtggagaaagagtaatgacatttccagcaaagggaatagcatctgaaaagctgaaaagcatgagaaactttaccttagtgaactgcaagctatacagtcctgctatatgatagagtgggaaaacagtagggtaggaggctagagacatcatcaggggcatctgcaaaggggcttggttcttggcagttacaaagaaatcaccgaatgttttaaggcagccaaggcttctcatttcaattgtcttatctctgagagatgagagtaaagcgactgaagataccctttggggttgtcaggcttggatgtgaccatgcccctgctgtgggagaatcactctttctcccctaagtggacgctgaagtgagttcctcatcaagccagcacttggtaatcactatctagaagatggtaacaatctacagatttttaagttggcactgtcagaaattcctccagaccagctgctcaacccaccaggagcacagcaatgggtttcaaaattctgatttcccaggcccactgacattgttcaagggtagattccagtgcacagctgtaagaagaagacaacagccttttgataaagaaatgccaagaaattcagtgtggaatctataatggaaacacttggcttctagggcagtaagtccacagtatgtcatttgcagttgaaatgtggagccagcatttatgtgaagcctcttggtcctcatctcaactattgtccactgtattttttattcataatattcccccttctttcataattctgaccccctctctctttaatttagctactgattttatttgtggaagttgtaccttttactcacttggctagcatttatttaataaagggatctggatggggcacacgtagcatccactactgacatggccacagtactgcctctctgagttataaaccaatgctctttcttgatttgcctaccaaaaaaaaaaaatagtagagaaatagccaaaagtgttagcagaagtaccaacaccatcactattactatttactgaacaacatgacattatgtaaaaaaaaaatcactctatcaactatatgaacagatgaaacaggatgtggggacaattagatgaaagtatcagtggcatactaaatatccgattcaaagagataagatgattctcattaggaagagacattttccaacgtgcatcttttctctccatccatcttttgccacagcttaatgggcaatccacaatctcattcccccaccccccgtaaggtaactttcccaatatctctttcaagggggcatttaaaatttattttatagaaaaaaatgttttatgtaacaattagacataaggattaaaagatagacacccgtagaaaaaagacagtaacttaattcacacgaaggggtacgttgtcaatgacagattagttcctgacaggtggacagcagagaaacaaaaacaggaaagtgggataagaaggagagctaagaagacatagggttgatttaattttcacttagctctgtttttgtcctatatctctttctgtatcaggactgctgaaatatttgagaaggacatgctcttgagtttagttgtgcttaaatcccaatgtcaagggtataatcactatatccagggaactgtttctggcctcacaaggcccagcaggattaaaggtagttgacacctcctttcttttcctaaatctagatacatcacttgcagtttggggtcctccctttctcataaagaccatgtttaggtggttaagaactgctttggagcctctggtgtaagctttaggatatgagtcggggttaaagaggagtctgtattcaagatcaagtattgcaaacattttctgtaaagggccagatggtaaatattttagactttataggccagagagtttccattacaattattcaactgcacattttgtaacacaaaagcagccatcaacaatatataagtgaacaagcatggctatgctccaataaaactttatctgtggcaccagaattggaattttatatgacttgcatgcaccatgaaataatattcttctttggatttatttcccgaccatgtaaaaaagtaagaaaaactgttgttagcttgctgactaccaaaataagcagctggccagwtgtgggcctcgggtaacagtttgcggacctctgttctcgatcaaacaaaatttgaaggagtgtatgctctgacaatatgaaacaagcaggaagaatgttccccagaacttagaaatgtctgagttaaatcaattccagaaaagaaatgttttctcctctgaaaggatatcctcaatcaaattccaagctaagattttcaacttagtagcctgctctaatggacacataaggctcatttgaaattagcagcaatgtgaagtataaatagaaaaaaacagtttgttcttttaaatgatttaaagtcagtttctactctctagtttacaggatccatttccagagaaatactttccttcctaaactatgcaaagtccacttaagctcagccctgggcaaattatctcccttaagtcaggttgagaccagtgagtttttacggaatttcgtgcattcgcgagatgaatgaacagggtgcattcagttttacttgagcttcataagatctgcttctcccaggacctctttcttttttctattaaggaacagtttttcaaagccttatcaccttccttagctcagccttaataatactgtgtcaatgtgtctctgatctttactaatatgatctatgtaaatgatttgaacgctagaaactgatgaaatcccaatataaactatacaacagacctcccataggatattgaggcagcacaaaaaagaagaggctttttttttttttttttttttttgagatggagtctcgttctgtcacccaggctagagtgcaatgactcaatcttggctcactgcaacctcaacctccagggctcaagcgattctcctaactcagcctcccaagtagctgggattacaggctcacgccaccacacccagctaatttctgtattttttgtagacacggggtttcgccatgttgtccaggctggtcttgaactgctgacctcatatgatctgcccaccttggcctctcaaaaaagaagggtatctaagaagagccaattgtctcaaaatacagaaggtcggacagctcaaaccaagacccccagaataactgagggccaccccattatgatgcaagacatgttccaaaatgaaaactgaagctcagagcatcgctaacatagacatatagttttctaaatctgcaggacactgatcaataggaaaataccatttccaagagaaaaacccaaatatgcatgaaggcaaaagaaattttttgtttgtttgttttgagacagagtctcactctatccyccagactggagtgcaatggcgccatctcagctcactgcaacctccaccttctgtgttcaagcgattctcctgcctcagcctcctgagtagctgggattacaggtgcccaccaacacgcctggctaatttttgtatttttagtagagacagggtttcaccatgttggccaggctggtctcgaacccctgacctcaaatgatccacccaccttggcctcccaaagcgctgggattacaggctcgagccaccatgcccggccacaaaagaaatatgacattgttgtcctgctggtgttttaatagggacagcaccagtaggggatgcagtgaacaaagcctggcacttggactgcaatggcctatagatgtggcattgggtttgccattcccaggttctcagaagcaaaactttctgaggaatagtttaactgaccccatctctgtcattattcagaacaagcccctgagctggaaaacctcaccgtgactgaggttggctgggatggcctcagactcaactggaccgcrgctgaccaggcctatgagcactttatcattcaggtgcaggaggccaacaaggtggaggcagctcrgaacctcaccgtgcctggcagmcttcgggctgtggacataccgggcctcaaggctgctacgccttatacagtctccatctatggggtgatccagggctatagaacaccagtgctctctgctgaggcctccacaggtatctctttcctttctatttatagcttctgtttttcccagcaggaaactgcccatgaataatcagacacgactagctttggaatggacttgttctgccactacttatgtctatggggtctaattgtgacacgaggccatcacgctacagaaccccaaggcaacttttaatacttcactccacatgaatgacacccttgggagttgtacagagctcaacctgcaggactaaacacacagctcccatgcagagggcctttagctccataaacagcctccctcctgttaaaggacgttaaggcactatatatgaaagggaaagaaaatcacaaaattctctcatctactgagggttaaggcaattctttaagatttaaaaaacaaacaaaaacaaatattttcctgcactttcctctctttgctccatttctaaaatttaaagagttgcatgatgcatgtttatctaaagaaagtcacattttttcagtaatattattattcagcttattcttgtgttaaagattccctggatcttgttgtgtgatttgatcactaaactagttctttgtccttctccaggggaaactcccaatttgggagaggtcgtggtggccgaggtgggctgggatgccctcaaactcaactggactgctccagaaggggcctatgagtactttttcattcaggtgcaggaggctgacacagtagaggcagcccagaacctcaccgtcccaggaggactgaggtccacagacctgcctgggctcaaagcagccactcattataccatcaccatccgcggggtcactcaggacttcagcacaacccctctctctgttgaagtcttgacaggtattctagacgaattcactaattcacttcctcccctttgtctctgctcgggaggaatcaaagcactttcttgctttaaactgggatcagctcctaccacattggggaaataccagtgaatcatctctgcttcttcctaaatgtcacatcccttatttggctaagtcctagttgtagcccagttccatggaaaattccacctactcctcctttaaaaaagtgagaggtggcttttctttcaaagtaagtttcagtcacaatatctaaaaagttggaaagcccaacctgtaaatgaagaaaaaatagctctgagctcatgagctcattttaagaacaccaaaggactccccatagccctatttgtatgtcaagaatagaaattgtgaacaattcctaaaactacttttcattcccaaaagctgaatagaaaaaccctggctttagtgccaacagtttgagtgtgctcaacacctgctgtaaatcatgcatctataatcaacactaaccagacaactcatcccaaccttagccaaaatgccatctcacctgaatcccagcgtgcaattgcctttttaagtaactcagcaactctgtgtccttatgcagaggaggttccagatatgggaaacctcacagtgaccgaggttagctgggatgctctcagactgaactggaccacgccagatggaacctatgaccagtttactattcaggtccaggaggctgaccaggtggaagaggctcacaatctcacggttcctggcagcctgcgttccatggaaatcccaggcctcagggctggcactccttacacagtcaccctgcacggcgaggtcaggggccacagcactcgaccccttgctgtagaggtcgtcacaggtatatgaccctcctcccagactggagacatgataggagccagcatgtcattgaaatagagaaaattcacccgtgtggcagaatcctaccccaatgttgttgacagacagcgtgaatctctaactcaggaaggtctgtgttggaattccacctcactagctaaatattcttgggactatatgtgtatgtatatatatagatacacatatatacacacacacaaatatatacttatatatatagtgtgtgtgtgtatatatatatatgtgtgtgtgtatatatagatatatacttttttttttttttttgagtcagggtctcattcttttgcccaggctagaatgcaatggtgtgaccatggctcactgcagcctcgaactcctagactcaagtgattctcctgcctcagcctctacagtagctggaaccacaggtgtgagccaccacactcagctaagttttttgtattttttgtagagatggagtttcaccattttgcccagcctggtctcaaactcccgggctcaagccatcttctcaccttggcctcccaaagtgctgggattacaggcatgagccagcgtgccctacctctattcttgggtatatttctttacatccctgagcctcctttttgtatctttaaatcagcaatgaaccctacttcaggaaactgtcgtgagcaataaataagttaatgaatgtcagtgcttagtaaagcgcccatcacgtagtaaatactgaatagcaaatagctaaatttatcatacagcaacagagtcatgatttttaaaatagcacaaacgttagggctgtggcacaaaaataagatcagaactttctagaaaaaccttattactagcytcagagccaccaactaacacccamctgataggcagatctctacataataacctttagaaatgatgcagttagcttctgctgaaactatctaggactctctcctcaacagatacaaaaagcagggacatttccaagaaaggacagccacctttgacttcaatgcttttcattcaatttgggaaggaaaaacaattcctctcaattttccaccaaaaatgagctgctccatctgttataaaaaactgtgctgtacatgagrtttctagaaatagcttcaaaaagggctatgggaaaaagggccaactttttggtgatagggtttctgtgctgagccctaagcccatgccccactctacatatgctgccttttgataatgcaatccaaatcactcaattcaaaacaattgttttccttgctcttatataacagrtaaacttggtggttgctagaaactacataaaattccaaaartaagggggccaggttttattcctgtgttgcctggaatatcttcagatcaaacaagagcaaaaagggcctttgagacaggtgtggyctgtgtgcaagatgctcatatcttcctctgtagtccgcaaacttttgtttttagcagtacaactccttttgcaaatgaaatcttccaaggaaccctactatttgacagataagtgaacagctgttcttggtgtgcctggaagtaagagggggatacctccacccatgttctcaacacagttcttctagaaaagccccagatctatgtggaacacagtttgaaaataacccctcttaaaagcaagaggttgctcagaggttgctcagactctcacagggcattgaatccttggatacccaagagcaagtatctatatctttcaactatttttggttgaaatccctgcagatattctcctccctaacttctaacccatggccacttcagccttcaaaacagtggctgagagactgcatttaaccctcagaagcatcccacaaaacaatgggtttttccatatcctaaatccaaactttctaaatcaccaataacaactacgttaaatttcctttctacattgtagaagcagtaatagtgggttctgttctgcaccatttactgagaaaaatctcctttcttttaattaaaagtagrcacactcatttcacacaaacagctttgctctgtgatacagccattcttcctttagacataaagtacgagcagaaaaaggtggaagaagaaacaagctgagaacccagtacacaacttttgatccctgaaagctgatagaagaccaaagaaaaaacatcatacttgttcacacctgagacagcatacactttatcaacccaggcaggtagccagtggctagtgatgagataatctttctaattataaataatgaaataaagcagggatttctccctgacatgagtaagaaattccaagggaaaacacttgaacaatgatttctttattaagctgacacttattgggcactcgccatgtatcaggtatgatactaagaagttgataaatattaccatttaatcatcacgcaatcccatgaaacagtaccatcaactccatttaaaggtaaagagagggtggctcagagagaagctgagtgacatgcccaagattatgcagctagcaaatgctagtattgggattctaatcaaggactacttgcctccaaattctgcacttgtaaccattgctgtatctcttaccctaacccacaatcctacttttccatgtgaatttcacctgctagcaatgcatgctcccggtgggttgtgcattggtgcagatgtctttgccatctcaaggataaaccatgtagatatttccctttctggccattttcaactcctgaagacaactgtggccagggaaccacagttcaaattgcaaatgctcagagaccaagaattaaaaaaaaaaattatctttcccctttctctctttcctagagttgggctgtgggatgtttggtttcctcatttttggtttatagaactgacaaatacttttctgtccttcttcagaggatctcccacagctgggagatttagccgtgtctgaggttggctgggatggcctcagactcaactggaccgcagctgacaatgcctatgagcactttgtcattcaggtgcaggaggtcaacaaagtggaggcagcccagaacctcacrttgcctggcagcctcagggctgtggacatcccgggcctcgaggctgccacgccttatagagtctccatctatggggtgatccggggctatagaacaccagtactctctgctgaggcctccacaggtacttcctctccctgtcaatgctttctccccaaggttctttgcttccttttcaagagatcatgcgcggagtcagcatctcgccataactgaatccttttcatgtgcctttcagtggccggctgtgcatgctcagagacctccctgtgggctatgactttgtcctcatgcctttgccatgtggatggtgaatgatgcaggtgttgccctttctgatctccagccccccagcctttcatactttacctggctgattctacatcktttttgaatgatgaatttttgtttcaggaatcagcctgatggttttaattcacttctccagtgcttggagataactaaaagcttccctccctatatatgagttctggtggaacacagattatttactkctgagagtcttttgctagttggaaatggtgcttttctatctctaaatccctcaaggatatgggtagtgtggttcttgcatgtaagaaatgtttctttaaaatgcacccagtataataagagaactgaattaccctcctccgggcagttctctcagatactgagtcattgttagaacatcaaattagcaaatagctagaccagaaggaaaaaaaaagaaattacacaattatgactggagactgtaccaaagagaaagccattcattagcacaagtacacacagcagcttttggaacaaggaatgtcctgggctatgaatgtcaaagaactgataccctttttgctcttttaatcaagagtttctctctggagtgttggcctttggatggcaaactcccagccccagacccaggagggtgcattatagtttactcgtcactctacccctgttacaagacttcagtgtttcccgggggcctgccaaagtcagcagccttcctctgacacagttttccgttgctcatctttattatgtgcctccatgggtttgaagctcggtagagactatcgcttcattttgcatatgactgcycccctttttaaataattattgcaactaaactttaatgcatacctgtacatcccagttgaatctagcaagagcatagctctgcattttaacctcagtcatttcactaattttcactgagataaagaaacataaagcacaggcaaccactgccaggacggtgaccctgaaatgcctagaatttgcagccgaggctactctgaaggcacccggacctcctttttctgagacccataaaccatcccttcccagaaggcaaagtaatcacccaccacttctgatcttttctgcagatcttgtggcttgggtgtcctcagtatttttatgtgtgtgtgtttttcttcttaacaatagcaacattcttgccactgatgaattggcctatgggcaggaagttccataatcccatctgatctgtatctcaacaaatctattagaaggatctcagagaccaggagccttctttcttgctaaagagasagtactagcttttcaaaccctgctcctacctgccctctgcatgttttattcttatggttggggaaagcactggcaggaccatcttcaagacaaaatgttatttcttcgctgaaagggatggcctaaactgccttgccttggcttagccctcttggttggcaatgcaatactagcctttttggcccacatagcagcagttaagagaggacaagctattttaacagaatatgagaatggctggctggtccttctctaaagtatgaaaaaaataccaagaattacactgagaaattggtaattaccattaagtcacaaaatcagaagcctcaagttaccaccttgggaaggtaatggcatcagaattatttagccctcatttgaatagatgggagctccttcaaagtaaagaatgtctgtggaaggcatccaagtaatcttggtttccttaatgcaattcaagagactggaagttgccaggactcatatcttttgaccagtggccagcaaccctgaggtagggctcccagaggcaagtgtggttaagatgcaacagttcctgataagatcattcagcacatcttcttggccagggcctgattatatgtggcaactgcatgtagagaaatctaattgccataccttcctttttctaatttcttttaacaaaactgctttttctctccctttggcactaattggtaacattgcttccttccatcatagccctgaattatcagatctctctacccagcaatggttctattaacaacctcaatcttaaaacacagccaaatawctcaaatttatttttttcttctcccctaccccttccttttacagccaaagaacctgaaattggaaacttaaatgtttctgacataactcccgagagcttcaatctctcctggatggctaccgatgggatcttcgagacctttaccattgaaattattgattccaataggttgctggagactgtggaatataatatctctggtgctgaacgaactgcccatatctcagggctaccccctagtactgattttattgtctacctctctggacttgctcccagcatccggaccaaaaccatcagtgccacagccacracaggtacatgtgcattctcccatttctaacgcactctctccacagwcttctttgcagggtgaagcctctccttctcctctcccattgatgtacaagccacagggcactaactcttccatggtgctaggctggggtgctgtttaacataactcttttccaacagcagcccaaataatgcattgccataaagacatgtgcctgatttatcactgaccaggatgtttacagcataaaatgtagttcagtctaatttgccatatggaatctagagaaaagaattctaacctctcataactaaaaagctatataactagacctgttcttgactttgaaagatgtctgcctcagtcaaagaggtcttgtaaattttattttgtattatcttagtgtctttgtcttcctagtctcttggacctcgcaatacccaaatatcccagtgatttaataatcatgttgatggtgttgggtatttttttccaactgggaaagtaaagggaaacagcaaagattacttatcagatgagtgcaggaggcagccatgccattcagaccaccccagttccaacaccacctctagaagatcagaacatgctgtcttgccctcagaatagtgaatgataaatggcaaaaataaaagtagaatagttgtgttcaaacaagggacttagtttaaaaaacaaaagaataaactgctctcactttaaatttgtggtgtctgtgagatgtgcactaagtcagatgctctttgccatgcagtaaaagacaaccctatgtgaatttagaaaggggagcccccctttctaatgctacattcaaagtagcattcttagcacaatttagacagtgccttctctggagaggtaaatgaagaaatcacaaactagaaaaaaagaaacaatatctacagaacaaacacaggagaaatgaagaaatcacaaactagaaaaaaaaatattgtctacagaacaaacacaggataatttttccttatagtttacaaaaaggggactcatggtctgggaaatccaagaaaagggttgacatcgtagcatcaaaattgcctgtcatttaggtcacccatggttgagagagggtctgtcctcattctacatgaggctacaaattgtcgtcagggtgatccatggataaggcagagagagccaacattatccagttgctatctcagccaggttcaagtataaaaaaacttagaggagaaaattaggcaaacatatatgtttgtttctcatggctcaaaccgattttcaacaagggacaaattattttaccattaacaaagggtaaagtctaaaactttatggatttagtcttatgtgttttgattttgactctacaatggtgttttaaattgacacactttcttttttcttttttttcttgctttagtagccaaacctcttcttagccacctcactgtctcaaacatgacctggggcagtgtgtccatctcgtgggaagctcaggagtctgcctttgatagctttcttatagaagttagtaattccgatcacccccatgagaccatggtgctgtctgtgcctggggtgtctcgcagctctgtcatcaccaacctcaaagcttcttctaattacactgcccaccttcatgggctgattggcgggcagcgtgctcagaccctgatggtccaagcaaccacaggtatttcctattatggcttcttcactcttcattgaatttcctctgaatagctttccaaaaatcacccgctayccacttttcaccctcctagttgctcccaatccttctcaaatttgatagagccatccaaatcaaagctttaaagctttaaaataactctcaccccaaattaaagaatttcagtgtcaaacctctttttcctaaatatccattcacatctggagttgttctgtttgtttgtataaagttaacctgacttgctttggttgaatttctaaatcatcttttcatctgatcttgaataatctttttcaatcccacccattatcatctgcctgtggtcgttctamtcaaagtttgcctatgtcatgttcaaagaggtatgtgcatgccatttctggtgmcttggtcagaaagatctacactctytttctctctagcaggattttaaaaaataaaggtgccctgagcatgctgagaatagactctgaatcacaacccaagaattgcatgagaggacccagtagtcttatcttgttctcgtgatttttgtctgaagactactcttttttgacatgtactttgtcaagcacattttgtcacccactgatagctgtcacaaagtctcaggctcttctttcaagccatcatcttgtccaaatcttggtgcatgtggtgaatattcagagcattaaattttgaaaatgtttctttttcctggaagcagctascatgtccatgagtcatttcagaaggtttaaagtggtgggagaaaaatgcccctcattttgcatggaacattgaccataccctaactaccactatctttctctgttttttcttgcatctcatttctcagcttggttgcaccctttgagaggcagctggaggtaaagctgacctcaagaacctgagtcttattctgcatggtgaatctgttggcattgatagtctgtctggtagcatgagaagaatcccagcatgcatccttaatttgggagattgtttctacagcaaaatatagggaaataacagagttccacttggaacattttaatcttttgtgtggttgagggaatttgtcaaagctatagctgcaaatgattgcattgttaccttctgaaactaattgataaggaggatatcccatgtcaatgctaatggctatattctgcttctgaaccaaatcctttttgttcttagagattttatgacatcgaattatgctgtataattgtgccattaaagtttatccaaatgagccccttctttcctccaaactttggagctgaagcaaaataactcccaagtccttggaagaaatattgtgcctcttcccaaccctaaatcctgatcttaatatctgaatcctccagtactgttgcctctctctaaaatacagtctgggccgcacttactttaaaattagttttatttgataaatgagcatttaggaggccagccccataaacatctagccatatagaccccttaacattaaatgagttgctctcaaaactgaatgtctagactttaacagaaaagagatacttaacctcagggaaaccatctatctgtccaaattatccaataattgagtttcctaagcagaaaattcaatgcctaacttcaagtttttctttcacctttgcattcactgggaattttgaatggaagccatcttcacctttacggtattaaatggtaaaatatagattttcctacaatgcatattaagtactgtaaaaatttctcttgtatgggtattagcctttaatttgtgcaaacagtagatactaaaaaagaatactaaatgaggaaactccaaagaagcattttctaaaacatgttcaatggaacaccagctccttgagatgttcaaaggatattcctcagatagggtatacattgatcaataagtttatgaaatttgggccaaacaaaattaaacaggtttactgacagaaccagcctgtcagagcctttaaaatgcaaacccaccttgtgaatctctatggtaagacataatattcggtgtttaccatgcatacttaatcataaagctgtcttttcttggaacatcttacagggcttgtgtccccagtacaaactttagaaaatgtagccttaatacccttcacrttactccaatctaccactctaatggcttgtctactcttcttcatacatgactagcaaatggtggtgtttatgctttaaaagaacacagatctaaaaaatraaataaaaataaagaacacaaatatacacctgcagagaaagcaatatattttctatcatcatattcaatgcaggtgtagacacagcctaacatactgtctcttctgtatgtatttggagatattgatgctttcatgttctatggctacattctggaaaaatccactgcttcctctaataatgtctctctctttctctctgcccatattccttctttagaaccaaagccacagttgggcaygctaatctttagcaatattactccaaaaagcttcaacatgtcatggaccactcaagctgggctttttgcaaagattgttatcaatgtgagtgacgctcactcactgcatgagtcccagcaattcacagtctcaggagatgcaaagcaagctcacatcacaggcttggtggagaacactggctatgacgtcagtgtggcaggaaccaccttggctggggatcccaccagacccctcactgcctttgtcattacaggtactcartcagaggttctcacttgtctaacacagagagaaaaggagataagtcatcttaaaggaaaattcaacaaaaatacaatcttcactgcaaatgtgtactctcttatttttaattgacaaatagtaattgtatatatttatggagaatagtgtgttgttttgatatacatatacattgtggattgattgaatcaacctaattaacatatcaatcacctcaccttatttatttatttatttatttatttatttatttattgtgctgtgagaacatttaaaatctactcttttaggaattttgaagtattcaatatgttattattaactatggccagtcaccatgctgtgcagtagatcactaaaacttattccttctgtctaactgaactttgtactccttgaccaacatctcccctttcttcatctccccaaccccagtcaccggtaaccaccagtcttctctgtgcttctatgtgttcagctttcttagattacacaaatgagatcacgcagtatttgtctttctgtgcctcgattatttcactctgtacaatgtcttctgggttcatccgtgttgttgaaaatgacagaattttcctcttttttaaggctataaagtattccattatatatatatgtgtatatatatatatatgtatatatacacacatatggaatgtatatatttatatataaatatgatctatctatctatacaccacattttctttatccattcatccattgacagacacaggttacaatacattactcatgatagccaagataatatatgtaaacttctaagtaaagagaaagcagatactattataaaggagaggactttcacagctgctcttaggaagtggagagaacgttctcaagagttgtataaagcttttagggttttttgtgcccagttttattggctgttttatccctagtttagagattctgcctaaaaagtgactcctaagttagtaaaggcctaagatcgaaatcctgttcataaatcatgctaggtaacrcagttcatatatgtgmcaaaagtataaccatctttttctttaaaaaataattattcttaaaactgacaacacagatgcagctagatgcagctaatttgaaattcctgtctcctttttttcttytgattaaaaaaaaaatgcatttaccagtactgtcagaaaaaaaaaaaaaagaaaaaaaagaaaaaagaaaaatcacctagaaaagagacgctgaaccttctccactaatcctccttatccctcaggattgccatcactgattggggttggctttgggtatggaaagaacgtagaacttggagtcggaagacctggttgtatatctcagcttaggcacctagcagatgtatgacctaggataagtcattaacttctctggtttttttagatgtgatmggggttggaagattgatgaaggttcaacctcagatggcagataaatttcaagtttaattaagccctacccattcactcaacttgacttcttgaacatttgccaatgttcaatttggcaaatgctgccaaatggtgrcagcaaaaacttcaatggcaaaggctgcacatggtgtcagtttactaaattctagcccaaaaagcctcagaaaatatttagaagtctctttcttttcattagtgataattttcagaagayggactttgccatctgattttcacattaaaccaggtctctcccagggtctaaattgccatcactaagacatgtcaattagtacaattaaatatttaattataggcagcatggtgtcctggaagagtgaggattttgagatcaagcttttgtggtttctaaacctctcccacagctttttagctacataattttagcaagttcttaacttgtttgaaccctaatttccttatgcatggagagaggataccacaggcacttctgggagccttgtctcatagattaaatagagttggtgaaatttaactgcctagcatccagtaggaattttatacatgctaggttctttctgctgtctcccaacattattaggaaagtggctttcttaaaaataaccaataaggctagatagaacaatagacctatgcaatcatgaactccctctcktttttaagagaactttggatgtgttttaatgtaagattaaaaaatgagtattttttcctatccagttacctaatgtgaattaaatcattcagatgagtcytcaaatgcagaacrtggtaatttcttaagggactgagacaaggaggaacgagatgagattctcactcctcaggaggggagaaatggccacagatcccatcaggccattgcttgtagcggcttgcaggacctcccacataacagaagaaaaggaagctgagagacccagtcttgggaatcctagatccagttacagcattgtctcagctaatccatgatgtgaaaagattgcgttttaaaagaagcatattaaaaaagaaaaaaacaaaacaggagggactcttaaataacaagcccttgattgcctaattagcctgaatgccctcactttcattggaattcactgctttgatggtgtggaggtgcaaagaggccagctatcaaagagagaygccacttatctaaacaaaatccaggaacagaattcgagacccttgtctctcagaygaagattgtttgcccagtataagagatttcatcctcgcttttgatagaattatgattcttgggaaatctttacgtggaaaaaactgcctcagaataaacaccaagtgtttcaaaataactacaggaagtccaagccacagcaaaatttaaatctctatttacaaaatgaaggtattcattcccttattcattcagtcaccaaacacttctttttaaaacatttttctttatgwctcatggattagaccctaggcattagtgaattaatgcaagagcatttatctctttgtaagtttccatttagctgtaatggaaaagaagtgtctaaactagatgcagctaatttgaaattcctgtctcctttttttcttctgattaaaaaaaaaaatgcatttaccagtactgtcagaaaaaaaaaaagaaaaaagaaaaaacacctagaaaagagacgctgaaccttctccactaatcctccttatccctcaggattgccatcactgattggggttggctttgggtatggaaagaacatagaacttggagtcggargacctgattgtatctcagcttaggcacctagcagatgtatgacctaggataagtcattaacctctctggtttttttagatgtgatcggggttggaaggcaggtagcaatatctaccttactgtatcattttgaagactaactaggataacaatgtgaagccttgtcagttggcaagtatcaatggaaacttagccaacataagctcactccttttggatatcccaatgtgtgaaaaggccctttagcacctgagaaatcagaatgcctgggacatacatgtttggtgaacgaatgaaggagagatggtgacagaatttactaagacccagatgtgttcttgttttctaactttatccaggaaaataaacagcaaaagatttagcaaatcttatcatttcttagtgggttataaccatgagctattaattttgacacaaaaaaaaacttacctcctccctttatttcagcttgtgaggatatstcactaattgacttcattaatttgattcaaactgtgcactagaagtgggatagaaacacatgaagtataccggaaagaaattatactcgaaaaaaaaaaaaagagctgaaggcagtgggaagtagacaacgggatccaaactcaacaaaatgcaacctatttgtataaagaactacatggcctttggagtcaaacctgactaaaatcttcgctctatctcttcttacaagcttgtaactttagctaagtcaatcaacttctttgaaactcagtttgctcacgtgtgaaattagaataatacctacctcatgggctattaagagaattgcacaagataacactatctggcacccaataagttcttactgaattttcattttctaagcatataacacaaattgaatgatggacttgggtatctattggtgttcttggaaacgtgtgctatcctgacagagtcagtgctgctaacctgagttattttcactcctcccttctttcagaggccctgccccttctggaaaacctaaccatttccgacattaatccctacgggttcacagtttcctggatggcatcggagaatgcctttgacagctttctagtaacggtggtggattctgggaagctgytggacccccaggaattcacactttcaggaacccagaggaagctggagcttagaggcctcataactggcattggctatgaggttatggtctctggcttcacccaagggcatcaaaccaagcccttgagggctgagattgttacaggtatttcaaatcaagtgagccatttgttcctcttcctggtccccttctgtgtaatctgtctaccggatcgccatgactttaacatctttgttcacattccctacttaatccataaatgtagtctactgtttcaccttctccccacactccctcttgtcatatgtacttaatgaacactccccactcccaccccagaaatgagaaggtcgaaatatttctgctttgtattcaaaatcctttagaccttgtcttgtccatagctcttgtgtgcttacctcatatcatcgtmccttgtgatcaacctggctggtccccagctacatttcagccttctcaaaagaaatataccaatgagtatatttccaaaacgtatttaaaacytttgccatctcaaaatctcaaccatgatcttaacaaacttacccagtgggctcgtcattggaaaaccaaatgtgaacttattttatcggtaatcactaatatcagagagactctgcaacacrgactaaatccataattttctcaagactaatgattcctacagaaattaacaacggaatagtcaaacatctgtgtttcccaaagtctttctagagattactagctccacagaatgttcaaaggtcctactcggtgaggaaattccacgttcaaataagtttggaaagactgagttaaacaaagttaaagaggatctttaactgcacggcttttcagaacaccctaacgtgcatcatctccaagaagtacttatccaggcagtattttccaaacttatttgacaaaggatactttttaaggaagaggatcaaacaggaatagttcactgtgagcacactttgggaaactcagctctaaatctacattgacattgagttttgtctagttaaggcaatgcaagatgaaaccctgggtccacagtatgtagcacaaaaggttccaacctcagttctaccatctgaacatttatctaatagttaataaaataacaagaaagaatgcaaaaaaaaaaaaaaaaagtcaagggtaggagccttctttagtgaaacagcactaagaacaaagcaaaaagaccataacattttaaaagccattttgggcaggctcaaggagaatgtaatcagcagtatcatcatgagcagctctacagatcattaatgctggtttatttgtcttttcaaaaagaaaagaaaaaggtcttgcaggggatgggcactcagccactggaagacagagagcaaatgtaaacaatttactggctttgaacttatttaataatatgtgggacgggccaatgctgagtccagatgtggatttactgaattgcttttagacaaaactcacatatgcaaacatatgcttgacttgtattgaatgtgtctactccatctttcccctctcctgactctactggacttgttaatgttgaatgattttatttttggtatctcaggacacttctatctctgaaagccggggcatcactacatattgatacccctactggagagaagattgcacggactggtaaatgatgttgtytttcctccttctcccaccattttctctccctctagaagcmgaaccggaagttgacaaccttctggtttcagatgccaccccagacggtttccgtctgtcctggacagctgatgaaggggtcttcgacaattttgttctcaaaatcagagataccaaaaagcagtctgagccactggaaataaccctacttgcccccgaacgtaccagggacwtaacaggtctcagagaggctactgaatacgaaattgaactctatggaataagcaaaggaaggcratcccagacagtcagtgctatagcaacaacaggtactgtaaataaacaggagagaacagagaaaagtcatgactcaggggtcttcttctcacagggctgagtaatcacaggagctttggatgcaggcaggctggcgctctgatcctgactctttcaattacagactgtgttaccttggacaatttggctaagtccttatgcaaaaaaagtatgatgccatttacttaataggrttgtgaggattaaatgagataattcatataaagcccatagcggaaggcctggcaggtagcaagggcccagcaaatgagagctattcacgttgccattaatgcatcatcatcgttacaattatcatctttttttttttacgttccaaagattcttccttctatctattatctcatcatatctcatctcatcatatcatatctcatcattttatccagagatacacttccttgttctttggccaaatgttcgagctataccaagtagggagataatggagaagcagcacgtctatctatacacattaatatttataaaatgctacatgtgaataatcagtacggtgatcagcaaggataaaggagagagstggcaagattaacatgctactgtttatgaagctctctaactttgatactcataacaactctgaaaggcacctagagtgtccttggagtttaattacctttttccataggagctgtttcaaggagaaaaaaaaaaaagatggttaataatatgactcttaggcccagagtgatggctcacacctgtaatcccagcatttcaggaggctgagacaggaggatcacttgagtccaggagtttgagaccagcctaggcaacatagtaagaccctacctgtacaaaaaaaaaaaaaaaaaaaaatcaaaaacttagccaggtgtggtgcctcatgcccgtagtaccagctactctgcaggctgaggcaggaagatctcttgagcccaggaggttaaggctgtggtgagctgtgttcgtgccactgcattcccacctggacgacagagcaagactctgtctcaaataatgataataataacagtagtaataatatgactctttgtaataataataatactaagatgaacatgactttttaaagagaaaaggaaaaacctccaacaagtcaagtaaattatttcatgaaactgagggagatgcagagacatagcattcgctggagatggctgcttcaaagggaaccaggggacagaaccacaaaatcaccaggagagataaaagggacctgagagatgatgtagctcaacctcttctgtttgtgcatgaagactctgaggaccagaatggtgaaatgatttttctatgatcatagagctagatttggagtaaagcccaatgaccagcttattctaatactatttaaaatgagcagtctggatgagagaaaaccaatgcatatagctacttgccatctctgacaggcataggcatgacatttgccaaaacctctcctttttgtctaaagatagatattttatattgttaagttttcaggacctaataagtggcaagaaatcacccatgtaaaaataataatcagtatttgtaggcttggagaaaatgctagaatccaggcagcaacctagtaagagggaaaaaycctgtttcttattaacagggacaccctatcctgggatgcaggtctcagtctcctcctccctgtggctgcccataaaacgactccagatcagaggcagagccttgattttgatcttggtttataaacagtgttcttcgaagtttacttcttctgatcattgatttgttttgctgatcttttttttctagaagccctgcagttctaaagcaaaaaagagaatgaataatcatgaattgaattttttttaagaacaacaaaaaaaaaaggcaaggcagaccctgctcttttggaaagccctctctttgattttcttctctagagcctagtagcttatagccaaagagaggtgcccatgcgcgtgcgtgcttgtgtgtgtgtgtgtgtgtgtgtgtgtgtgtgkctacatgcctgtgctccaggaccaggagaagacaggaaagggggctcttgagcacagaagatgcctaatttctatcttcacctcatcaagtttataaatttccccttttgttttttttttttaatcctttctcctctcctctcttcctccctcataccrttgtaaactcttctctgtaatgtcctatccctcttcctcctgagaaggccctgctgtagctcctcctctcactcacaaggtacctctccatagcacaagctgccagccctgggtgcccagggcagtagaaagggcagtgggagacagtgttgcctggtggttaagccaacaaccatgggacagtgtccttggagtttcatcatggctctacctcaattccttcatctggaaaatagaatttaactcaaaggtcagccacgaggtttacataagatcatgaatgtcaagtatttagcagaatttctttacccacagtaaccatattagctattaatgtgtttggccataagatacacctactaaaatgtacctacaccaatgaggttttcagtcaaagcaatagtgcgagtacaccaggttggcagagggaagtcctcagtgcctgagtttatacacctcactgttttttgtttgtttgtttgtttgtttgttttttcccagttagactcatctcgatctttcctaggggacaccttaaagtctagtatggcccatggaggaaagagggacattggaaagaaaataaagagagggcaatcatatttactgaattctcactgcatgccagatgctgtgctgggagtttcacatttgttatctctgctaatcctcaaaacatcccygtgggtgggtaccacttttccctctggacagatggagaaactgaggttcacagaagtgaagrgacctgcccaaggtcacccagcctctcagtggtatttggacaatkaagctctttcaggctccagagacccatgtggtttctgaaactttccatgggcagggcaaaaacccaggcagccacagagtctgggggtggctaccaggccacagaaraaagctgtaggaggagatgtcttagatgagagaaaaatgcagaaagaggaagraaaaaaaacccttgctgaatttctgtgggtttcagcatgtaataatccctgtgggttggagaggggaaaagatgaggaagtgagttccctagagcctgaaaattgtttcctgaattctctgggtaggcatggttagctgaagagggcaaaaatcgcagccaaaaaatacacagagaaaagccaaaggaaactgggttttgaggggaggtattttgggaggcagaaactccccctgggcatggcttttctcacaggtagacccagtgtccactgggtgtttgctttggtgatgagcctgaggttgttctcttggctttggacctccttccagttctaggaatgggtttgcccaggtcagtgtttgtgtgaacgttatttccaggattccaggctgtgcttggctctgctgcctactcctgggacccagaaagatcacatcacaagaatgttcatggaagccttggtttggttctctgtaaaatggctataatcacatctttttgggggcttctacaggaggattaagccttataaattgcaaagaactgtacagttgtcaagtcttagtattatttaataaaaggaactagaaagcaaagatttaagaaaatgttaaaaatcaaaaatgaacgggggtcacattccaatctgggaaaccattctcccacgattccttggaagtcagctatggtcctatcactccccttgaattagaccaaatgacttttctacaaccctgggccctgtacctgaaatgaaacaattggtcctagcaagtcacaacttaaccacagatcaccacattctccatcctaaaggcttggctcagacacaaattctaggcactgagttttcctaaataaggaattcaggaagaaccattgatgaacargacagttaactgtttctgggcttctcttgtgctttcttcttgacagccatgggctccccaaaggaagtcattttctcagacatcactgaaaattcggctactgtcagctggagrgcacccacrgcccaagtggagagcttccgrattacctatgtgcccattacaggaggtaggagactcggaaaggggagagagaggaggagtgttgtgggtttggatggattcatgaaaaagaccctgataattttcatcctctaacatcatgakcaaagaaaatgaattctttatttgtgagaccatctggagagaagagaactcatttgtaaagtgctatgaggttcttagaagaaactttcttgtgaagggtcacttgaacaagaccttttttaaccttgaaattataaaattctatgagaaatagatctctagtattgtttgcacacaatggcaaaagattctaaatatattggcatttctctccctgcgcacactcatctgaaaagctagtcttggatatatgtgaagttttacctttgggtaccaaatctgtctgtctcagcaaatgatggcaagctgtgccttagaaaatttgtgagttctaactcaaagcgcatgggctataatagagaccacaaggaggaagcccagtcaaatctgcctaaagacactctggcaggtagtaagctacctgttgctgaaagtgtataaagagaggatggttaataacctcttcacaggaatgctgttttgtctctataggaagtctgaccagctgatgtgcaagytcttcactagcccccaaattctaagaaatacaatttctgtgtttattaayaaacactgcagcacaaacttgactataatcaactttcttttcttaagtagaatttcctctagtaagggagtctataatcctaagccaagacaatgggtgcaatagatctgacatacattacatagtaagcttcccatattgtttgtggggaaaaataataagataaaatttgcacaacgtgccagctctctactgaacggaaacttgccatttttagtacgttgtgacttcatgtttcccccccccctcctggctttgtttttggcatctgcaccaatagaaaaagcatacaaaaagtaagccttcttcccttatgccagagggtaggagcaaatgagaagtcaagaaagtggtgtttgatgaagatatagtttcatttctaaatcagatacactctttttgggggcaacagtgaataagtgtcagtgaggttcattattcctcatcttgsttttactgtgttccaggtacaccctccatggtaactgtggacggaaccaagactcagaccaggctggtgaaactcatacctggcgtggagtaccttgtcagcatcatcrccatgaagggctttgaggaaagtgaacctgtctcagggtcattcaccacaggtgagttggtggggttgtgtgtgtgtgtgtgtgtgtgttactatttttcagaggtcacttgtgcatcctatgccatttctcaccttcagccttgtagctcatgactcagcagctggaaaaaaaggggggttttatttatgagatcctagtggaaagtgaactggatttagagtgccagaggcctctcttctggcccatcccagcctctggtgagctgggtgaccttaaccttgttgggcctccatttcctggactattgtgaaagaaaaagtccaagtttgggagtcatacttacctgaatttaaatccaaattctaccaactacatgagctatcagtccattttactagggtccactttccttctctgtaaaacagacacaattctgcttccctcacagggtatggtaaggatcacatgaagctgtgtttgtaaagcatcctgaaatacaattgttcatgttagcccaccatcaccttcacctccccgcctattgcctggaacccttgtgagtgtccctcaaagcaggtgtttcacatgagcatgtgatggtgacagctacaaaacagctcctctctatttggtggctcttgcattccaggcactgttactaaacccttcacatttaatccccacagctattatcatccccattttacagaggagacaactgagacaaatgaaataccttggccaagcccacataattagtaaatgctggaaccaaatttgaacataggtcggtctgactccaaactctctatccttctaaaataaagagttcctttcctagtgtaacctgatttgtacagtacactgtaaagaggggaaaataatgaattgcattgaaggagaatgaagtggaaaatttctcttcagacagccatgtctcaaaacaatttatcctttgatatgtgagcaattatccagtccaactcattaagggatacaaagaatagacctcataggaaattttaaaaatatcctcatagcctgaaagagttgacaacacacaattaaaatatcccatctgaacccagagtcccgtccaccctgcctcacaggcccttatttccccaaagaaatctttcatcagtggattctccacggcaacagatggcaaaagctgaacgtagttcctcccaatgccccattgtcatcaccagttaaaggagattctgtccatgcacagtgaagcaggaaggaactcagagtggacaatgtgggctccccagttgccctgccacatcctggctctcagaccagtcatttcatccctcaaggctcaggtgcctctctgtgaaatgagctgaggatagcttccctccaccctcgccagggctgctggcatgggcacaattgagtagtaagtgcaaaagcaagaggaaatggtcagattcatgctggcttctgagaaagtgatgttgggtagtaggagaggtcagttaaaagaggccagggataaatatcctttgaatatccatcctttctcagaacaagtcatttgaaaaccatacttaagacttcaaatacctttaatagagatcttaataacaactgcaagtattgagagctttccctagtacatcttacacatcacacattgcttagctagtctttattaactaaacagtcaccctttggcagctgaagaaagtgaagtttggagaagggaaatgaattttcccagggcacagaggcaccaggcagagaagccatggtagaacccgggaccaccggcctccagagcctggctttatgttctctgcaagccatctaaggagaaataccactcaaagctcagaaaaggctcggggccaggtgcggtgactcacgcctgtaatcccagcactttgggaggccaaggaaggtggatcacctgaggtcaggtgttcaagaccagcctagccaacatggtgaaaaaacccatctctactgaaaatacaaaagttagctgggcttggtggtgcacacctgcaatcccagctacttgggaggctgaggcaggatcattgcttgaacccgggaggcagaggttgcagtgagctgagatcgtgccactgcactccagcatgggcgacagagtgacagtctgtctcaaaaaaaagaaaagaaaaaagcaaagaaaagaaaagagaaaagaaaagaaaaggctcgggcagtcttaactatgcaagtcccctctgtgtaagttctttctctggggaaagtaatataaacaataataattcttgtcatgtgttcagccttgttcagtttacacagctcctttccacccataatataatggaaaaatcaaaataacactgaagatgaaaccagccagaattactatccctattttacacatgaggatatagaggcccaaagtaactgagccagcaagggagggagtcattactcaaagccaggtcaggctggctccaggcttaggtctctgaaccattccatgcagctgacactgtcctaacatcaggactccataagcagtgtggacagcagagcagctagagtctgatgtcccacccaatgacttccctcctgtccaccatctttctttgcagctctggatggcccatctggcctggtgacagccaacatcactgactcagaagccttggccaggtggcagccagccattgccactgtggacagttatgtcatctcctacacaggcgagaaaggtaaggttttgtccaagtctctcctcactctaaggagtgtctttcctgctgtaaactcttcccattcgctcttctccctgccacatttggtacaggatgataaaaatgcatgggtaggttgawaaggccagtaatgttcatgtggctcccaactgaaacctcaagggagtctggtaggtcatttaaaataaaaataaaaatacatctccagcctctacatgttttcctggcccattcctcctctcctgttagtatctctgcctaccagtgtgagacaccccgtttaggaaacagttgtcatcttttacaaagaagaaaaccagaatctaaaatcttaaccagaccgcttcaggccatactgagcagtctcaacttttcagagaccacaaaagaagctagttttagcagatttaattaaaaagtctgaaattttaagccaggtacagtggcttacatctgtaatccagcactttgggaggccaaggcaggtggatcacttgagaccaggagtttgagaccagcctggccaacatggtgaaacctcgtctcttctaaaaatacaaaaattagctgggcatagtggtgcatgcctgtagtcccagctactcggcaggctgaggcaggagagctgcttgaacctgggaggcggaggctgcagtgagccgagatcgcaccactgcactccagcctgggtgagagagggaggctctgtctcaaaaaaataaaaataaaaaataaataaataaataaaacagaaatgttttcttgtttggcaaccatcagtgctaatgtacccagttgacagattaaacacttgtttagagcaccagcaaactacagctgccagaaagtaaaatcaaatataagtaagagactggagaaagagagagtgcttttcaatgaacccctccattttgtaatgagctactctagaaataattgtgtaatttcaatttccaggtataggtaagtttcatattttatggtttggtattgttttgctctcagtgacaatatgagcaggcaccagcgtctgtgcctggagcctctgaaaattttcattcagttatggtaaccaactaagagaggtctttttgaggacagagcacaggtaggggtggggaactgatggggaggagggatgttgggtttattctttttactctttaattcttaaatagtccctgtgagcaaactcttctgagtcaggaaagatggtgttgcacctaaaatgaatcaggtatagttcatgggaaccatggagattgtagattcagggcaaacaaggggcttggttcagaagagggggtggtgctcacaaatgatgaggtaagttgaccaacttgtccccgcttgcctggtactgtctcagttttagcaccagaagttccacacctaggaaatcccgcagtccctggcaaaccaggrtggttggtcacctgtgaataggaaataaacacatgcccccaagcaatgtgatcagtattgctttccaccactggacatgacccagcaggcctgagagatagtggccaggctctggtgcagctactgctgtccagtttttgtgacccctcagcctaatgacttgatgacacttagtaaattataaaagggcatgtgaaaaagtgacaaagagaggagagcatgcatcaggacaaattaagcatgggcagcaggcttggggatgtcccctccgaccrtcctctacctcggtctcagtggcaaagcgattccagccagtaccatgtgggaaaaaaatctcctgacccccagttccccttccttctgatttggggcctggaaaaattaagtctccatatgagaaatcctttacgtatgaggtgagtgctcaagagagagaaagagagcgtgagtcatttcagaaatcagacctgcttttccgcagggtcactgaaagtttcgatgttcgaaggaggtgtgtatgtggtttgccaagcccactcatggctcagacagtgagaggtgactgccttggtatgtgtatttcatgtttagtgccagaaattacacgcacggtgtccgggaacacagtggagtatgctctgaccgacctcgagcctgccacggaatacacactgagaatctttgcagagaaagggccccagaagagctcaaccatcactgccaagttcacaacaggtacaaagacactgagagctggaagctctcccttctggggtgcccacccacagcctgcatcttaaacaggaaccgctagccagttcttctttcttaagtcagggccttgcaatgtgattacatcagcatcacttaaattcaccagtgcccactcagtcaaggcctgaagaaacacactatttccttttgaactgaaatgaccttggtctccccacggggaaggaaaagattttaagaggagggctttgtaagtggaaaaacagttcccactggccctaaacctagtatttaatgatccacgttccaggcaggaaaatatttttgaagaggcatattttttaggcaatttttcctagatgtttgttaggtttctatacattgagagctttttacaaactatagcaagcagggaaacagaggaaccatcctctctgtcagggtgagtattgatattagcattcatccatcctcttacttagaaacaaggggcttgataatgatgttcacagctgtatacttctctctaaatccaaccaaggccagttagaaacatccagcccttaggatgagataaaccatagagaatttgtctttggagatcatctggctcaaccaccttatttatacagaggaagttcttgccaaaggtcacgtagttcagtggtagggaaaggacttgaacccagtcttcttgatacccagcccgaatwtctgccctacatttgctgatcttatccgatattaatcatcctgtcttctccagacctcgattctccaagrgacttgactgctactgaggttcagtcggaaactgccctccttacctggcgacccccccgggcatcagtcacmggttacctgctggtctatgaatcagtggatggcacagtcaaggtattttaagtatataacaactcctcaatgctagttgaagcatttgcatgatcttcaaagtatggaagaattacctgatgctgtttttytaccccagtgcatctggggagctgaaaaaaaaaaattagtagagactggatggcatgccagaccttctgaatcatactctccagcctctttcattttaaccagactccagttctgataggcagccaagatcaagaaccactgcttacaagacttgaggacattttaggagctggaatcttgatcctttaatattttgttgaacaaaggccaaaaggtttctctgcatgtttgccatatgtattatctcacagatggtatctttatattatatattgtaatatgtttcaccgtgttcttatgatatcaactgttaataccatttttatccagtgtttatattatttatattcgctacccaagaattttctttcttttaccttttaatttgaaataactttagatcttcaracaagcgaaggagatttcctaaactttaccttccaaacttgttattgaatttttcattttggttatctcactttatatttccaagatcttttgcttgttctccacacattgatctttttctggcattttgtttgtgcttcctatatcatcatctctttatctctaagaatatgttgctggtattttattctatatcctgcacagtgtttgttacaagtttctttgttttgctgctgttgttgagtttggtttggtttgggtttctgtctttcatgttggagacatccacccaatgtctgttgatcatggtctgtctttttgtatttgaactaggaatgaaagagctaatagggagttagctcaggcagggcttgtcaactttgtggctccctgcagaatgattgggcaagtacccacagttttcttgggggacccccaaataacagtgccataaaacctggcctctcactgtgtacaaactttcatcttattatgtttccagtgtagcacctcggcctccttgaaggctgagcctggtggatttgaatccggacttcctctctggctcaacctttccagagagtaaacctcagcctaccatctgaatgggaaagggcagtcatttagactgttggagggaatgaggagatcttagagtctgtttcttacaaaaaagcttctaaacaaaccaaacctttgttcaaccacactccacattggcctttaaagacatctctgcttttgtacacattcctttactgaacttgctggactctgtgacttgcaccaagcagcctctgactagctctgcccatgctccttagttaacctcagccttcttcattcattcccctccatggtctctctaccactcactttctatctaccaagtttctggcacacctgttgctgtctcctctcccattcccctcatcttcatggatttataccttacattctcttgctctctttttagtgggttttagaagcaagtagagatgagtggctgtatccaatctgtcatatttaaccagaactggacacattgctaataactatcatgccccttcctggaattgatataacaatgaactatctcactgtgtgagctgaagcaaatcctttatcttctctgggtgtcagtgttcccatctgtaaaatgaatgccttggacttatccatctttaaggtcttctccttgtcaggcattctaggattctgtgtttacctgaatcatgagtctcattttgatctagagtaccctaattgcctagaaaatggctttgcacagaagcctagagaactgacaggtaattgtattcctaagtaattcaatgaacccagctttatccctgacagttgatctttcccccagggactagaactggggggctgcaaaaaggcctctgggtattaaatgagcactcatcccagtttacttttctgcatgtccattcaccagctttacatgtcttagaaaaaaaatcaacctggtataggagaaaagagtcctggacagggtgttgggaaacccgcatgcaagatcatcctctgcctccaacaatttatggaatgagagcaagtcttttagcttctctgaaactcaattctcccattgaagaaaacaggataaggtaccttcccagttcccaggatgcaggagaaccttccaggggcttctgcactgatgcatgactkcccaaactaagctggctgtttgcaggttgtagagaagatcgttgtgcttggtttactaggagtgtaggttgaattccaatcccagacactaaggtcatttgctgaaaagaattggaagctagcaagagggtgtggaaagaggatttcctgcaaactgaaaccaatgacctcctctgtacagcagcacagagaccagccacagactacaagtgtagttagagttggtcaacatctgtctgtcatggatatctctgttctagaagagagacatgtgaggtcagcttaagttttaatcctaccatgcctatggggctattataatcatctcctaactcaagagatccccaaactgactgcacattcaaatcacttgggaagtttcttaaatatagccaggcccaacttctggctctgatgattccatcagtctgagatgaggcccaggcatcatattgttttaaagcttctgagagtgataaagagctatatttagggaccactgacctaactgacctcaaagtcccttaccctgtgtgattcatcttgctaccagattaagcttcttaaagcacagcttggtttatgtcattggcatgtccaaacatctttcaaggctccccatttcttgtgatgataaacttcaagttccaaagcttagcatttataccttacagggctcctcactccgtttaatgataaactttaagtttcaaagcttgtcatttaaaggcccttcataatctagtaacattttccactgttctaacacctgaagctaagtatggttgaggtcgcttattgcctccttatattatttcattttatgttttaaatctgctttattcaaagtttactgatttaaatattaatctcatccaaaaaaaaacccccttcacagaaacatagaataatatttgaccaaatatctgggccccatggctcagccaatttaacacataaaattaaccattacaatcccattctcccaatatagtttggcagggccttgggcaggtggtagccttagccctggagtctacagcagtgctctcatccttaccagatgcggtctctccctccttatattattttaacttgctctgcaccttctggcccaaggacctttgcttgtgytgtactctccccatctctgatatctcagcagtgcacatggagcctggtagagagtgggtactcaatgaattcttgtccagtaagtaagtgaatggatgggtaaatgaacttataaatagaatgacttcttatctataccctgagaatttctgtgaccaaaagccattatactttttcttctgctcttaggaagtcattgtgggtccagataccacctcctacagcctggcagacctgagcccatccacccactacacagccaagatccaggcactcaatgggcccctgaggagcaatatgatccagaccatcttcaccacaagtaaggaggcccagggtgccatccagccttgagatctaactttgactgaatcaacccttgacttcccctttgacttctactttaaaattttcaaacaaacctctgaaaagaatcgattcactgctactacttggaagcctgaggaaagcaaatgtgggagattatgagcatcccggtgaaaggaaaggaggaagcccatctggattcagtccccatttctatcacctgctaggtgtgccttaagaatgctacttccatcctataatctttagcttcttcgtctatacagggagattaataataaatcctctgtcaccaggaccttgcaagtgttcatgaggtattgcatttgaactcctagcccagtatgtggcccatataattgtgtggtccttttattgtcagagttcaacatgagctgaaagtctctttctttctccttcatcatgccagtgtttacaaaacctgtccacattcaaaatcacaaatgatcttcccaccaagctggtatggtgagccctatgcccaaagttctagtggggaagcagacactttcagagactaaatgacctgttcaagactatcttgtgagttacagtcagagttgggctcagatattccatgcccagggagcctccccctgcacctgtcacaaagtatcttctgcagatagcaaacctgcaagttgttccattgataagtaagagtggcatccattcctgaggaccagaggagctggcctttggagagccctgcctttgaaaattcacgggacagtcattctgcacacatctgctgaagaaagtgcttcccctttgccagatcttatgccagatgctaactatgaatgtatcctaaagatgctcttakactagggctgtgaaataaataagaaaacagctcatgatacaacctcagatgaatgtcctcagatcagaaaaaagaactgctatgawcatcagctctaagacccatctactaggcatagttccaagattgcccatttctatgagtttttaattgtttgcatcacattattgcacctggaaattccccaggcattctagtccatagagttaagctaagaattaagctccagctcagtcctcctgcactgagagcatcaccatttctccttattccacagttggactcctgtaccccttccccaaggactgctcccaagcaatgctgaatggagacacgacctctggcctctacaccatttatctraatggtgataaggctsaggcgctggaagtcttctgtgacatgacctctgatgggggtggatggattgtgagtaccaccagggactgcagagccctcaggcctaggggaagagggagagggcaaagcaggggaggagaagagggtgatctcctcctratgcactctgacacccmcatgtgtgaggccttgcaagatagtgcctgtcacacagaggcactcaggaattctctcttaaacaaaagaatgggaaacacgctggctactttttgaaacggggagataagtttcttgtagtttatctcatccaatcctcatcaaacaactstgtgatgtataaatgacagttgatcattgaacccattgcttacattaattagcactgactaagcatttattatctaccaggcactgtgctaagagtttaagatgaattattccgaccccattaccataggagctgggtagtgtatttttgaattaataaactctatttttttagaacagttttaggttcatggcacaattaagtgaacagaagttttcatatacaccccacacccacccacacaacctccccattatcaatatcctgcaccagaatggtgcatttgttacaatcaatgaacctacattgacacatcattatcacccaaaactgggtggtatttttaatccctgtttttcaggtgagaacaccaagacttaaggaggggcaggtgaccacccaaagttacatagcaaattagggatggacagaatggagcctgatgctctctccacagtgccacactccttcctctcacaacgatgccctctttcctgcaatagcttaagtacacccagattcatcgatatgtttataggtgttcctgagacgcaaaaacggacgygagaacttctaccaaaactggaaggcatatgctgctggatttggggaccgcagagaagaattctggcttggtaatgcagccctgcatgtttrtatctaaaatgcctgattctgccctccttgtcacttttcctaacccacagggacctatgggagagaaagagatgaggaagaagaactacttctggtggcagacacagaatgtcaaattcttaatgaaaaagactatcatttaaatgctctgaatcatcaaaatgtaaaccaaaaagtatctgagacagatctcaatcaatttagaggtttacttagccaacgttaaggacacgcccagaaaaaaagaacacaaagccacaggaacagcctgtggtccatgccttttttttttttttttttttccagagataatattaagagttttagtgtttaaagggggaaagccacaggaacaacctgtggtccatgactttctttttttttttttttttttttttttttttcagagataatgttgagagctttagtatttaaaggggaaaagtgggctggagggatatggtcacattactgaatccacatgttgcaagataaaaaaaagaaaaaagcagaatgacaaaaaagagaatggtcaattttgtattcatctcacactcagtaaatcggcactttacataagataaagtgaagatagaataactatctgtggagatatctggccttttatctgtagcatctgcttagggacaaaaggagaggcagtttctcccatgactcggctktcagtttattttttttcctattggcagagttaaattggggtcccaagattttattttcctttcacaaaaagtaaaatctgattaaggaagaaccaaaactcagcccttatgtgttaacctagccttaagtcattctctggaccagtcatagaatcctcctcactgatatcattgatatcttccctcctgtgccccaggttgtgctccaggtgctaagatgggtttcttagagccataatatttaacccccatagcacccctacaaagtactcaattgccaccgggtgggcaaggtgtcaggtgtcagaagtggttgactagtgggttggtaagacgaatttactaacaacagtataggtttgaaaaaggaacgtttattagaaagaaagaatgctgcaaaaggacttacagcccctgcagtggatttttccttaggggtatttatggaccttaaggcaggagcttaaggataatttggaccctattagccatgtagaacatgatacrtgattacatttgtagacattttggtgccttaatgtcagcaagggttgcaaaatgagttttgatatgcatgtattccagagatgtatagaagttccagttacctataaatttttgggaaataaacctggaaccagatgcttgcttgagatatacggaagcctaattacctttaaatccctcagttaaggggtttttgtctccgagtcctacttgatggtcaccaggtgatttttgctctcctcaccacctcgcatggataaaatcacagcctcaaaaagactgagtggtttgcccataggagtctaaccaatgaacagttgagctgaaatttggaatctcctaagtcaacactacaatcctatcacccatccattcatccatgcaatccacactttccaaccacctaactgcagagaacattgttctatgcaccactgcctaccccagaaaatgtttatcatattataataaacatttatctatattattcattgcccttcatttgtaaggcactttacaaaattttatttgtttgtttgtttgtttgtttagacagagtttcactctgtcgccgaggctggaatgcagtggtgtgatctcagctcactgcaacctctgcctcctgggttcaagcaattcgcctgcctcagccccccaggtagcygagattacaggcaccctccaccatgccctcctaatttttgtatattcagtagagacagggtttcaccatgttggccaggctggtctcgaactcctgacctcagatgatccgcccaccttggcctcccaaagtgtggggattatgggcgtgagccvccgtgcctggcctgtaaggcactttagagtttaaaaagtactttcaccaccttatctccttggatcttcactaatgcactgggaggttggaagtggggcaaaaatgtcaacccgattttacctgagcctagtattactccagcaagcacaagactgagcttcaagcacaggcctgtgtgatatggcccttttttttttttctttttgctttctgagatggagtcttgctctgtcacccaggctggaatgcagtggcacaatctcagctctctgcaacttctgcctctcgggttcaagcgattctcctgcctcagcctcccaagtagctgggactacaggcacccaccaccacacccagctaatttttgtatttttagtagagacagggtttcgccatgttggccaggctgataacgaactcctgacctcaagtgattcccaccacccccacccccaccccctcccaccccatctctgcctcccaaagtgctgagattacaggcatgagccactgggcccagttggccctgtcttaagtgtacccagttgccgcttttacagagtgaaatagaaatgagggcctcagtcacctgtgcttcttagcaacccttgcctgtcatccacagggctggacaacctgaacaaaatcacagcccaggggcagtacgagctccgggtggacctgcgggaccatggggagacagcctttgctgtctatgacaagttcagcgtgggagatgccaagactcgctacaagctgaaggtggaggggtacagtgggacagcaggtacagtagtggctgcacgtagagcctacaaagccatggagaccttcttgacatttacagtttatttctctaactttcattccttcctcattaatccagcaatttattaaatcaacaaatatttaagtacctactgagtgccaatccagaaaaactayaattcaaaagtgttgggtagatatttgggtcctgaaacattgagtatgttgggaatcagggcaatcaggattgatttctaatgaccatctttcaaaaaaagtgtgtctttcttacccagttttagatatcagttgtagactgattaaaaaaaaaattccccaaaggccttaatattcatccaatccagcacttctcaatttactctgggtgtatggacccactggcgatcttgtgaatctccagatgctgacacaggttgtctgggatggggctgagattctgcatcttctccaagttccctggtgatgccaatatagctggtgttgctggtctgtggaccacagcttgagtagcaaaccatccactccatcacctagctgcttgaatctcttccaagacatccctgccatgtggtcatctagtctcagcctgcatcctcataaatagaaggtctcacctctcaagtggcccctgcattccttgtctggctcataaccttcattccagtcttgaagatttcttggacttgaagtggttttgtgtggtttcctggctccacataagaggagaaataaataaggaaacaacatgtattaaggccctactaggtaccatcctcttttgtagatattccacctgcattcatcttatttattcctcataaaaccattttatgaagacgttgtttttatacagaggaggaaagaagttcagaagagctcagtgatttgtccaaggtaaaacagcttgtagaaggtggatgcaatcctggctgcagaaaactgcatccgacaatgttctcrgtgacaaagaagggtcaggacygagagtgtggaccacccccatgcaacccatgcccactttgggtggctttctgttatgtttgtgagagcagaagagatagaagcttggcacgtttccagcctccctgagccctgaaagaaaacatccataaggtgaaaagtctccagataaaaggttgccaaagccaggctgagcctaaggaggcacaaagctcttttgagatggcagtttagtgataataaagagagacacccaggggcaaacattgctttagttcttgaatccctcaaagaatgttggcattttattacctggaaatgaatacctctttggttgagatggcttcaggcaagaagaagaatgttacagggcaagcaaattcattaagcagcaggaatgtggcctctgttcctctctctttgtgcttccattgaggaatgagccataatatttccctttactgagataacgtttgtaaggctgcattttcttgtgtgatttggctgcacccaggccttctgcaggagagcatcctgtttcattaatatctacgtgccgtcctcatgctctgggtagcatcatcagttaaaaaggtatctgggttcctttgacaacttgctccaaattatgacggtagaatgcctcagagtcttgaaatgtttgtgcacagcacttgkctggattgggagtgaggagacccacaaagcaatggtactgaaatgcttcaaaaattcaatatattaaattacaaattagatttccaaatagtagtacatgttaatgggcttcttgtctaagaatcacggaacatggtctgatgaatactttaaaaagtaactatgtgatacagagactatttagggacatctaatgtctgaagggcttaattatgactaataaatatttgtatgtgggagaaaagcatgccattattaaatgcatacttctcaccttactctctgaggtctttatagaaagggaatgcagaaaagtcataaaaataacaatcatagtaagtatttgtatgccatgccacctgtttagcatacacctttattgtcacaatggcactactcagtatatagaatcaaagtgctggttccattgtatagatgagaaaactgaggttcaacaagatgcttgacttgtgcaaggtcacagctaaaaagtgaaaagatgggattcgaagctagactctccaaagccagccacagccctcttcccaccacattatgctgcttctgtcggaaataagtactggggtgacactcatgtcccattcagttccgcattcaatgctgactctgggatcaatgttcaaggccagtcccacacccagaayctttcaattgtcacctctggttctgccctttactgtccaggagggaaatttcagctgagatttctcaggtccatattttctgtctctcccaggtgactccatggcctaccacaatggcagatccttctccacctttgacaaggacacagattcagccatcaccaactgtgctctgtcctacaaaggggctttctggtacaggaactgtcaccgtgtcaacctgatggggagatatggggacaataaccacagtcaggtgagtggaccgtgagggcccagagcaggccaagcttgggaagctggagggggctaatggaagtacaatttaactccctatcctagcagagactaggaggcaggaaccttacttgtatgacaacatgtttttcccraggcagtgagcaatctcaaggacactgcaggccaggtaaaatagaaacagcacaggttaacccttgacagtcccaaggacaaacactggtcaaatggattccaaaaacagaacgctttactcagacaaaatctctgtctgaaccccaaaagtaaagcagataaaagtggaggccatttaggtgaagcagggttgatgacacagaacccctggcctggggcatctttggaatcccaagaacaccttaaaatgaagtccacagactttaaatctcctccttttgtgaagaaaccaaggcccagaaaaagctgactttcctgaggtcacagagtgaagttggcagcagagccagctctccccacttccagcccctggcattttccctgcaccacacacacctctagcacttctacaatcacagaaacagatttttttcgatcccttttagaaataggcgaacggatcaaattcagtaatctcccttactctgagccttgcctacactggcacattcctgaaaagtgtaaagctgtgtgggactagccacttaatcataaccaaacccctgcccaggtccctccacagaagttagtcaccatccctgggaggagggctggatcttcccttggggccacaccacgctgatccctggaccacaaggatgcttatgaggtctgctcactggaatcccaargactttataaaaatgcaaagggccaaattccactttatgataaccccagggattctgattcaatgatctcaggcaagacacagcatctcatttttttttttttttttgcatatttgcatttttgttgttgtggggtcaggggggaggcagttgatagactccacaagcgattcctgacatgcagcaggtgttgggacctgttgcttttcaatattagtcactttgatacacatgtttatgccctaattaactgctagcaaatgacacctgcgaccttaagtgtagaccttaccttacataatttctggcacttttcaaagcactgttaccttctgtatctcaagggtttatcatttttaccctgtgcaggaattaagatgtggtttttcatgcctgttttacagaggaggcaagagtcacaggacatttcttgacagcagtcctgtgttgtttccatcttattgtgttatttcatcaatatttccattctgagcattattttatcatctttattgccttgtctcaaaaatactcgtataatacaaagttcttctgggaaaagaaaaaaaaaaccaacaagctacatgttagaaagcaagcctctctttcatccttccattcaattatggaagaagaaagagatgacatggaaaggagccacaggaggggagccccagctccagctctgctcctcctgctgtgtggcctctgcaaagtcactctccctctctggctttagtgcccaccacagtacaagaaggcgtggcttccaaccctgaactatcagaggaaagaaccagggcaaaggcaggcagcatgtgcaccaagctgttggactaccatactcactgtaactgagtaattacaagcggatttgcccatgaaatgaatgagccattcttaaacctcacatccctgtaagactcagaaactgcccatgtcagtgaatgccaaacaattagaagcaaataaagtgtctctatttttttcccatctcactagccattracttccccacagtggggcaaggggccatgtggggtttcatggattgactctaccatctgcagacttcgctgaagagtcaaagttgaaacctggaagccaagacacagatacagttttttcttgtagaaagctttggccaaaatttcaaggatatttccccctacttgagactagggaagtaatatttaccaagcacctacgacgtgcccagctctgtgatagctcctttacaaactcatttaatcttcatctcatctttcaaggctaacattatcagatcttaagaaagaaaaaaaaatagtaaaaccgaggctcagaagatattgagaacttaagactatttatctctcaagtaagaacactgatatttaaccctatatgtcaaattgtaaaactgtgttttgttgagctgttcgttctgctattccatamcaaacccctatcaaaatactccataggaatctcgtgaattacagacacacacacacacaccatgtatgtagctattcaattctagaacttctaataatgacctgaactccttcagaacctattcctaaggacggcagatttcatcagccaccattttgcctcaagaggaaagaccaaagctccatgcaaactcaggcgactcttgactcaggtgaaaaactgggtcagattcagccagttcctttgaaagtttccacaacccagaccaayagagagataggcaagaggcagctgtgatataccaaatggtcaaattgaaacagaactcatttagtttgaatgactaaatagcaatgatcagtgaacacctcgcctaacagtaaccaacctggaggccttctctctctctctctctctctctttttttttttaacagggcgttaactggttccactggaagggccacgaacactcaatccagtttgctgagatgaagctgagaccaagcaacttcagaaatcttgaaggcaggcgcaaacgggcataaattssagggaccactgggtgagagaggaataaggcccagagcgaggaaaggattttaccaaagcatcaatacaaccagcccaaccatcggtccacacctgggcatttggtgagartcaaagctgaccatggatccctggggccaacggcaacagcatgggcctcacctcctctgtgatttctttctttgcaccaaagacatcagtctccaacatgtttctgttttgttgtttgattcagcaaaaatctcccagtgacaacatcgcaatagttttttacttctcttaggtggctctgggaatgggagaggggtaggatgtacaggggtagtttgttttagaaccagccgtattttacatgaagctgtataattaattgtcattatttttgttagcaaagattaaatgtgtcattggaagccatccctttttttacatttcatacaacagaaaccagaaaagcaatactgtttccattttaaggatatgattaatattattaatataataatgatgatgatgatgatgaaaactaaggatttttcaagagatctttctttccaaaacatttctggacagtacctgattgtattttttttttaaataaaagcacaagtacttttgagtttgttattttgctttgaattgttgagtctgaatttcaccaaagccaatcatttgaacaaagcggggaatgttgggataggaaaggtaagtagggatagtggtcaagtgggaggggtggaaaggagactaaagactgggagagagggaagcactttttttaaataaagttgaacacacttgggaaaagcttacaggccaggcctgtaatcccaacactttgggaggccaaggtgggaggatagcttaaccccaggagtttgagaccagcctgagcaacatagtgagaacttgtctctacagaaaaaaaaaaaaaaaaaaatttaattaggcaagcgtggtagtgcgcacctgtcgtcccagctactcaggaggctgaggtaggaaaatcactggagcccaggagttagaggttacagtgagctatgatcacactactgcactccagcctgggcaacagagggagaccctgtctctaaataaaaaaagaaaagaaaaaaaaagcttacaacttgagattcagcatcttgctcagtatttccaagactaatagattatggtttaaaagatgcttttatactcattttctaatgcaactcctagaaactctatgatatagttgaggtaagtattgttaccacacatgggctaagatccccagaggcagactgcctgagttcaattcttggctccaccattcccaagttccctaacctctctatgcctcagtttcctcttctgtaaagtagggacactcatacttctcatttcagaacatttttgtgaagaataaattatgttatccatttgaggcccttagaatggtacccggtgtatattaagtgctagtacatgttagctatcatcattatcactttatatgagatggactggggttcatagaaacccaatgacttgattgtggctactactcaataaataatagaatttggatttaaacccaggtcttctggctccaatgttcctgctctttcccggtcccttaatgaaaatctctccttctttggggaaatgtgtgctgtggcaagagagtgaaggttgcagaatgggatatgggggcagttcaactggatgcttcctcaggcttctacaatcctgaactctgaaaactaggaagaatgtctattaggaatatcgccttctcctctacactgcagtccccaaaaagggagcaagcccatattcctccagcctcagactgaacacatctagtgatggggaacccattgcctggatggcaggtctgttagtcctcagcaaatatagtgagtcagaactgctcaacgcataacatttctctttttaaacaagggtatatggggggagagtaattcccagttcattctcttagggattttcagaaaattgacttatttaataaaataagtcaagtttgggctgataggcctcattcaaatggaatgtgatggctctggagcaaggatcagaggaatttatggttccagccatatcctttgttgctgagtttatcttgctttaataaatgctgtcatgttagatacacaatgtgctgttccagatcataagaacggttgcatgcaattcagccatagcaacgctctcctggctatataaatccaaacaaacgggctccctgtagcaaccaggcctcgagttggaggcttacctctccactggctgctgacttgtgagtctctaaacccaagtcctatctcctctccagaactgtagatgtacttaattaagcttgaaggtattccccacaagccacacaagaatcaaatttggattggtgaagaagccacatcaaacaggagtcagtaataacccaaatggggacagggcaggcaaccgggtctgaggccatggcattcaaagaccacagtctctagtgtgagctaatcatttctcaaacgtgtccttcagcctctggctctgtggcttgtttcaggaaacctcttccatcttgaaagttctcttaaaattccacttcaccctcaagacctgggccctacccctgcccccatgaaacagtcaaaatatctctattgggaagtaatttccagggtgttcgaccttccctttgttccttctctcatctgctccccttctccctgctctgtgtacttcaaggccaccctattttcattgcatcaatgactcccagcttccaggtggatgtcaaaatgggaaaagccagcaggacattgaagggaagagactatgagtgggggtgggtcagggcacttgttgcccagctccatctatacagcatcacagtgggctgtcagcatccacataagagagccgtagccactgtcaactgactgtctccatgcaactctctcttcaggtttagaaaagtgctctctcacttgccccttctagcctaggagcagtcatggcaccctagctgctgctagacttggggacctgtgctaggctctgtggctctcctccaccccctctcctttaactctcctcagggaccccggcaggctcgcccacccctgggagcactgagtgccactgttacagctgcctgctggccttatccattatgatttctacttcctgcccctcttcctatagtgattattggtcatttaatggcttcccagcatccaaagtcctttccagttttaggaaatttgagaaccttgcctcctaccaaggaagccacagaggaaaatactctttcctcctccccttgatagccagggcatgggcacgtaacttgggctttgccaattagatgcccacagagggacttctaacctttagcaatgaatgcaaaacatagagtgtaggagactggctcccccacagaatctagcactgaggccatctatccgtgggatctgtggcccagcaccacgcagggtatagccatatctctctctaatggtgacagttgtttccagcagtgacaaaggcagactggctgatgattcctgctacctggcctcctttggttcctgataattttctgtgcctgcttcttcaaactttctgtcagttttatgagcttcctgatatccttccagaaaattccttttctgcttaggtagtcctagattatttcaggtccttgaagccagataccttggctaatactttcctccctaaaccatgagcctgtgacatttattgaccctcttgtagtcccagcactgtgtttgacactttaaatatccaaagtatcctaagcatcatagtcacctgtgagacaaatcgaactattccatgtcatgtagaaaactaggcctcagaggggtcaggtggcttctcgcagccatgccactggggtcagaccaagattcacagccaggctgcctgattccaaaatccaagttcttttcagtgaagatatcttattcctttcaacaagccacactaactggaaaacagaacttcattcttttcacaaatgcttgtggagcacctcccgtgtggatttgtcagtgaaaaaaagaggaaaatatccctgtggtcatagcgtttatattctaacaaaacacaatgaatgatgaatgtaataaatgatcaaattaaatggtatattcaagggtaataaggacaaaggggactagggtaaggggatagggtcacagtattcaaagtagggtggtcacacagggtgggcctgtgagaaaccctcaggaggcacagaagatgagctcaatgaatatttgttgcattgaattcgtgctcatctctttccttctgaagatggggaagcagcagtccagaggaggctggggatcatcccaggcaccacagcaaccaggcaggagattctgatgaaaatccaggctgcatactcctctgcagtgtggcatgactgtctgttctccagaaggagagacacaccttgcaggttcttcctcactgagcctcctatgacctgtatgctctcaaaacagctggctacacagcccagtccttccccattctcagcttgccccacccaagctggtcttcccaccatgccttgcctaagcccggaaaatccgagagctccttgtgggctgtcctcgtcggtctccttctaagattctcacttctcttttcatttaaaaatcagtgttgagcacctccccgcttatgctcagcactatgtgagtgaaacaaccacattccctgcctccatgcagcctctgtgccccagagaggtcagtgacaaacacatgatcagacaagcaaatgtgtgattacaaactgagggctgtgctttggaagcaaatataaaaagctatgaagacgtctaaaggggatctgagggggaaggctctctgaggaacagacatttgaacccagatccaaagagcaagtaggagttaaccaggtgaaggaagcaggagaggcagaaggcaaaaggcaggtatctctatagtcctatggctgtcacgctgtgcacagagaaagccagaggcataggtgcaaaagatgcattgtggaagatgaggtttcaggagtcagtaggaacccagccacgcagatcttcctggtccagaataaaaattttgctttttttcttcagttcaatggaaagcaactgagaagttttcagcaggagagcattgtgatcacatctgtttttttaagccatcttttttgttgcatttggattttggctgggaggtgcaaagtgggaagagacctttgaggaggctactgtaggaatccaggtgaaaggtgatagagcctggctaagtgtggtgtcgtggagacagagctatggttctaagagatatttagaaagtaaaattcatggggcttagggtcccagagagctctctatgtccccacccttgttcctgagcagccctcaactcctatagtggatttttcctggatgtgggcatcagttttaattaaggcaggctagttagggatatgggagactggattcaggggcccattaactcctggagcactaggttagggtggggaaggaatcaggaagcctccctcaaggtgactgcagctagaaatgaagaccagtggtaaggccaaggggaggcttgtggatggacacaagggatgacagtgtggggagcagaggtgaggatggaggtagacccttgccttgaaggcttggcgtcctggagcccagctgagagttgccaagggttttcagccccagatggcatcatcaacattgctctttagaaagcctgcttcctcactagagatgcatgtgcccctggccacctgtgccccccagcctcaatggggtaccaggggtgccctgcatgtgcctgctgcccaggtttgggctggcaggacatataagcaaccagcagagggctcactcccctcatcctcctccctccctagggaactcccagaggaattacaatctctgtaaaggaagtagaaaaaggctttcttgagaattgtttcaatcccaccaggatgtaacatggatttcaacattttacaggaaaataaaaccacacacatgcagtcaaaataagcagctccgactgggcgcagtacctcacgcctgtaatcccagcactttgggaggctggggtgggcggatcatttgaggtcaggagttcgagaccagtctggccaacatggtgaaaccccatctctactaaaaatacaaaaattagctgggcatggtggcgcatgcctgtaatcccagctactcaggagggtgaggcaggagaatcgcttgaacccaagaggcagaggttgcagtgagccgagatagcaccactgcactccaacctgggcaacagaacgagactctgtcaagaaaaaaaaaaaaaaaaaacagctcccacatttgcctagcacatttgcccagcacatttgcaattacaggttaagaaattgtttctcagagtagtgaaatgacttcccccaagttcactcagcctccaagtgtcaaagctgggttctctgactccttgagtcacaatgccttaaggaacatccttctgcacaattattctttcattcactcttccaattaggacacttggagcacctgccatttactggttccctcataacactttacagtttgcaaagccaacgtgtttataacaatttctttacagtcaccatctttttagtgagagctgagctcaaatcccatgttttccaattactggatcatcttggtctaattgcttaattcttctgagcatccatcaaaatgatcatgaagtgtacctaccctgatgagaatctgtgatagtttaaaagagaaaaccgacagcatcttgcctggagaaaatgctgtcaacacaggtttgtctcactaaaaattgaaaggcaaa

SEQ ID NO: 6869 - DNA, 142201 bp, Homo sapiens
  misc_feature (1)...(142201): n = A,T,C or G, or insertion/deletion polymorphism (see Tables 1-2)
gcttatcttcttatgttcacctctgatgctgagctcttgtttctaagttctggttataactcatcacagcatcccatgtgtgcaaactttgttctgttctattgaccaagacgttgtattaatgtctcagttgatatccacaaaagtccatttttataaagcattcgtgtgtcgggcaaacttgagtgaaggctgttgtggttgctgggggaagggtcattgcaggagggctttccatttgctggaatgcaaacagctgcaaaccaagcattagacttaggattttgcaaatgttctgggggcacccccatgctggaaatatttcactggctgcttcatcacacagaacttctggcctcacactatcttgatggtgcttatcagctcttgccactctgcctttagctgggtttcccaaaatgcagagcctgaggcaaagacttctgtgccaatttatgaagttcagttccaggaaagagggagggggaaaagaagcagggaagaagtaagagcaaataacaggtcttatatatagatgagtcctcagtcttgtgggacgtttttttgagaagctgctgctcagggtggctgatgtgtgatagggagggagaaatagtcatccactggtttccatctctcattgttcagaagctggccacatattatttccttcgcatttccaagttgcttatgtgtgggcactaaatgaaccctacagcatctcatgtctcaggattaatatagaagtccctaagtatgaggtgagagttatacactttgtgcaaaaatgaaggcactgccagttttacccgtaattgattggagtccctggtgagttgatctctgcagcaatggctgtggctggaatgaatgaccacttggaggcaggaaattcagagaatttgaaatggtgcattagagatgtgtggcgtagtttactccctgcactgcttaggtttgccttcccaatagatctagctcctatgctatcatataggaccttcaattttgaaagaatatgatgttctcacttattttctttgtgtgtgtgtggtggggaggagttgggggcagggtcttgccatgttgcccaggctggttttgaactcctgggctcaagtgatcccatcttggcctcctatcacttattttctaagaagaggggtacgagtccagtcagtcacagaatccctttcaagatcataaccaactgagatctctgagaagattttagccaggagagtgaaacaagccaaagtcccctcagctgtagctagtgccatatccctcctcccccacccagtctgatttcctttattctcagtccatactttggatgatctggcttgctagcctagtgaggtgacctagacctttatcctttaagggtctgacctctcagctgccttgattgcttcatgtgcccatttgctatcattacaggatatgcatgtaccaagaaatacaccaggacattccctggattgtaaatatatcttctctgccccataaagtagctgctactgtggctcccggtggccatcagggctcaatagccccacttatgcagtcactctttttttgcctgcttgcccactggcatgaggagctcaaggtgaccagatagtggtcacaacttcaagttagtggccttattgtatcttttggaggagttctgctgaacactagcacctctaccccaccagagcttagtttcagtggatcactgggagaggaaaaggactgaattccaccactactccttggtttccagacccaagtattctagtttttggagacacagcaacatgtattggccattaattcagtgactttcccaaccacattctggaggagagtcctacagctcagcaccaggtggtccctaagctggtgccttagctgagcctttaacaggccttcccaccattgtattaatctagatgtttctggggtatgtgctacatgatcaagtcaatggagtccttgatcattcactcattgtcacactgcttttaccataaaatgagtcccttcatttgaagcaatgttgtgcagacaacatgccgataaatccaacattctgcaagtctttggatggcagtgctggcaaaggaacttggtcagggagggcaaacccatttccatttgggtactgatgctgaagaggaaaacatactcaggacagggtctgaggggatcaacttatcaccaaagggttggctggcctctcggaggactggtgccatattgagggctccgtgtcagtcttttcagctggcaggctgggcattcatcaatgtcagcagctatatctgctttagagggatggggcccatgcttctgggcctgtgcttagcatttacccctgccatcattgtcactgtttaaggcttctccgtgtcagctccttgatagtcaaggagagagactggctgacatccacaggatcagtcaccctgtcacctggctgttgaattatctcctctgtggtggatggtttctcgtgagcattgagatacaaagaccaacacgtgtgctcatttctgtaggtcaatctacattatgcttccctagatctcctggtcccagatcatccaatcttgtctttcaggcctctggccaacatcgaagtcatttgcccactgctcaggcatctacatacatcataatactatactacttctctctctttcaaagagtttgaccaagtgccccactcatagttctaccccctgggaggagttctcttcaccgttatcctttgcggccacccttgagaaggctgcaatgcagcaacagctcatttcaactagcactgacatatcacacaggctcatgtgtgaagcaacctgggttctttccttaactgattactggttgtaggaaaccacccatgaagccctaagtgtgaactcaagaaggggtgttggtgcaaagcagtaagtgacctgggagtctgggctacctgttcacataatttactcgtgctgtctagacctttttaggcctgatctcaaatatataattggcatagatagtcttagcttctggcagaacccttacattagcaacttgacttgtagagtctggtaggaaaagtcaagtggaagtccttgaaactacaccctttcctccacttcaaggcagtagatcagaagcaaaatcacctctcagaaagtattgcaggggttagaacccctaycatgacttaaatgatgcagggtatggtagatcccattacatttcmattaattagcttgtataggcccctgcgaaagccaaatctattatcagatgatagtggatttccaaaaatcagatgatagtggatttccataaacttggccagatggtagcatccattgcagctgccatgccaaatacggtatctttactggaatataccaacatagcctttggtgtgtgggatgcagagtgacctggcaaagtggaatcacaaggaagataaaaaccagttcacttttacatggcagatacagtagtatatattcactgttttgccccaggagtatcataacagctctttgttataatatagtccataaggaccttgtcattccaacatgccatggactatcctgctggtcccttatactggtgacatcatgctgactgaagatagtgagcaggaagggacaattgccttagatactctgttaagatgcatgaataggtcagaagctgagagataagctccatcacctgtctcatcctgggttattcagatagtagcatctgaggctaagtcttgtgtgcctctatggcattagggagtgtgatcttagagagcagaagtgaaaaggaaagggaggcgaggtaggaggaagagcccaataagaggcaatagacatgacggactgctctgcaagcattgtgtgaccatcttctgagatgccttataaattactttcttggcacagtgcatctggaagaggaagggagaaaaatacatctactggcttccattggctgaaattttgccccacagggtgttatttgcactgtacttccaggttgctcattgcaggcactaaggatagtgctgaggatgtcatgccttagcatcaacagggaagccctggggtggaagtgaaaggtgatcaatgtggacatgaggccaggggctgtgagttgtatctgcctgaagttggtgagagtccaggtagagttggtctccacaaaggggactgctgttagaacaagtggccagagaccctggagacgggtgagactaaaagaatttcaagcagctatcttaatttggattcccgcagcaaaagactcagaggcaaggattccactgccagcagttcacttggtcagttttcttaagaagcactggaaggggagtggggaaatgaggcggccaataaagagtgagtgcacaatacccctgtgggaaaccggagctcagtcctgtggaaactctggatagaagtatagaatgtgtgcctgcctaggtgttcccaccagctgggtaagggggctgagattctcatccaccagctcctgaccatcactgattgagagctgcttggggaaggggttgctccattaatttcccaacacttctggtcttctgtgcttgtgggcagagcaggctccaggggccagagaaagcgctcaggtgaagggatgcaggtgctggcagttggaagacagccaccctgcacataaatgatcaagatggaggggatctggacaggatgttgcagtggcacataaaaggtgtctgatacattctccctcctttttcttttcctcttggattgtcagattttcaaatccatcattttctcttatgttgaaccaatgactcttgtctcagcctgtggcccctctttgcatatccaaacacatcaagatgctcagcagaacaaatgagtcctccttggaaggtagttgtgggcttaaacagtcattattttctcttggttatcccaaaggcagctatctctttagttattctagtaaattctattctagttagctagttaaatctattgcactttttctgcacattaaatcagatgatatgcaagctctaactacctcctgtagacgttctcatcacaactccacaagggaggcattgtacccatgtagtgaataaactgaggtctagaatgacatgcactatattcttggtaacttcttcagaaaccaaagttttagatgatttccacagatttttgtgccccttccagctgcytgagacagtatggagaatgcttttggatattgagttatcagggacattgggtagattatgggaaaatggaacagcctattaatttagtccagttctgyaagagttgggacataagatccccagtcttcacacatcccaatctcacagattacactgaacggtggtaaacaatttagatcagcttgggtatgacacgaagcttcctcttggctatttctrcaacttaacattgaatggaaggaaatcacttaagccctaaaaacactgtctggcaggaggtaaaatgtcttgcttggcttcctgccccatccctcccacacccacagctgggaccatttggcccccacttcagctcccaggcctgagaccctccctgttcttcatctgcctgagttcagggacaagctgcaaactgagagcccttcttgaatatgaacatggtctggcttcccaggagaaataggtgcaaaatcaacaaccttaacacgagtctatttccagtcatttgtagatgagaagtgtgctttgggaaacttcatttttagattccagtgaattgggtatcatcagttacagagaaccaacaaaatatgaaatgtgcacataggacttccctgcaagagtagaaaggaatctgttgccttatgcatatgtatcttggactgataaattggatcacaatcaagtcttcacccttcatgttatatatgtaactgaggaggccaggtttgtttcataatggcaccttcatttttatttttttcaatgtacacactttatttgtatattaaacaagtagaaatatgtttttccccatctttctttaaacatgttcttctccccatatatcttctgtttacccatttttaacaggaacatgagcattcaacctattccattttttcttatatgcaaaggcagagtgcaactgtgataggggcaattgattcttagctttggttttggggacaatatggggtggtgggaactacggcaaactggacagtactgccttagctgaaggcagcagcccctattcaatgccaatcaattgttggcacagagaatgcaggccttatgtcgccaggttttccaaaatttcaaaaagaatccagaagtctcaattttactgtgcaattctctaattatcaaatattgctagccaatttaatttggaggttgacacccagcagaccagataaaacatatctatgggcaaaattgaaggctgggcatggtggcttatgcctttaatcccagcactttagaaggctgagatgggtggatcaacttgaggtcaggagtttgagaccagcctggccaacatggtgaaaccccgtctctactaaaaatacaaaaattagccgagtgtggtgatgggcgcctatagtcccagctacttggaaggctgaagaggagaatcacttgaacccgggaggcggaagttgcagtgagccaccattgcactccatcctgggtgacagagcggcactccatcctgggtgacagagcgacactccatctcaaacaaaaacaaaaaccaaaatcaaaaatgaaacaaaattgagcctatggctgccagttcacaatctctggttttaaaactgtcaaacagaaccctagatctactatgtagccataactgatgtggtttttctaagcagtatagaaatatagttctaagaaagtcaattatattcctagttaatgtggtactttacaaacaatagagaaatatagaattatgaaagcaaattccctatggttagtgaatcaaaataaaataaggttaggcccatcacagagtggctgcaagtgggagagaatttacattcacagggaatgtgaacagattaggaaagaggcctcaagtggacaattttgtcgggatgcagttcgccttatgtgttagctccacatgaggccaacctggttctcgagctgctttggctactggagcctcaatcccttaagaggttgatctagggtcccccctctgtcttgccagttgtccccctccacaggccgcagccccgatgagaatatccacaacctctaataatagaagccaaaatccaatggacagagagcactgtggtgtaccagtaggtggtcccatcaagggactcacagccaccattcaattcaaggtagttgtgtccattatccaggtggagaaataaaaaatcagaccaagggcaagatttgcccaacttcaccctgcagccagggccagcattggactggaacccagactcctgatctccaggccaaccatccctcctctgagccctcacygcccaggctggcatgaaccctttcatatccgagtgctctgtgtctccactgcgattttgctcttgagggtggagagtgagtctaatcttcttgcttactggcaggcagcatggctgagtggggaggagcatgggtgttgcatctgccattcattagccttggaatgttttgaacctcagctttcttatctatgaaatggggatcatgacagtatcacctttccatggctgttgtgggtattaaatgagataacacagctaaagcatttagcagagggcttgggacataatccacaccaagtaagcattagttgcttatatccattcccatgccatctcctctgcaaggctaactcacttggcaagaggtgacccatcctctagagtggaactgaatcaaacacaggaactgaccacagagccacggcccactgtggctacttggtgcttcaggaagagaggtttctagtgtttacctggcttcagagctgtccaggtctcagccaacttcagcggtgcctcttctcactccaagatctcacactatgtgccgggtggtaatcttaataaaaagcgaccattgagggtttacccagtgccctgcgataagctctgcacagatgggttagtctgccctgaaccgcctcactcccactgagggctttcggaggcagagcctggttcatgacccccacatctcatcacagggcctggtgtgatgcctcacccaagactgtgctccttcattcatccagcgtttattggcatctcctactacctgagctgttttaggcagggaacaaagcacagataagccctcctggagcttacattctgatgaagggggcaggcaaggtatacatagggaggaaagccctggaatccagtacattaaaaacttttattaggattatctctgctgcatttagttgtatgtatcccttatggcccccaggcaggtccactcctgggcattcaagtcggtccatgtgtcaggcgtgcagggtgggtcacagcatctaggagctcagtgcagcttgggactttgggacatacgctccacctctctgagcctcagtctccttgtccatcatataaggaaatcactgattccagccttcctgggctgtggagaggattccctcagcggctgtgaaagagtgctttcttgcgsgtcagccccgacaggacagacttaagggcgggagggagcccatcccgcttgccccaacgaacgcgggcgcggggctttcctckcaggttacataaggcagccgcgggtggaggcagcagaggcgagcgcacgtccgtcgagggggaaaggggcgtggggaggcggccggggcggccggtatcccccgggcgtgagtgcgcagcgcgcgggggagcgcagggcgcggcggagtcgggtttcagagcgcgggtgactcggggcgcgggccgggagccgggattctgcccgccgccgccgctgccgagcgccgcctttgttccctgcaggaagggcgagcgcggcggccagcgctcagcgacccttcgtcctccgctaagctccaacgctctgctcgactagccgcgcgccttccggggctccgcagacccgcgagatggcaccaaggtaagacccgcttctctgcttcctcgcgkcccgggcccctccaatactcttgcccgcctcaccttttctccctcgggcacatcttgcaggaggaacaacgggcagtgctggtgtctgctgatgctgctctcggtctccacgcccctccctgctgtcacccagacccgcggtgcgacaggtaagcaacccggtcggagggtggcaccggctgcctccgcgcccgtgggggaagtcggttttggcggcggacgcggctgcgatgcgtgcctcattcctggacataaaagggagtcttgccactcagtgcgcactggcggtcccgcgggcggctacctcctggcagtgcaggggttatagctgtgaatgggatccctgggcagctggggcggttggagcgttgtctgggcacccgagatgtctgagctgggtgcggagcctccaatcttaggcagagagggacttcagaaacagcgccagcgccagcgccaacagcctcagcgcacccagcgccagcagcttaggttgtgcgtgctggctggcttctggtaagggcaggtctggtgcctctccgcacacaggtgcgaagcatgaacaccgggagggacatctggggcttttgskgctcaagaaataacggaactgaattgctcggttgcttaacccagctctgagttacctaagcggtcacgtctatcatgggcagtggctccaccggtggtggaaagagctgtggcctggaagccagagatctgatcccttccgttccccgggcctcagtttctccagcagaactcaggcggttggctgaatagtaagatayaagttaaagtagacctaagttaaaatgggcctcggttaaggtcagactgcctgggtttgaactgtggctggctgagtgatcttgggcaatggatttcatcgctctgtgcctcagtttccccatctgaaaaaggcgattaattagaccattttaccttcctagaaatgttgtgaatattagagaaattagaaataatgtgcttcccatgattccagtatatactaggcacaaaataagtgatagaaattactgcttgattcttgcagtaactatgtgttggaaagcaatgcaagtatttttatttttattttagattcagggagtggtcatgtgtggttttttacaagggtatattgcacggtgctgaggtttgggcttctattaatcccatcgcaatgcaggtatttttataacattgaggttgagagaagcttagaaagtggccagtccaaaagccaggacttgaatccaggtctgtaggctcttgcccttgctcagctctttctccatgcagttttgcagaagagccatgctttctatagcttctgaccccctcccctttgaatttgggggattagtacacatcttcaattgaataagggaacagaaagtctaggaaacaacctctagtcggcccaaaggaaacgggattgagaaggtggccttggttaactctttgtttgcctgaagaagcccaagacagcccattgtctcctgggcaacaagacccaaatccgatgatagcttttcctgccagagtgtccagcctggcatttattgcagatcaaagggcagctggagtatagttttagcttctcagccccatggctcatgtcagaaagttgcaattttgcatatgatatagggccctgccaactcagtggcagaggccaactttgggttccatggtcttttgtgaactttgctgcaacttccagtttcccaaaaggaagatggatctggggataggaacttyggtgtttctttctcctcctgtgtgtgtctctgggatccctcagtgtcagggctgttgtttctaacacaaaggaagccctattcccatttataatgtaaaaagggagggccagcaaaccttcaggagctgagaacggtctaaggagggccatttgcaactgatgggttttcagtgcccctttggggatgtgaaacgattcctaaaaatgtaaactatcctcctgcaaactgcatttgtaatgcaatttaatatccctaatacttataaaacactttgtatatccaggtggaggtgtgaacatgttcatatttcattcatccaatccttacaaccactccaggaggtgaggactgagaacagttactatctctgtttttcagatgaagaaacagaggtccaaagtcacaagacttctaagtggctggggtgggatttgaaccagacagtctgactccagagtccttgctcttaaccatcctagtgtgtagttagaagagcttcacggatggagaaggctttaggggttccatggtctccaatgagccccacaatctgaatgtcacaattgtaacatgagtccattgcatggcattgtgcagtcttcaaagcacaatgtcaccttcaccacgtccctggaatcaccacccagcagtgctgagaagtaaattgggctctgtcttacagaggggatgtgacttcctcaaggccgcatgactgtaactgggtagatccataatagccctctcacgtctgtgaacttctgggctggtgctgttccttccataggaccactgcccaactggctataaaaaacaattgccaagacttcatagcactatgaaccagcagtgttttaagtgccctgccatgaatgagctcagtcaatcatcacaacaaccccatgtcttatccccttttacagatgaggaaactgaggcacagtcttttgcccaagggcatgtagccttcagtaatataagcacaatttgagcccagagggtctgactccagaatctgtacttgtaaccactatgctgtatgcttaagtggggtggcttctgaaagcatgtttgtaagtgggctgttatgagcggaaatacatgttcccaacgatttggcagtttcttaaaatgttaaatatatacttaccctacaatctagmacttccactcctaagtatctacttaagggaaaggaaagcatatgkccacccaaaaactcatatgtatgttcatagcagcattatttataatgaccaaaactggaaataaagttaaattcaccattagctggtgaatagataaacaaatgaggtgtatccatttaatggaatactactcagcaataaaaaggaatgaagtattgatcaatgctacaacaacatggataaaccttaataccattaagctaagtaaaagaagccagacattaaaaagcaatacattgtaagagtccctatatatgagatttctgtaaaggcagaaccacagagacagaaaacagaagcagagattgactgcaaaggggcatgaggaaactttttggggagtgttctaaaactggattgtggtggtagttgtgcaactctataaatttactaaaataatctaactatacatttaaaatgggtgaattttatggaatgtaagctatgcctcaataaagctgcttcttaaataaaagaatgtattttcccagagcatctaggccccagatctggtggggcttcaaggtggggttcctagccagcctggtacagagctggcacacagctcacaacttaaaagctgctggcctcttagggcattgattctctcagaaaatgggtccagagttctgcctgcacctccaggtctctggatcgactctccctactatccctgaatgccattgtgggcccaggacagggctcctcaggtaggggtagaacacatgcatatgggttttttgcaggtagttgatctgttaaaaagtgggtctttgtaaacttcctgatatcctgcacgccctaaaacagcacaagttcaggtattggaaaacctgggttccactcactgacttcctccatgaacttagatgagttgcttttcccactctgagcctgttttcccatctacgaagtggagaggcaagagtcactcatctctgtagtcctaatttaaaatgttgggaaacaaaacaaaataatatttttctagtttgaggtttgattatttcacatagtttagttcaacaaacccattctgtgctggccctcatgctggctgggtacagaaaggatttgggcacagagctgccccaaaggggtcatagttcacaggaagaaagaaagggccacagacaactgtaatgccatttttcctgaagtcttctcatctaccatgcagaatgtcctgtgtgcagccaatcccatccttctacaccatcctgtttaaagacacacttgtcggccgggcgcggtggctcacacctgtaatcccagcactttgggaggctggggcgggcagatcattaggtcaggagattgagaccatcctagctaacacggtgaaaccctgtctctactaaaaatacaaaaaattagccaggcatggtggcgggcgcctgtagtcccagctacttgggaggctgaggcaggagaatagcttgaacctgggaggcggaggttgcagtgagccaagatcgcgccactgcactccagcctggcaacagagggagactctgtctcaaaaaaaaaaaaaaaaaaaaagagacacttgtcagtgggtgtcacccacatggcctcttgtacctccaatggtcagggttgagctggaggacaacaccaatccttccttttcctggtaaagtttcagggtcattggaatacccaatattttagaagataagggggctattgtccaggtagggatggtggtgtcacaagtaatttgctcttgctaataaagtgttgatgattgcaaattatttgcttatgtttaaactgttttattgtgaaatacaacatccattcagaaaagtgcatgctaaaggtacagtacaatcttgtatcacagagcaaacatgtaatccagatgaagatataggataatccccagaaggtctcctaaacccctttgctgtggttttattttcccttctttctctctgaggtaaccattaccttgacattaacagtcatccctttcttgctttttaaaaatagctttactatctaagtgtgtatcccaaaattctgaagttctgttttactcgattttgaactttttaaatgcagaatctattctttcatgtctgattctttcaatgaataataagtttttgagatttattcatgctgctgtatgtggctgtagttcattgccattgctgtataatagtccattgcattagcatagcatatgttacttatccattcttctccaacatttgggttgtttccattttgggctaatgtaatagtgtcgctctgaacattcttgtacatttctctcagtgcacatgtgcatgaatttctgttggttctatacctacgagtggagtgctgaatcagagtgtgcatatcccccaactgagtagacaatgccagcatgtcttctaaatggttgtacagatccacacagctaccaagaaatgagggcctccatttcttcacatcctcaccagcacttgatcttgtcactgagcttaacttcagcatttctaatgggtgcatatttgatcttactgtagccttaatttccattttcctaattattaattaccttttcatatgtttattgaccatttagatatccagacttactttttattgaggtgaaatttacattatataacagtaaccattttgaagtgcacaattcagtgtcatttagttccttcacaatattgtgcaatcaacatctctatcaagttccaaaacattttcatcaccccaaaagaaatatctatgcccattaatcaattgctccccattcccycattttctcagcttcaggcagtcactaaactactttctgcctctatggacttgcctattctagatatttcatgaaaatggaatcatacagtgtatgacctattgtgtctgacttcttccatttaacataaagttttcatggttcactcatgttgtatcatgtgtcagtacttcatgcctttttatgactgagtaatattccagtgtatgtatataccaaattttgtttttccattcatttgttgatggacatttgggttatttctaccttttgttttttgtgaatagtgctgctctgaacatttgcatacaagtattcggatgcttgacggcctgtttctacttctttgcacctaggagcagaatttctggtcatatgataattctgtgtttcaagtatgacgaacccccaaactgttttccacagtggctgcaccatgtttacatccccaccagcaatgtatgagggctttaattatgcacatcatcgccaatgcttgttttcagtttttaaaattatagccattttagtggatataaaayggcatctcattgtggtttttatttgcaattctttctttctttcttttttctttctccttccttccctccttccttccctccctcccttccctccttccttccctccctcccttccttccttccttcccttcccttccttccttcccttcccttcccttccccttccttccttccttccttccttccttccttccttccttcctccctccctccctctctctcttcctttctttctttcttttgacagagtctcactctgtcacccaggctggagttggtggccggcccatcttggctcactgcaacctccacctcccaggttcaagcaattctcctgccttagcctcccgagtagctgagactacaggcatgcccagctcatttctgtatttttagtagagatacagtttcaccatattggtcatgttggtctcgaactcctgacctcatgatccacccacctyggcctcccaaagtgctgggattacaggcgtgagccactgtgcctggcctatttgcaattttctaatgacaaatgacgttgcgcattttttcaagtgcttcttggccaccatcttctctggagaaatcctgatttaatgggaagcatatgaatcagagcagcgcagaacttccctctaaccaccccactcttgctccctggcagtctgatttgcttttctgagtgagagagatgtgggtaggagtcacacctgaagttttgcctcattgacctgcagtctccatctcccaaaggacaattgtctagagctggccactttgtccagagctggactttagcaatttgtcattattataaatagtgctgctgggacatcttcagacaaatggcctttttcttttggattatttcctttggcaatatttccccccaaagaactcacccatcaaagaacagaactggttggacagttcttactatgtatttagatggatttttcttatttaatcatgatgcttcctagtataattgccctcactgggttctcactgtacctgagatggagtcatgctcctggccccagaggaccctgccttcctccactaacactaagtccctatggacttcagctcacatcaaatcactggcaggcttctgaatgggacatgcaacgtcccacacctgtgcttttgcataggctagtgccatttttattytattattattttttgggacagggtcttctctgttgcccaggctgtagtgcagtggtacaatcttagctcattgaagcctcaaagtcctgggctcaagggatcctccttcctcagcctcctgagtagctggattacataccctcatacccagctaatttaaaaattttttgtaggcatagagttttgctgtgttgcccaggctggtctaaaactcctggcttcaagcaattcacccttcttgacctcccaaagtgctgggattacaggcgtgagccactgcacctggctaccagtaccattttaaaaatgcctttcccccatagtacctggggacccccaaatcatccttctaagattctactctgggaagctgtctctcctctcccaggcataatgagcatctctttgtctcagggcttctcagactgtacwgtgaccactgattagttgcctgcatccctaactgctacataggaagttctatgaggcagggatgggcctgtccaactctgaatcctggaacagggatttcaggtgcaggactggcatgaagtgggtactcagcatactttttcaatgaatcaaagaaggaatgaaggggttagtctagcctgtggtctaatgcaccaacttactatgttctctgtggtgtgtaagtcattccaattcttccatggctttgtcagctgtagggtgaccttgactgagtactcagggaatattatagggctgtcgttttcttcaatagtgtaataactagttaggctggaattcactctaatgttaatttgctctttatctttcttattatattaattggataaaaatttatttcccagcttctctctactcatcttattcctgattgcctcagtttgtcaaaagttgtgcatttatcttttttcttctagctaaatatgtaagttgattttccagttttcttttgatatctacagcttgatcacttaaaatgaaccatagattaggatataatctctcttttttttaagtctctctatgttgcccaggctggtcttgaactcctgggctcaagcaatcctcccaacttggcctcccaaagtgctgggattacaggcatgagccaccacacttggccagattagggtataatctaaagccagttcttttccaaagtggtccccaggtttcccccaagtactaattaaagtgtgagctattgcctcatcactgtactgcccatcattgttgtgtgatatcttatcatataatattttttcttttaatgatatacttttatttctggtatctctgtattactgatcactttcttgtgctaatatgtgtatgtcgttttaaatccatacaattttgatgcttgttactttgtgctatgttttacagtctggtaagagaagttacccctgcctacctccttcattaagccacgaattctttagtataggttggcttattccataatttctgcatggtatgattagataatgggagtgtaccagtggtagtgggtaggtgagggttgtaaaaaggaggcaatcttacaataagactcaatttaaggcattaatgtctagtgtggagaatggataagcaaataagacctcaaagtcagagcatcagattgtggggtatgacctattgctgtcaacaaagtgcccaggggagctaaggtggtatcagaggtgttgggaggagccaggtttgctgactgattaccttcttctgctctatccaaactacagagaggaaaagtctagggttagagcagatccaggtcaacatctaatgagagagacaggggtccctggtcacctaatgaatgcagcccactctttatccccattataaccaaactcaacccaacccaaccctatccaacccaactcaacctaatccaattcaacccacctaatccaatacaaccccatcaaactcaacccaatccaacccaacccaacctaatccaatccaaccaaacccatcccaacccaaccaaatccaatccactccagttcatatttgttgcataccatgggtggtttaaaggacagaacagggcaaaaaactattctgagggccctggtatctctcccaagtgaccagggcccctgaccttagatgccagggaacccctttctgggtttggagagcttggctggagtctggcttgcaggcaacaccctggccttaggcctctctaggagttactcctcccatcactgagggactcaaatggggcccagcttaaaacactcctcccatctaggcagtcttttgtgactagcttcctcccaaagggaatttctgttgaagtcttcaaaatggtctgtctgttctgtattatggcttctcttacagatgtctgtcttcctcctattattcctggcttcctgctgtcccaggcactctctggagtaggtggcaggatggctgaagagccgcattagactcagtgcccatcctggagggactcatagttcagtagtagagacagtgcgcagaagctggcttgcatgctaaggagcttgtcctgagtttcctaacacagtgtaagcaagcatctgcactgccaaagtagggatgtccatttccaccaggagatgggagaggcagagggatgtgagaagtgtttgtaagagattcatttttttcaataaaattttaaaaattggtaataaaaataatacatagttattataaaaactagggccaaaaagaggagtttaaaaagatcacatattatcttgtgactcaaagataaaccctgctagcatttgatggactgtgtttcaagtttattttccacccctaagtatgcacatagatcataatatgaacagaacattctgtacattgcatttagtgtttagttgatggcttttttcccccttaacaatcatctagacaccttctctggaacattaaatactcgtctctaatattttttgtgtttgtaatagtatttcattgtttggttgtcttgtaattaaacttttaggctgtttctcattgctcactattatgaacactattgtgacgatcgtagtcttgtagctttgtatttgacgacttctgcaattatttcctagcacaacacaatttcytaaaacaaatagttgggtctagtgcatgcccatttttaaggcttttgttgcattgttcagacaggcaataataatttatactccctgcaacagcatatgagaacgccaagcccaccctgccttgtctattactgctgtgtctctaacccaaaaggagcaaatgacaacaggtaaaggaacagtgccaccatccttctccaaatggtggccttactcaaaagagctgagggctcctcccaccctccctctccactcttctccttcattcatccattttgcacatgtctgtggaagggctagaagagggtttttcaggaaattagaatgtgagagctcatgtcatgaggaccttgatggtcatcaggcctccagtaccttggaatcattttggggattccaagggggcctggtgcccagtcctccagctcttcagggattcttcatacatctgagataaggtccagacaccagcaggtttgaaaatctcctgggtgcagtctaagatgcagccaaggctgagaataaccaatgcagtccaactgcttcctttcaaaggtggtgatgctgagtcccagagagggactccttgtcttccttatctgtaaattagggcaattcctactctaaggattagtgatcgggcctgtcactggtgatcagttcaatgcctccttacttccctgctcccacatcactgtgggttccttgagggcaggaagccgtttttatttatccatgtttccccagcatctgacatggcactaaatggacacaatgagcatttgaataagttaatgaatgaatcattcaaagcctgggactgtggagatcttagtgaaaacccagcattatgaacctttgaccagcaaagtctatgtgcgcctccagccacactgaaagaccaccctgcagccatcyactgtgcaggatgatggggctagagcagggtgagagtaggcactgcctatagtatgtatatcaagaatagaatgtttcatgaaagaaaagttaagctgtgctttttctggcataggaaagttacaaccatttcatctcacagaacatagagtagagattctagctgatgacaagctgaacccaagttcttgcaagttcaacagcattacacacagaacctctgaaataggcccagccaactgcttctcctctccaactacaatcttagtggctagctagttctgacttgattgtctagctcagagaaggaaagtgactagctcatggtcacagttcaagttggcaggagagccaggtctagaaccaggtatcctgactcctaggccagtgctctggtgcttcacatgaacctaagaaaataccaagggtatggctggggtatggtggctcatgcctataatcccagcactttgggaggccaaggcagatggatcacctgaggtcaggagtttgtgaccagccgggccaacatgacaaaatcttgcctttactaaaaatacaaaaattagctgggcgtggtggtgcacgcctgtgstcccagctacttgggaggctaaggcaggagaatctcttgagcccaagaggcagaggtggcagtgagccgagatcatgccactacattccagcctgggtggcagagaaagtccccatctcaaaaacaaaaacaaacaaagaaacaaaaaacaacaacaaccaaaaaacagtatgatctgtgctaataattatatagtgctttttatgtgccaggtgctgttttaagttttaatatataggatatacatatatgttatatatacacacatgcatatccacatacacacatctgtgtgtgtatgtatatgttttatataatatacattttatatgtacatttacatatatgtatgtgtatctgtgtgtgtatttcatatgtgaaattctcaccacagccttgtgaaatgaagaaattcaattacaacttgacatcagcacacaggtctgtctcccagcctccatcctctccaccctagaatccatcctccacactgcagccacagtaatcttctagcttcttgccactcaatcttcttgcttctagcatcttgctacgtgtggtccatggaccagcagcatcagcataacctgggaacttggcagaaatgcagaatctctggcttcacccccagaactcataaatcagaatcacaccatctaggggactgaggatagcattttaacaagatcctcggtgattcgtgtgcacttttaacatttgagcaacactctaaaccagctctgattgtgttgctccctgcttaaaaccctttgccatcttcccatgatcaccatctgtggtaggcagggtcatggccctctgaaggacccacagcctaacccccaggacgtgtcactccattaggttctatagcaaagggagttaggctgcagatggaatcaaggctgataatcagctgacctcaaatgagggagattgtctccgattatctggttgggcccaatatcatcacaagcgtcctcaaaagtggaaaagggaggcagaggaaatcagagtggtgtgatgtgagaggacttgagcatccttgtttgctagctttgaaaatagacgaaggggccacaagccaaggaatgcaggcagcctctggaagctgcaaaaggcaaggaaactgattttcccttaaagcttccagaaagaaccatggtctgctgataccttaatttttatctcagtaagacctgtgttggacttctaacctccagaactgtaagataaaaaaacttgtgttgatgtaagccactaagtttgtggtagtttgttatagcagcattggaagataaatacagccttctactccttagtgtggcatttgaggccctctgaagttccaccaagtgctgtcctggcctcatctcccagaatatcccttcccacaccctaatctcaaaccaacagagtctccagagtagctagagtatgggaagggacactctgaaaaaaccagactagggttatttctctctctctctctctctttgtgtgtttgtgtgagacaggttctcactctgttgcccaggctggggtgcagtggtgcaatcacagctcactgcagccttgacctccctgggcttaagtggtcctccagctcagcctctcaagtagctgggactgcaggtgtgcgccaccatgcctgaataatttttctatcttctttttttttctttttttaagaaatggggtttcactgtgttgcccagactggtctcaaactcctggtacaggcaccatcacacctggctggggttgttctctatgccaccagcacctagccctgtgcctggcccctggccagtactcaggcaatgccttttgaagtaataacccagtggaaccctgttacgttcaggtcgccaccagccacggaggagcccatgacatgccggaggcaactatggcaacagtgcgggacatggtggagactctcccagagcctcagccttaacattcctttgctcttcttctgctgtgggcaaatcactgtacctctctgggcctcagtttccccatctgggaaatgaaggggttggaaagacaattctaaaagcatcgttagcatgaacatgctaggatatctgagttcagtttggccgcacgttctggcagttgggggcagtgattcggctcagctctgctcagccctgttcatctcactgctgagcacatcctgcactgtcatcccattcacaaagtgggatacaaaactgcccagcaactgtgtgtatttggtacaaaacagactacagctgctcattccccctgtctagttaaaatgccaaattactcactctcccacagaaagaaaaaaaggaggggtggaagaaaccatttctcactgcagagtttttccatgtgacatattttctaattttatttcaggtctaactgtctgcagtagatggctccatttcagggtcttcccctccccttttagtatatgagctttcattaaggaatgaagtggctttatttgtttaatatttgcaagtgtgggctgatatcaaattgcaactgaatgtcttcattttctcggcggagggaagttctctaagatgccccgcactggtttagtggctcggattccttggttctaggcctggtcacaggagctttgccaagtcccctccattctctggacttagawactcaaagtgagtattccgcaaagtgaggaaaaggctggctcatcacggagatagggtggctggattggaagccayggctgatgcgccccatttctaagagtggttccatttgagactgtgttggaatggtatgcagctcagtttatgtctgtgctcagctcctgtcatctctgcactgttgctttagttcatggaatggctgagaaatttttcatacctggaaagagtattgtagctttgttttaaagaaattaattctggccaggcatggtggctcacatctgtaatctcagcacttcaggaagccgaggtgggaggatctcttgaagccaggagttcgagaccagcctaggcaacatagtgagaccctgtctctacaaaaaaaaaaaaaaaaaaaactaaaaactaaaatgatctgggtgtggtggcatgaacctgtagtcccagctactcaggaggctgaggcaggaggatcgatcacttgagcccaggagaccaccatgcctggccagaattagtttctttaaaacaaagctacagtactctttccaagttatgaaaaatttctcagccattccatgaactaaagcaacagtgcagagatgacaggagctgagcacagacataaactgagctgcataccattccaacacagtctcaaatggaaccactcttagaaatgaggctgcagtgagctgtgattgtgccagtgtacttcagcctgggcaacagagtgagatcttgccataaaaaaaaaaaaattaattctgcccctgcaatgtctgttgcatgcaacctctcccttctatcttcttgccctgcctggcttcaggcctgtgttacctctttctgctgggttgctacagcagctccctggccagcaggatctcccatctctctgtcctctagcatggcttctcactgtgagtcagagtagcttgtctaaaacacaggtcccatcatgtcacatcccctgtcaaaacgcttccatgttttctgtgacgcacaatgcattccacactccttgggttgcagttcaaggcctcttctcctctcacatccctccccgtaccctggctctaccaccctgaactgcttgctggtctctgaattgaccatgcatgttcccttctccaagcctttgcttgcgctgttcctcagcctgccctatggaaatcctctgcattttcaccttgatagacttgttgcttaaactgtggtccctggaccagcagcatgggcatcatccaggagctcattagaaacagagtcccaaggccgggcacaggggctcacacctgtaatcccagcactttgggaggccaaggtagggtgattgcttgaggccaggagtttgagaccagcctgggcaccatagtgagacamcatctctataaaaaattagcatgatgtggtgacatgtgcctgtactcccagctacttgggagcctgaggtgggaggatcgcttgagcccaagaggttaaggctgcagtgagccgaggtcacaccactgaaygaaccccagcctgggtgacaaagggagactctgtttcaaaaataaaaaagaaaaaaaagaaaagaaatacaggatcccaaatcctgcctcagacccacaacatcagatctagacccacagcatcagatctagacccacggcatcagatctgtaccttaaccaggcccccaggtgatgtgtgtggcactcaagtgtaagctgcagtgctgtgtagcttggagggcaagtgctgaatctgggcagtcagatagagctggcctggttccaggctctgcatgtatcagttggtgaccttggacaatgtactaatccttttgaaacctcagtttcctcatctgtagagtgaggaaactataaacgaaataacgccccaagctcttagcacagtgcctggcacatggaaagcccttaatgaaggggagtggccagtaacaaggttccatctcagtgctagctgatgttgtgcctaagctgtcctgtgtcctctctcagcattgcttgtattgggtttattccatcagaggtgagaactcatttgtaagtccatcttgctgaggatgggaagggccaggaccaagtcatttgtgtttggagtttagaatcattgaccttccagtggagggagataaacaatcataatctgatgtggggaaagtgaaacatagctaaacaaggactttgcaaagtgggtgggatggaattcattccagagtttctgcccttggtagaaatggccattctgcctgttgtaacctgggggctttctcattcatccatttgtttacccacttttatgtaatatgtattgactgttctctgaatacaagcaatgtgtgatatcctgggcagaaaatgaaaagcaagataggcttgctgcttgccytctaggatcctatagtctaatgggggacattgatgctaaataaaggattgtacaaaaagactctttatgtttataaatggtagaaaatgttagaaagtgcaatgagagctatgaaagcacatgccaggacactctcatctgtaccagggtgtcaggagagtctccccaaggaatgggatttaagatgagatctgaggggtgaacagatttagccaggaaaggaggtggggatgatgggctggaagaggagtggaatgttccagatacagagaaacagaatgaggagaggatggaagagacagcctgaatgtggctcgaacacgttgagggaggaaggcagggtgaagtttctgggatgaaagcaggrccttcgcccaggagccgtttttcctagcctggccctgggggagcatcttggcttcccaccctcggtcagtcctgcagcactaccgcccagggccacccggggtaaaggcctttggtctaggtrgagtgcagtcaagccctggattctactacctgccttgctcctgcctctgcttatcagacagtgaattgcttcagggcgggggcaaagggtctctacctttacatagcgtaagagaagagaatttaagagacttgcagtaaaatgtcaggaaggcagagtcagaagaaagcccggagccagcacaaagagcccctggtccaccttggcctctcagggcctcccaggccacgacagctgcctggcaaagaggtggtggaggcaagtgaggaaggtttctaacaattgctgtctgcggttagactccagtcagtcctggctttggaaagcttcctcccgtctatacaacgaagaggtcggaccagcgctaaggtcatccaggtctgacatgatctctttttattttttatctctctctggatctctgtattgagaatgtgcatccgtaaacataggaagaattctcttgccagggaacagaaatgcggtttggggaggaataactcgggtgggaggtttttagatgctttcactcaggggagcaattcctttagacatggttgtacccgtgagacgtgggggatgcattacgcctctcctgtccaagccattcctttggagacctgcttctcaaatgggtgtgctcacagtccttggctgtgtgacastagcatgcgaagagccacattgtttatttcctggaggattttactcagtggttggtaatttgtggtgaggagaccagtaacaactggggaataatttggaacatttttatattattaaaacaaacacacacacatgtttggagtggaattcaaaacttaagtgcttttaaagataaagcaagagaattaaattttcaaggtcctggggggctctttggctagactcaggccctcaggtttatctgatgacagagtgctttagcagagatgatgttatatacagatttgaggtccccaacttgtgggggatatttagaattattgcaaaggatacatggacattttctgtctacagatacctaacacctgtgtgttgagggggctattaatgctttgatattgacaagatggagakggtcactgccctccaaagctttggattagaactgtcagctccaagagggaaggaacttgtctatcactgctggatctccggcacttagaatagtgcctgctgtacagcaggtgctcaataaatgcttctggaatgaatagaaatgtgtgtgttgatggccatgagaagctttcattyctccatccacgtttacctttccaggaatagcgtgtggagctgctttagcatggagatcttgggtggaatgtgaagaatgctgtcatgcatatgcatgtgggaggctggtcagccttgctcaggttcaagatttccaagaatcactctttggaggcagccttccacccagcgtggtccatgctgcatagcgtaggctccttgtgtgagaaggcacagttcaccatttatgcrccttaggtagctaggacccmctgggcctcacttctcacaatgcctgcaagtccccccaaacaccttactcccatcagaacccactgggaacctgaggcctcagaaaatgctggactttggggatcaactattccagctcccccaaattgcagacgggaagatggaggttcaaagagagcaaggaacttcctgggagtcacacacattttagcgatgtgactcccaacaggttccttgttctagaactgggtctggaactacgtcttctgatatccaggtgggtggcatcactccattttgaaattccccagtgctgcttgatcacatccgtaccattctcagggatgtgcttgacagtagtgtgtggttagagctgagctttggaaacatcacatgaactttaaatcctggttcaacactttttttaattatgtgacttgggcacattgctcagaaagagtgtgggtttcctcatctggatggtggtggtgggtgatgggtataggagtcctacctcctgaggctatatgagctactcagcaggtaatgcccaggagtgctcagagccagggatggggaacccagtgctgagccatccatcccacaaagttaaggtcatgcccatcccgttcaccccaaatctccatgacttgcagtgccaggcatgtgacggtgtgtgcttgatagtcatttgtgaatgaacaaatgaatgaatgaacaaaatggacagaatatgcttagcacctgacatttgccctgtgccaccaccctgagagctaagtattgccacctctatttccagataaggaagctaaggctcagagaagttaaagaacatgcccaagatcacctggctagtacgtggctgagcagggacttacatacaagtttctctggcatcaaattccacgtcctttgccctgcaccattctgggggaggctggtcctcctggggttcccccgaggtcacctcccctcccacccccccattcttggtctctagttaggaggtgtccactgggttttcatcttggaaggtctgattccctctcccattattctggtggtccacaggctgttcctccagcaaacatttggagactgtcaagctgtactttcatctaaattaaacaagagtcagcctgtttcaaaatatgacttcagggtcaccatctgttctggctgttcccttaaactcaaatcccattttggagccaaatggggctccagcatcccacagagagtgtgtctctttgcacaactgagcaggaaagtctgtagaaagacacagtgtgtttgacaacaaccctcggacaaatttctctggttatttcttttcccctactcagcagcatcaacgtcattgcatgtgaaccacaggtccccaccacagattcaaatgcattcctttctacattgggtacctagtgtgtaccaagctctgtatgaggccctttcccatgccatcttccgggtcatgggagagagtggcctggatcttacagtggggggaatacaacatgccaaagctgctcgagctggtcacaccatcagtctgggcatcagttttctcatcttggggacattggactgggtattttctgaggttcttcccagctctgaaggttaccctgattcttcatcagcgccttggccaatgtaggcgagatttcacggtgcccactgaagctatgagctcgttctgactgcgctgcttgtctgccctggctgaattcacacaagctcatctgttgggacgccccgggctgttcccagggcagcttgattttgcccagggcataacatgccaagtgctgagaggctgcaagaaagtatgtctcctgctgttgccaaactatcgccttcgcaccacattccagatcacccaattccaccctctccttggcaagaaaaagaaaggggacccaactgcctagggcagcagcttggggtgaaatgaggattcctcctaaaatggtcagctagaaccttcctcaggaatctgccaaggcacccggttgcctgttgcataaattttagtctccttggctggacatttgaggctctctgactccagtctcctaaaggaaaaagaattgagagtarcaagagctgggaagtcccaaccactgcagttaaggcctgcagtcttaagctccttcagcttcagtcatctcatctgaaaatggcatagccacagtccccaccccatcagactgccttgaggttaggtgagctaatgcacctaagtgctgagctcagggttggcctgttgtgagattaacatttctaagtctgaatctctctggatccataattctctcctttttgctccaatgctggaggctatctcggggtcccatttctcccatccttggaatcactcacttggcccttgttttcctaattgtgtgggtttgctcatgctctgctcactccactgtgttcacctgtgtgaagcatctcaggcctatctccactggcccttccttcaggtccccttcccagtgtcccccagtgggcggggagtgctccctctttaagcccctacaggactttcctgtcctttgcttatggctccaagctcaggtcacctgtatctgggccccgtgttggtgtctggtcctttttttccaggggacccaattccttgtcctcttgatcccccagagcccagcccaggtcacctgtatctgggccccatgttggtgtctggtcctttttttccaggggacccaattccttgtcctcttgwtcccccagagcccagcccagcgccaagtccagacagggttggaaagtggatgctggttgtggacaaggccagactgggcccaggatagaatgaatgatagtaaggtcccctcctgactcttcttctgggagggaagagagaggaccattctcccctagggagatgtaaattatggctgccttgaggcctgtggataacaactcaagagatttcattgaccccatagtatcaatcatgccaaagaaatcaagaaacamcccaggccatgtttcacttagagaaagacttagaaagctcagaattaaaatactctttcaagctcctcctatcattcagtgctcctcccaacccaatgctgcacccccatggaggagatggggggccttctccacacaggaggaccagggatcttaccgttctgctcctgggatctccagggctggcctgtcccatcctaccttgccccatggccccagctcatgctctgacacccggataggccatgagcagcctccctgaggcctctagccaaacctcaaggaccctaacagtatataacagagaaggggaagcccggttgttcacattctccacccagaccatgttgcagaggggaggaagatggaggcagctggaaatgagtctgaagtctgagaagccagtgtgtttaagagagtcactctcatctcagtgaaggagagccgagggcagccattttgcagaaggctgctcattcaaagcctcctgcttagggagaggggattgcagcccccagcaaagctacaatcgactctgtgtggttattaatattatattatatctcaacagtggggatcagrtgagagctaagctattaagtgcatattaagctaaatggtgctggtgggattacttgtgacaactactggcattcattagaattctttatgattgatgataaatatgatgtgttaagacaggcatacaatcacgctwgtctagagtccattaagctcattcattcatgcacatgtgtattatttgtacattcattcgttcattcattcatcaaatgctcaatttatgcctacttcaggcaaggtctcacattagggagatgagggtgacactgggagatatggagatgaaacagaacatgctacctacctcctgaagggctcacaggctgctgagggacacaggtgaggaacagataacagagtagtgagaaattggagctttctgtgaaactggccctggggtggaatgggggttcctagggagatagtatgactcgtagacctggccaccgcagtcccctcctggaaggtgtgtgccgacccttctctgtactgactttccctggggagccacagctctgttggagaccacaagtttccccctgcctgcagaaccctctcctgacaggccttgacccagggggctggagtgcccaagcctctctacatccacttacctccaggggctgacttggacaggcttcctgctggccagccttcttcycccacagctggggccacttggctgcctcaccccaggccctaggacattcctgttttccatcagtgggatctagtgattcaggggacttagcatcccaacagcctggctgggaggtggcttgaatgctgtgctatgatcacagaaaagcgctgtctctaccatctagtactggggccctgcctgggttggtccatggtggaagcagttacaatcctgcccctgcaccctgtgcctgggtctctggcccctgcaccagacgtctgtgctgctggctgcctgctcttgtctccaggtccatgactgcccatgactggcctccattcaggtagtaggatgccatctttgcctcaacarcacagcagttctcaaactagggtgtgcatcagagacactagggggctggttaaaacacagggtgctgggcctcagcccagggtttctgattttgtaggtctggagtaggtctcgrgaatctgcatctctaataagtccccagatactgctgctgctggtccagaaaccacactttgagaaccactggcgtcatggataagcagacgggctatggagtttgaacccaggttgtctgggtccaaaacctggcccagccacttgctagctgtgtgacctaatccctctgcacctcaacctcctcatctataaaaacaaaggtaataagaacaccctcctcactgttactgtgagtattggatgacccagtccaggcaactcacttgcaatcgtgcttggacacagcacacagtaagtaagcattcagtgaatgtgtgagtttcctagggctgcggtaacaaacgaccacaaactgagtggcttaaaacagtagtaacttatccttgtccagttctggaggcgagaagtgtgaagtggaggtgtgtgggctgggtggcactcctcctggggctctagcagggaatccattccttgccactttcagcttctggtgactgccagcaatccttggcttgtgtccacttcattttaatctttgcctctgtggccacattgcctcttcctcttctgtctgtcaaaccccctccatgtgtcttataagaacacctgtcattggatctagtgcccacccagataatgcaggatgatctttttatctcaagatccttaacttaattacatctcaaagactctaaatgtaatgaacatatttagaaatgaggacatggacatatcttttctggcggtcaccactgaacccactttagggaacacaggctattatcattattaagttgttccttcagctcctgcagttgggcctggcctatagcttcctgcctgggggcrggggcggggaaggaggagtaagctgactcccaggttccagcttctggtcagctgcactttattcaagacaacccattttcaggctggggcagagaattctgcctattaagctatactggctatgttatagcatttcagcatgttcagatttcattgatctgagaaaaaaacgccaatcccagccccccagactcctgtctggagccctttgtccatgttaattgttcctcataccctggcaagttgtacttggcaaagcattttctcattcaaaactctactggatcctcactgcagtctcatgagaaagaytgtatcaccctattttgcagaagagaaaactgaggcccaggggaaaattgcacaaagctgcctttcatggcaattctaagcagtaatttatgggagagaaaagaaggctaatgtcactgataatactaactaccaccaccgctatgcttcattcatcgtgggcctttgcttggccctctgctcagtgttttatgtctattatctcaggtcattctcaaaactctctcctgaagtaggtagcattcctcttgcggatcgagaaactctggctcagagaagtgaagtatcttatccaaagttgcccatcttttaaatgcagagttgaggttgagtctttctccctaataccaggttgctcagagatccrtctcctagctctgaaaaaatgtcagggcagaccagaagagaayagtggctgcccagtggccagcaagactgtgggagaccccctctcgttgtcagcagagccccgctcctggtagctggtagggaggtgcccagtgttgatgcccccagccatagggagggagtcagggcaatgggaatagagaggcagatgggcccaaggtcactgagggctgggacaacaataagggtgtgcttcctggagtgggtcaggcttgggttgaagtgacattcctggagagcagcagagacagactcaatgcctcgcatcagacagatgagggcttaaaatctccagtctgggatttgatagctgggtgcccttgggcaagttatttaacttcccagtgcctcattccttcatctgtaaattgggaacaaaaagagtggggttgttgtgaagaagtcaggggctataattagcatcaactgggaagtttgtgcagcctccccatgcccaagccacacctgaaccagctcaatcaacatctttgggagtgaggcaagagcattagtagtttaaaaaaaaaaaaaaaaaagtctccccaggtgattctactgtgcagccagggttgagaaccaccgctatgcaagtaaagcacttcgtgcccaggacatagtaagggctccgtatacaggaactattgcccattcactcatgcacaaaacaaacatttattgagcacttacctatgccaggctctggattacatgccaggcatcacctgttcacagcagctgtctgaatttatttatgtactatttctagatagcttccaatagagggatcgtggaattcagtgctttgtgaagccaggaccccaagtccataattctagggagaaggttttactgacaacgaggaaaggagggaaatgcagaaaatgtacccaaatcagagaaaccaaaccctgtgtgtgggaagagcagtctgagctctctgagcccttaagggggtagcaggagaagacagtgtgggcttcagactttctgtgggctcctctgtaaatatctgcccctacaacaccccagcttccacagctgtgatgtggaagggctttcaatgattggtttgattgtttttagcctcagaactcttcattcaaatgagacttaatggaacccaaattattaaacaaatgaagtctgaattgcttgggtgtatgtatatgagtgtaggtgagtgtgtgtggatgtgggttagtgtgtgggacagggtctatgaataggttgtgagtgtgtgagtaggtaagtgtgtgcatgtgtcagtgtgtgagtttgtatgagtctagggtgagtgcgggtggaggtgcatgagtcggtgtatactggagtatataaacgtgtgtgtatttgtatatctatgtgttagtttgtgtggcgtgaaccttcgaaagtatgtgtatgagtgtgtgttatgagtatgtgaacctatgcgtgtgtatgagagagtggtaagaataacagatttgtactgtgtatttgtggatgtatccgtgtgtgcatgtgttcctgtgtgttagggggccaaggggcaggacttctgctaaggcctcctgtatcctcctccctttctcatccccagccctggaaaatactgcttgaaaccccctggtctatgtgtctacactggccctgccagcagtcctgtgtcgccttggaatgctgggcctgacggcttccaggagccatgggctgtagagcatccatgtccagcaggtcactgcatgctcccatcccatgcccctcacgtgcccctgacaggcccctttttctccgtgccattttccatgtgttttcctcccagagccctgagctgagccctccagagctgcctgccgggtgggggtgatgactcatttcagttgatgtcatcctcaggattcaaggctctcaatgcactcaaagagtctttgttccccaaatggaaaaggaaagtccgtacaccgagaagagctgacaacgaaactcttcccagatgcccatgggtgctcacgcctgcccgcacctgctggccttcactgtgccacctagtccacatggtccctggggtggctytgtgcccaggatccaggaaacagaggttgagggaagggggtaaaggaagggacgtaaagacccccactgcagcaagacagcaggaaccactgcttcttcctgagattggatatgctcttgcactgcggctaactgctgccaggactgaggggtccgcgtgtgtgcgcatgcacgtgggcatgtgtgaagggagcggtggtgagcagagctgggtcacaggataggggagtcaccccatgctctcagcagagccgggtcacaggatgggggagccaccccacgctctctctctctgggctgctctcctcagttccttatccgctgggcctgttcatcaattatgttgctaattctttcatggctagcaggtggttgtgaggctgaacggaggtgctgtactgacagcttgagagtgccccgccctggtcagcacccaacccaatgagcgaggactcccagtgtttaccaaatgctcactacacaccaggccctgtgcgaagtagggttctcactgtgttgtccgttctcacaatatctctgtgagccaggtcctagtgctgccccactttatagattaggaggctacagaggggcgaggtgatctgtggaaaggccatgagtggcagacccaggactaagcataggtctgtctgatgccaaagcccaggcagttagcccttacccgtggctgtcacttgagagtgggcatcagattgacgcaggcaagaccctgaaagactctgattccataggcccaagcaggaggggcagacctctgacttttaaaagctcccaggggtgactctgatatgtggctagggctgcaaacttcacaccagcctaccttacctagtcccatttgaatcttgactccaactgcttattaacctcatggatttggaacagtaatttaagcctcagttttctaacctgcaaatggggataataatatcatccatctcagaaagaatcaagtgtaaggatgactgatttgtggaaagccctttgaacagcacttggcatgcagcaagcctgcagaaaattttagctgctgatgctgttgtttcttgacattctgttcattcagagtcccctttgccaggctctgtgctggtgctgaggaccgagagatgagttggcatggtccatgcccagggcccatgtctaagcatatgagagcaaggtgaactggccactggactgcagacagatgagggtgtctgggaggaaggatggagggggactgagggaacacagaagtatgcagctgggcctgggagagccacaaggaaagcttgaaaggcaatgggctgtaacaggcagagcccagcttcacatcttcagtgctggctgctgcaccgaggattctgagtgagtgacttcctgtctctggggcttgactccctactctgcaaaatgagagaatgatccctgcgttgcctgcctcctggcagaaggaacgggtaagaggatgctttggaaacagaagaggatactggacaggtgaggattacttcctgctgggctaagtgcttttcagctgctggccaggaaaaccaagcttcagccaggaccccagctccaggcttcctcaaatcgtcttctccagtttaggtcagaggctcgagaaagcaagaacgagagaacaagagagcaagagagaaagagagagagggagagagagagagagagggaggagagcttatacagtaacttcattgaacaggaaaattcctatgctatatatgaaaaccggaaaagagaaggaggcgttctaagtttacatgtagaaaaatgctcttctgtaattcagaaaaatagggtctttgattgtggccgagccaggtctactttctaagttgatccaggattttttccctggcaaggaaacagttcttttttaagaaatgcatcgggtgataggtttttctaagaacctctcgcacctttgctgggtgcagataaaccctcaggcaccgtggattgtgttgtgttcattttcctcagaaagggagtcaggtggaaacgggagcccccagagactccagcctgggtggggctgagtttccacacaggcagagagctgtgacattttcctgagcacagtgctccttgcctctggccaggccttgctggctaaagacaaggaagtctgtggggagggctgggtttgtcccggcccctgttggagtcattccttccaggcctgaaggctgtggactgaaagaaccggcagttaggggcggttagaaaaactgaaacactggcgggagacaaggaggaggcagacgatgaggctgtcagacctggcaagggcctttggaaaatatttagtccaaggctctagtttgacagatattgaacctgaggctcagagaagggaagggactgctcaaagtcatatgccaagttggtggcagagtccaccttgcaggctgaggccctttccaccaccccatgcaacatctgagaggtcaggatgtagaagttgaggccgacttgtgtgtggtctcagaggggtagagagctaggcccagccaggtgggtgggagttgcaggggcggttgcctcagttcaacatgagaaaggacttccgaagacttcgaattgtgcagcaatggtcaggtggccgtgagtggagatgagcaggtggaagccaggtggctttggatgggtgagcattgtaggaagctcctccccaggtggtgagctgcactgtcccacacagtctgcggttgctgaactcctgtccctccagggaggtgggagaaagggaagtcacatgccagatgtgatttagacatacccagggtccttgggggccacctctctgtaggggtgtccaaagggaagggaaagaaccgtcccagaagatgcaagaaccccaccctcccaacttgctggcaggacaagctgacaaagggcaaggaggagggacacgtggcttctccgacggtctgccccccatgctgcaggcgcagaggagggggactgagcacctcctcttctccccagggactgagtgccaagaaactcaggtgagaggagcccttctggggtcccaagggcagtccccccaccttaccctacataccctcatcctactggtccagccccaggccacaggcagtatagggtcatctggaccccctcagccccggccccccagtgggaatacacccacccgcttgcaggagtcaccgtggccccgtttaagctgactgaagtgtgccgtcggtctttagaggcgtgtgtgggaatggtagaaacccaggaggggcaccttcagcctttcccagcactcggtgcagagaaacagcagaggagggaaaggaggcgttatgggttctaggcctggcttggccaaactcactgcatggcctcagacctgctctcttgggtcccttaacagacctttcgctttgagtctgttgttgggatcccggttcacagcgcaggtggaaagccttccttgcagttggtggaagcgcagttcccgtagagaccgccaggagccgctgccgcgcacggtcccggggcgtcctcagcctccctcgcgcctccgtccggacatatccgcagcgctccttcacctggagcgaggaacgctccttagcctcctctggctttaaatgctaactagcgctagcgctgggctcaggtcccagatgatcgtctgtgagagggagctttgcaaagccagctacagttctctagggaggcaaggctccaaagctcaggctagtcccgggcactgcttcaggaccccacagatggaaggactgatccagcccatcgcacggaaggggaaaccgaggcccagcggggtaggggaggtgccagatgatgtccctgagcctgtggcagagaggaggaggagaggtgagagttcgctcctgttcttcatctctggccaaatcgctgtcatctgtgtggaaggaaaacctgaaccctgctctgtttgtttcttcatggctgggattctgcctggtttccatggaaactggctttggacccttgggaggaaagtcgcaccctgccctgactgctcagattttcctctgcctcctctgtctctgaaaccgtctgatttctcctctctgcgccctgaggaggggccaccccaaaactgcacttaggagtctgaactagatttgagggagggaggctcaggttgtctctccctgtgtccgttccttcacagcatccccttggctctgtggatgtttagaggaggggggatgactttggccctttttgcagagtgagagtggggcccccgtgtgttggggtgcagctgagcctgactggaaagatttagatgtaagaagatggggaagagtgatgtcactagaaggaatagcatgagtgaaggcaaagacacggggggagaatgaggagatgaagcagagggtgtctcgagtagaattttgcttttatgctgaaggcactggggagccattgaaggctttggagcttgtaataggagcagatgactactaatggtcacctagatagtgagctgcttgagcacacatgttccaggcttagctccatgtctccagcactacacaaggcacaatgtgggagctttagaaatatgatcaaattcatgaattggaaaagtaagttgaaaacccccattggaaatgaagctatctctaagcattaatgaagtgagagaataagaccggtcagatgcagccccaggaagtgtttgaaggcagtgaaaatacatagaataaatcacagtggatgtggctctgagagtctatctggtctaactctctgatgggaaaactgagatcagggagggggactagctggcccaaggtcacagacagagtcttgaacctgagtccttcctcccctccctgggtctctcattgccccatggattcatgcctcccagatgggctctctgggccagtggatccagcatcgtggagatgggagggaacgtggactttcaggtgatggatgggcatgcagtgaggtcactgttggatgtcagactggagcccgacctcagtgactctcaccagggcctcagactgtgagcctggcaccttcaattcaggaatgcctaggatttagttcagccagcaaacacttcctgaggacctgctcagggacagagcctgggtgtgggggagacagggagaagtggacgccagttcctacacttaaggaggttccaagatggtagggtccaacaccttagtcatataatgccatatatgctacatagagtcagggccaagtgcaggagcgggaatgcccagactacctggtgggggaatccaagaagacttcatggaggaggtgatgacattgaagttgggccctgagatgtgtggagcagttcctcaagtggagggaacagcatacacaaaggctcaagggtgtaaaatgtaggacccattcaggataccttgagttttccagtatgacaattgcatgggaaatagcagggtaataataatagggaaagaaatggcagctaccatttattaagcactctgtgtgctaagcagtgtgctaaacattttaggtatattattttatttaagtcacacaactgtcctctgagagaagtattattatctggggataagtgtgggccgcttccaagaatcctcaggctgcagagttccatcagcatgctccacgccagtccccagtcccctccaaaatggtgggatgtcttcccaccagctgtgatctccaccctcctcccttcttgcccagcacagagccatccaaggtcaagcccatggacccagttgctgggcctgtttgtcttggctccctggcttctcctcccctccctggtggctgcctaaacaggtggccctcctgctggaggccaaagggaaatgagccagcaggcccaggcgcagccgcgagtgagcatgggtcactccaggtcaggggtcgtcccctaccacgccatgccatgggacagtggatgtggaaggatgtggtgggggttgctgagagcagagctgggctgctggggctgacttgggcttgctctacattcatggctggcctccctcttggcggactctgtggaaacaaggcctgcgggccagcgcctatccatgtgtcctgtcttgaatggctgaggtctagggggatggagggtgggagggttaggaagggatcttttttgcagactttggtttttgttaagcttataccttgcatttcccatctgtcgtctcattgaatccccacatgggaagtgggcagggacctcccctgatcaccaggaagtcatcgcccaaaggctttgtgtttggtaaagggcaaaggaggggtctcatcccagctgtgtccaaggaagaggatgttctccactgcaggctgcctcctttgccccctctccagctgaccaaccattggccaggacctggagtggtcggggctgtgggagggcaccagctctgggactcgtggtaccaagactctgtccacccttgcttggctgccccatctgttgcttcctggctgtgcctcctggccatggaagtctccctgaacatcaatttccctgtctagaaaacaaggatgttggatagattcatgaatttttgtttttaagcagactcctaggcataagaattcccagaattgccacatgcaagcctggatctactggccatgggaagcactaggctggtttaagcaatgagctttctgagtgggagcctctcaggcccttctccctgtgtcscctgaacgcttaacctggccctggatccctcagagacaccacttggaaacaagccacaggatgtgaagctctggtgcttttactctctgtggcaccaggaattttccgagcagaaagaggcttccccctcctgttcccagcaggaaagagagaggaaatagaggaaaagctttttactggattggataagcgaagaagaaagcagagctctcagtagggtgtttgtggttttgttttgtttttgtctttaaaccgtggaggaaagaaaagaaatctcagtgggatgtgtggttttctttgtttcttttccttctttttttctttctttctgtacaaagataagctgtatctgagtgaggaaaagcaagaagaataggttttatgatttctataagtggatgcaaggagataatctctttaaaaatatgtagatgtctttacttttcataccatgtatatgctgtaaaatagaaaaaagtataaaaagatatccagtgaaaagcaagtctcccagcccccagccaccagcttccttccctggagacaaccactgccccgtttcttgtgtattcttctagagctattgtaatataccatatatatttaaatatatatggtatatttaatttgtattagtacatacatttccaactgatagcaattcacttctgcaccttattttgtctgtttttatatagtacatcttgattgtttcatattagtacttaaggaatcacatcttttgaaacgctgccttggatttcgttgtgtgaacctgtcatcatttattatattaatcattcccaaagatgggaattttaggtaaatttaaaccacgatgctgtgaatatttgtgtatgtactttatatttcacatatgtaactttatctgttaaaaaattcatagacgtatgactgctgggtcaacaagtacatgcacatttgccattttgataaatgttattaaattgcctcccaccacgttataacaatttatgctcctgccagtaacgcaggagaaggcctgctgccttaaacccttgccaacacagcgtattctggtctttgccaatctgatagggaaaatggtatcccttcgtaatcttaactcattctatcattatgaatgaggttgagtatttttcatatgtttaagattttaatttcttttactgtgtctagaattttctattctttgcccatttttcttttgggtattcatttactttgcatattagagaaatgagtttgttgctgtgatttttgtagcaaatatcagtcatttcatggttttggggttttctttgacattgcagggattatctttattattattattattatttattagttctatgcagaacatttttttctaagtggtcaaatttaaccaaatttaccaatcttttaactaaaattaatttctgttttaaagcaagttgtaaactggagaggataagcattcaattgagaatcaaatctgagttcatggccagcaaacacttcctctctattaaccttagtttagtgttttctaaaatgaggtgattggaggctgagcgcaggggctcacacctgtaatcccagcattttgggaggccgaggcaggagaatcactgattccaggagctcgagaccaacgtaggcaatatagcgagaccctgtctctacaaaaaaatgaaaaaattagctgagtgtgatgctgcatgcctgtagccccagacatttgggaggctgagaggtggaagggtcatttaagcctgggaggtggaggctgcagtgagctgtgatcatgccactgcattcccacctgggcaacagagcaagactcttgtctcaaaaaaaaaaaaagaggggacttgagaatatgtacacattcattcatttgttcattcattcactataagccctgggttggttactgggaagacagatggcccagtgggaagagaggcaagtgacccaatagtgacatgcaggggctatgatggaggaccccgtgtgtacagagaggacttctaatgcagcccccagaggggagggtgtgggtgcgggaggtgaagcgagatttcaggggaagcgaggcctgggctgatgagcaggagtcattcagtgaaaataactgggctgggctggggcagatggcacagaggaaagcattcctggcaggggtgggagtccctgggacagcatggggcacgcyggggctgtgtcaggcatgtcagggagtagggagtgcagctgggtcctgaccacagagggcctcttgagccaggtggcagcagcctggtcagccctggccctgagggccatgaaaaatcctatttcatagaaggcttctaagcaggatagcaacaggatcagatgtgctcttttgtcgaggaggggttaatcgttttcataaaaattgtatgaaatattttccatgaaatttgctataaagaaaaatacaatgaatatttcttttgaataccacctgaacaattaacactatcactaccgttgaaaagccccgtggacctctcccaaattgcatctctctgcctcccctaaatgttggcaagaatatgctgctggtgggtctgcgacatgcatgacacggttgcttcagagaacaattttgcaatattcagggaagctgtaggtgcacatacccatattatccaataattccacttccagctgtggaattacctgcacaggtaagcaggargagatgtgtataagggagyccgtggcagtatcatttgtaatattgatggaaacctcaccttccaccaacagaaatgtgaatcaacccattgtagcttatttataccatagagtactgttgtgaaaatataaggccaggccaggcgcggtggctcattcacgcctgtaatcccagcactttgggaggtcaaggtgggcggatcacctgaggtcaggagttcgagactagcctggccaacatggcgaaaccccgtctctactaaaagtacaaaaattagccaggcatggtggtgggcacctgaatcccagctactcaggaggctgaggcaagagaatcgcttgaacccaggagtcagagggtgcagtgagccgagattgtgccactgcactccagcctggtcaacaagagcgagactctgtctcaaaaaaaaagaaaagaaaatataagatcagagccacatgtatcaacagggataaatctaaaaaatacaatgctgagtgaaaaataaaagcaagtttcagaagaatgtgtgcatcatgccaccatttatatgaggtgtagaacacacaccatggttctacattctgttagaaacacgtatcgagtggacatacaaatgcgtgggagtgataaacaccaaattcacaagaatggctcctgccagagcatgggcagaggaaaaggactgaagagagttcatgggagcttcagctgaattgatactgtctttcttacgtggagtggtgggcacatacttgttcctcataatattataattattttttttagagacaggtctcactctgccacccaggctggagtgcagtggggtgatcatagctcactgtagcctcaaactcctaggcgcaagtgatcctcctggcccaacttccagagtagtagattacaggcacgcactaccacattctgctaatttttaaattttttgtagagatggtctctctgtgttgcccaggctggtctcaaactcctggcctcaagcaattttcctaccttggcctcctaaaacactggaattacaggcatgagccaccataccaggccctattttaaaattttaaaaaatgatatatakagagagagatagggtatttctttgttgcccaggctgaagtgcagtggcatgatcgtatttcattgcagcctcaaactcttgggttcaagtgattctatcacctcagcctcccgaatagctgggactacaggcacacatgaccacacccattaatgtataatgtattttatttatccattgtttttcaaaatgatttcaacatataatcaatataaatagtattgagatatttttccaagcaaagtctttgaaatttagtttgtagtttacatttatgacacatctcagttgggaagacccatttttcaagtgctcaatagccatatgtggctactggttatcaaatcagacagggcagggtctggtacgatagaaacttagaggtcaccagttacaacctgatacaactttatcaacagatagagttgtgtcaggtgacctctgcggttcttttctaaaccagcaagtctagatgacagtgatgacgatgatgatgatgatgatggctgccttttttctttttttttttagacagggtctcgctctgtcacccaggctggagtgcagtggcatgatcatggctcactgcagccttgatcacctgggctcaagcaatcctgccacctcaacctcctgggtagcggggactacaggtgcacaccacctggcttttttgttgttttgtggagatgaggtctcactatgttgcccaggctggccttgaactcctgggctcaagtgatctgcactccttggcctcccaaagtgttgggattacagttgtgagccacagtgtgtccagccatgatatccaccactttttaggcatttggcatgtgccagcactttgtattatgtcctttaatcctcacaacaacgctataggctaattactcgctttttttaaaattgtggttaagcatacatagcataaaatttggtattttaaccatttaacaaccaagtgtctcatattgttctttatactgtatttttttgtgtaacctagatattccataataattgaggttagtactggcggtgagcagccttctctgtgagtgttgcggagttgagatgggggcatggcagtcagggcatctccctctcccagccactaagtatacatacccattcatgggaagtttgagttcctggaccacctggagtcttgactccatccttcttgctgctgaagggtcattgatatagtaggcagactargtggagccccacccgcaaccccggtacagactcccccatctcagtgaggctgcagcagtgaatcagccagaaatcacaccagccatggctcgaaaatgtcctgccacttaccagctgcataacctcgggccagtcatctcatcttcccaagggataagagcagttaattgccagggctgctgtgaggactgagtaaaactatgcatgaaaaccacattgttattattctttataagggagctcaagggcacagaggcaggctcccatgtcagcctcactttcctggtcagtgctgcaggcgtgattatccctgcgcattgacctcttgagattgttcagtggatataataaaaataaagaatagcgaatgtttgttgcactgctaccattattaaccaggggtttccgtggacggtctcatttagtcattcttttggagcccattctagtgcctgtatgatagaggaagacactcagacttggagtggttcagtgactcactggagttcacacagctacgtagttgtgtccaataagatggtggcaagttgggtaaactggaaatcaggctgattcctcaggtagggctttccttagagggtctctcgagtgtttggggttttctctggagacaaacccgccaagtcctcagaaaccacttaggttctcagtggcctctggcctttggcgatagcccagacagccatcaatcagtctgccttgccctctggcctccagaggaggacactgctcgattctgatcctcactcattccaggcctcctcatctggttgaatcctcaggatccggcttcacttccaaggccaaagggtgttacttgtccattgtcctggctacagtggtcttgtccccctctccctgggacttgccttcctgtctcactactggtaccttggatgtcaactcagaagtgggtgcatgttgctgcaagctagtctgcagctttctcctggggaaaatacttggatgggccaacattctggagcctgggggccttttcaggacaccataatggagctccaccatttctccctgcaaggtgtggtggcatagcctctggggtcagatgctctgggtttgaaacctgcatgcaacttaccttgagcaaatttgttaatttctctaagcctcagttttctcagaagtaagatggggataagagtacctaacctcataggtttgttgtgaggattacatgagctaatgtatgcagagcgcttagagcagggcctggtgcagacagagcttagggaatgtggatgatgatggcggtgatgtcaaaggcgatgacaatgacgcaaatttcaattgccttgaggcctgggaacacttcactgtgtccctgattttccctgcacactcagaggcacttaaacaatagacctcattcaaaacaaaacaaacctatccagtttttttgtttttgtttttttgagatggactctccctctgtcactgaggctggagtgctgtggtgcgatctcagctcactgcaaccaccacctccggggttcaagtgattctgctgcctcagtctcccaagtagctgagattgcaggcatgtgccagcatgcctggataatttttgtatttttagtagagacgaggtttcaccatgttggccatgttatcctcgaactcctgacctcaagtgatccacccacctgggcctcccaaaatgctgggattttaggcgtgagccaccatacctggcccctattcagttttatagtggggaaaaaaaaaatctccaagtcgatgggtgaacattatatattctagggattactcataagtgttttccaaacgcaggtcatgaactattagtgggttataaaatcaatttagtaattaattaccagcatgtttttaataaaatgaagcagaaaaagaataattaaatgaaaagaaaaatatttgagtgcctggtgagtattaaatcatgttctatgaaacttctgtttcagtgttacagatatctgtctacacgtgtgtatattgggttgcagtgcaaatgcatttctttttgtgggtcgttgtcaaaacgtttgaaaaacaaccatttaggaactacagtttcagtggggttcctgagtgatcccgtttcatttgtgactgcgtttcttcctcattttcaagcaaagtggaatatacctgtaaagcgtggcctctctctccctccctgcagagactgcttcccagggtcacctggacctcacgcagctcatcggtgwcccgctgccctcgtccgtatcctttgtcacaggctatggtggcttcccggcctacagtttcgggcctggtgccaatgttggccgcccagccaggactctcatcccatccaccttcttcagggacttcgccatcagcgtcgtggtgaagcccagcagcacccgtggtggcgtgctcttcgccatcactgacgccttccagaaggtcatctacctgggcctgcggctctcaggtgtggaggacggccaccagcggatcatcctctactacacggagccaggctcccatgtgtcccaagaggctgctgccttctcggtgcctgtgatgacccacaggtggaaccncttcgccatgattgtccagggtgaggaagtgaccctcctcgtgaactgtgaggagcacagccgcatccccttccagcggtcctcccaggctttggcttttgagtccagcrctggaatcttcntgggcaatgcaggagctacagggctcgagagattcactgtgagttaaagtcccactccaggtagatcagggaggtggatgaacagactcgccatgcaataaatggagcaactattattgttattattttattcttatgtcctcaaagaagcatgcgtgttatgatgggaaataacactaggcctggaaccccaaaacctagatttccatcctcagttttcaacttaccttgtaaatttgagacagttatccagattctctgatcctctctgtgtttccttatctgtaagtggagataagaaaacctaccccacagtcttgtaggtcaaataagataatctgtgtgaaagcactttgtacgttttaagattttatataaaagagcaaggtttgttatagccctaaatggtttgatctttggatatgggtgacaattgcacgtaagtaatttctgaaaaggtgggatacactagaataccagagtgagaggtagcttttcccgccttctaggcaatgtgcacttaaaaaaaatttaaactgactttactatcaaaatgggcttttatgaataaggcattctaaagatcactaagttattgtagttactcatttagtcagcacacgtatttactgatgtctcgttggtgaacaggacagcaccacggggtggagtttgggtttatctggagtagagtgaaagacattggagaatgttaagaagttaaaacacaaagggcaatttttaaatgctcactttaggagcctcatggagaggaagctgtcaggtgtggggagaggggaggagagtggaggcagggaggctgtggtagcccttcttgggacgaggccttcaaactcagaagcattgagctgcaggggaaagagctttctgggagagggagatgtgcgtttcagggcctgccgctgacaagctggggacctggagacaggaggctgctgtggtgtgcacacttgaacacaatgctccccaagggcctctctggcccaggggtcagtatgatactggcccaaggagagtccccccataactgagagtgggccaagaggtggcctggcttcgtggttgagactgcaggctgtacatcctcattcccacgcttttacctgttcgtctccattgcmaaaacmatcatgtcttccactggcagtcatgctgtgtacgtgcaaaccgtggcttctgatccgtctcttttccccagggctccctccagcagctcaccgtgcaccccgaccccaggactcccgaggagctgtgtgaccctgaagagtcctcggtgagctcccctactatcccacagtgggccctgcaaccccagcagccgcagcctggggagggctggatgcccagacagtggcgtggagtttctgaaacctctcattttggcaactgctgcctcaagtcctattttgggcttttggcgtgatttcactttttaaagagcatcagccatctctggtgtggggagctgtgtttcttataaggtgtcaggatcttccatggctgtggccgtcaatggcctgctttcccgccttcttgccaagaaatggtgtcaagattctaaaatcwaagttaaaactgagatattctgggagtaaattcctataaaaaacgatcctcaacttagcttttatgcttggcaaatgagttcgttcctaagctggggatggagtggtgggcaggaaaaaaaagatgactccttcttccctccctctaaggattgactgagcacctgctgggtgccagccctgggtaggtgctggagataaaggaataactgggaactgtttaataagctgctcatatgcacttccatacccaaatacagtggcagagctgagtgtgatgggaaaagggggagatcctcaaacccaaactcaacgtgtcaggtgggagcaggagaggaaagaggaggaacttgaagccagttagggagcaggtgatgcctgaccaatgacaagggtgaggcctcccagggagaaggggtccaggatgcagtcagaggtgagcagaaggtagcgcattcctgcaattcctgttgccttttgggtggcatcaacgtcacaacagaacataaattgattttgttaactttgtaaaaaacaaaatgctgtcgatttcgttggaaagcccctgagaggtggaatttgggcctgtgagaatgcctgtgttccatgagccagtggtcccagcctgacagtcatgtgatgctgatcagtgtagtcacgcgttagtctctgcattgccattaatactgaaaaagtagaaacaacccaagggtccaagaacaagggattggttacaaaatcacagcactcgggctccttgtctgcctttaggaggctaattagaaagattaggtaatgccaggaagtcatgcttcggctgtaattgttcccagcgcaagattccaatgacagcctcacaaaggttgggagagtggtggggacctggatcgaatgaaagtagatatgttagagagagtgagaaatcattgtgtattctgttagagcaataaaatgtggaaagaaataaaatgaacaaccaggctgggcgcagtagctcacgcctgtaatcccagcactttgggaggccgaggtgggtggatcacttgcggtcaggagttggagaccagcctggccaacatggtgaaaccccatctctacaaaaaatacaaaaattagccyggcgtggtggcgtgtgcttgtaatcccagctactcgtgaggctgmggcaggagaatcgtttgaacccaggaggcagagtttgcagtgagctgagatcgcaccactgcactccagcatgggtgacagagtaagagagaacctgtctcaaaaaaataaaaaaataaaaataaataaataaaacaaataaccaaccatgcacactgcacacacgctgtctccttaaccccactccgtctctcatagacacacacacacacacacacacacacacacacacacacacacggtttccctgtaggagagtcggtttgtcagtttctgtaactttcccagtcatccaactcttatgggccctgcccgctctgcccggtgtgtggcacagtttgtctccacacaggcatctggagagaccagtgggctgcaggaggcagacggagtagctgagatcttagaagccgtcacctacactcaagcctcggtgagtactgggatgctgtgccatgtgatcttgctcagcttttagcaggctgagaattactagaggrggcccagagtcctgggtctgacctctttgtttccagacctgtgagcttaatcgttgactcatctgggggggtcaggaaaataatggccaatgggcactttgcaaaatcccctggtgaaccgcaacaccagcttcctcagtgccaccctgtgtgtggccatcagagggctgtcaagggcaaacgctgtgctgtattgctttggagccttgggtaaaaagcctgtggccttaggtaacttactcaaccattctgaacctcaactcctcttccaagaatggtgattctaatagccctatctcatagggttgtttccagggttagatgatgaagtgcagggacaagcctcagcccagcatctggcatgagggaaatggccctgaacgatggctcttgttatatttgctcagtgctccagctgtgaaagcacagtcaggaccccagtcttgtgagtcacagagtcctccagggagctcacttctgaygcatgggaaaggcaatcctaacttccagtggcctggacctcctccctcctgggaatgctccctgtggctgagacatggaagtggttttgaaagcactgagtcagactgtggggacacccaggagcctgtttttaatgaaaacagcaagcagcagcagagtcactaaatacagcagagcttcagccgtctccttgcctggtcrggctactttgtaaacgtatctctaatagaagaaatcagggagatggaaattaggcagtggctggagattacagaccttgggcagcagggctgtgcatgcagcagagctgtggatgcagcagaatagaactagactctgttagcactggaaggacccaaagtcctgtacatctctttctgtacagaggtgtacrgaaaactgccctttgtgtacaaactgagcaaaccaaggcccagataggggaagacactgactgaagggtgtatgggccggactggggtaacagcatgagtctcctgatgcccatccatggggtcatggcctgagtggtattgcaaaagtccatcccaaggatggcggccaactcttggccagttgggatgaatgaagtcaagggtccaagttgcctgcctacctggtgattggggagggcaactgctttgggtggtgtggctatcctgtgtgcccatcagcccttggccatcccacaggcatgtcccaacctggggcagtaggacacagagtggccttcacatctgatgctgccctgtgcaccagttcacaattcacagcgaagccaactcaggcaaaggtgccaacagcccaaggttgcccttagagagggacaggaaaggagagtggagtttgagcctgagatgatcacaggggacagragtagggcagagaagcttgggagggggcaccagagctgggcagctttggacagagatagagaagtgggaggggaaggaagagaactggcatttcttgataccactgtgtacctggtgctattgtgtctggaattggtgggttcttggtctcacygacttcaagaatgaaaccacggaccctcgcggtgagtgttacagttcttaaaggtagtgtgtctggagtttgttccttctgatatttggatgtgttcagagtttcttccttctggtgggttcctggtctcgctgtcttcaagagtaaagctgcagaccttcgcggtgagtgttacaactcttagggcagtgcctctggagttgtttgttcctcccggtgggttcatggtcttgctggcctcaggagtgaagctgcagacccaccccatgagtgttacagctcataaagtcagtgcggacccaaagacactaacagcgatatttattgcaaagagcaaaagaacaaagcttccacaatgggaaaaggacctcaccaagttgccgctgctcrctcaggcagcctgcttttgttcccttatctgaccccccccacatcctgctgattggcccattttacagagagctaattggtccactttacagagagctgattggtccgttttacagagagctgattggtccattttgacagggtgctcattggtgcgtttacaatccctgagctagacacagagtgctgattggtgcatttacaatcctctagctagacacaaaagttctccaagtccccactagattagctagacacagagcactgattggtgcatttacaaaccttgagctagatacagagtgctgattggtgcatttataatcctctagctagacataaaagttctccaagtccccactagattagctagacacagagcactaattggtgcgtttacaaaccttgagctagatacagagtgccgattgatgcatttacaatcctctagctagacataaaagttctccaagtccccactagattagctagacacagagaactaattggtgcgtttacaaaccttgagctagacacagagtgttgattggtgtgtttacaaaccttgagctagacacagagtgttgattggtgtgtttacaaaccttgagctagacacaagagtgctgattggtgtatttacaatcctttagctagacataaaagttctccaagtccccactagattagctagacacagagcactgattggtgcatttacaaaccttgagctagacacagggtgctgattggtgtgtttacaatcctttagctagacataaaagttctccaagtccccacccaactcaggagtccagctggcttcgcctagtggatcccgcacgagggcagcaggtggagcggcctgccaktcccacgctgcctcctcagcccttggatggtcgatgggaacagccgccgcagagcagggggyggtccccgtcagggaggcttgggccatgtgggagcccactgccagggggctcgggcatggcaggctgcaggtcccaagccctgccctgcgggaaggcggctgaggcccagtgagaattcgagagcagtgcgggccggtcggcagtgctgggggacccggcacaccctctgcagctgctggcctgggtgctaagcccctcactgcccagggtyggtggcaccggctggccgcttagagtgcggggcccgccgagcccacgcctacttggaactctcactggcccgcaagcgctgcacgcagccctggttcctgcccacacgtctctctccacacctccccacaagcagagggagccggcttcagcctctgccaacccagagaggggctcccacagtgcagtsgtgggctgaagggctcctcaggygtggccagagtggacgccaaggccgaggaggcactgagggcgagcgagggccgccagcacgttgtcaattctcgctattgtatgcatgatttcacttttgtttcttgccaccctgcaaggtaggtggcatcagccccattgtgcagattcaaaaatgaatgcccaggaggtggggtgcctcttccagggtcacagggtagtgaagtcaggactcaagccaggcctcactccccaggcttggaccctccccaggaccatggcactgcaggcactggggcagatgtggggcacgtgtcagccaaggggggctatgaaatcaatccccagactatctggaaaagtgaaaaagaaaaagttgttggtgatttgatggacttggtggcctctggggaacctctaacactttctttccatgcttccccaacccaacttttctcagtggttttatgggaactggtgcatatcagagttccaccaagcgtgaatcccagctctgccacttactagctcttgaccttgagcaagtgacttaagctctccaaggctcagtttcctccttggttacaatagagtggacctgcctcatagggtcagtgtgaaaattagacaaattgccctgtgcaaaatgcttggacagtgcctgttgttgctactgttgaccagtgggtttgttgtgaggattaagggaggtgatgtgatgtgtcagagagcagctcagtgctggactcagcaccgggcatagtacagatgcctcgttcctcttggggcctcctggttggccagtggcttgggctgacaggcatgccaaacccctgtggctgccttcagttattaaggggattgccctgggctgtgcctcgaggcctgatggtcctgaccttaacctgtctgttcctgatcatcagaatgccttccctgtgcacccgtctgtctgcaccacagttcacgctcttccacatgcttccatttcctttagtctcatttgcagggaggtgtttggggtctcttctacataggagggcactgaggccatggagatggttgctggaggcacccagcctggaggtggcagagccaggtctccagctcagggtccagagtgcactcagtcatgccacccctgagctggggacttcccccttttaacatctcctggaagggctttatggcattttccggcagccaccctctaggacggggaatttccctcttcagctcagacagtccccgcccgccccttgtctgtctaacttctttcttggaatgaatctcacttccccatcctcagcctttccagcctgccaccctttgagacatgagccgtcgccagtgaactgaattgcagactttctgagtggtcagggactacaaagtctgcccctccttgccttcttccccatttaggattggggtccttgctatccaattctttgcattttcagaaagttctatgctgttggaattaacatccctgtggttctcagccctggctgtgcatcagggtcatttgtgtgtaagtgtgtgttgggggtgggggtggcatggggggttggggaggcactgtgttggggggattggtctttaaaagcagattcttgcctgggctgtagacctggatgttcagcttcagtagatctggagtgaaagatcctagaatctgtattgacaaaaagctctgcaggtgattctggtcctcagccagggcctctttcccaaccacacccagatgctcacagttctctggacagaccragcactttctcccctccatggcgccttagttcctgcggttctgtttgcctggagggcccctcccagctcccatttctgcctggcaagttcctacttagccttcaggatccagtccacatcctctccttggaggccattatttagctaagccccctcctcgcacttggctctcactcacgccatcccatgcatcactccgaatcatggtttgttgcgtctggtctaggtctggggatcctccatcacctgacagcttgaggacagacacgctgtcttagttattcatttctgtgtccccagggctcagccaaggacctagcacacggtagggcctctggaaatatgtgcagaatgagtaaatctgattgtgtggacgtgagcctggactcagcaaattgcaacacttttaatagcaagtcttcagacttgaggttcctattttgtcacaggccacactggatccccattcacattgacctctgaaaaccaaagccacctatttgaggcaggtccccttaccctcactcctgagggtcaattcaccagaaccatgccctgtccttgcaggggggttgggatgccttgttgggagtttgacaacttcagccaccctgagttacagagctcagcccccatctcgttgtcttcctatgtttcctgaaccctcacctgccctgcccgcctcatcccaaagtccaaatgccttatagagcacctttgctaccagccaccagcagcctcactccagactagagatgagcattcaggggcttgagcattggttcctgaacaagtgatggagtggcttctgccttgatccctcacagggagaggagaggaacctcctgggcaggggtctttatcttccctgctagatgaacatccatctgggtgaaatggagacatcccacctggtcttgttcacaacctcccctggggaggtgcctgctgtctgctcccactgctgccctggttcctgtcttgtggacttctttactgccaccccccagtcacctggcgtaagcctcagctcccctagtccatgatcacactgccaccagcgaggactctctaaaacacacagctgcccccaccactccctctcccgatgctccccagtggctgcctgtggcccttgggttcaagcccattcttctccccacagaaccagctcctccctctgcctgcctccctgggctctgttccactgcttccctcctcaagccctgggctcttgccaagctcaagttgccaggccctgactttcatcaaccctccacccctgtgttctgaaaccctgctcattctccaaggcccaactccttaaagcctttcctcccacctccaccctgaagattttacagtacaatagaatccatggtgattgtctctgggtgttaggactcaaggtgatttctctttttgctcatctgtacttacagtgttttcaataacaaatatggaatatttatgtactaaatataaaggtgtgcttagcccttccatgcattttctatttcctgccttcaagtagttctttattgtcctcatttttacagaggaggaagctgaggttcagtgaagctccatgacttgcccaacataactaagcttataagtggagagctgggatttgatccaggtctgactgtaagaaatgaactattaaattctaaatgatggggcttccaagaatcctccttgttccatggaccagaaattttttgatttactagattctgaattaaggaaataaccttctgttattagtcaggaaaggtaagtgatgctgcagtaacaaattaacctcaaaaatcttagtgccttacaaaacaaagattggtttcttgttcataccacgagttcaacactgattcacaggattcttccatgcacccccagcccctttagcttagaaagtgatgaggctatctgaatgctgacaagcgctgggtcccgcgagctgctgcttgggtccaggggtgatgctgtgacttttggagcccatgctaggatttctgcgtagatcactgaagcactctgtgtttctgttggggttttgtttgtttgcttttctctagttggtaatgttggttaagacactgactggctttggaaaagctatatagatgctgaagtttcctcggaaggaaccacacccgtctttcattttcataggtgttttcatatctggcattgaatttatatgcagtttattgagtgcagcctggttcattcatttgttcactaattcattcaatcattccctcctctaacagatctttactgggcacctcctctggctgacctgggatttgggaatcacagaaatgtggtccctgtgctcagagagctttggctgagatgaatagtctcactgtcaagtgaacagaatctaatgacctctagtaggcacctctttcaggccctgggaggtgcagccattgcccaggtagacaccaagtggggccaagctttccccttggtttattcagcatcttgtggatatattattttcttcagtgatattctctgtcatttcttctgctttactgccaagtaaatcattttgcatctcatttttcctcccttcagcccaaagaagcaaaagttgaacccataaacacacctccaactccatcctccccctttgaagacatggaactttctggtgaacctgtacccgaggggaccctggaaaccaccaacatgagcatcatccagcacagcagccccaaacaaggcaagtccrgatgcacatgcctaygtagtggccttttattgggtgattactatgtgtccagccgrggycatgtatgtaacatacagaatctcatttaaccttcccctcaaccctttaagaaagggtgagaaccaccctcattttacagacaagaggaggaaattgagccacagagaagttaagtaacccagccaggagcaaacagcttgtgaatggcagagctggcatttgagctcagatagcagatcttctaacccccagatctggagcttctaactcccagattctattccttctggggtttaacagaaaagtttgtaataatccttgctctttgttgaatacctacagtgtgccaagtgtttggatattttgtctccaacaccgacagcataccgcctactcagtagcactagccactattttataggkggaaaaaccaacacttggaagagctaagtccagagtccccacccattctgacttttgccacaaactccccaactctcagaggatcagctaaactcctgtgtggcacaagtgagaaactgatggccagagaggggccagttacccagcaaggcagcagcagtccctaggagaagagctggtcccctggctgcccatccagggctctggcccctgcctcttgtccccctaccygtgcagaggagcactggtaaaagcccaggcgtcaaacactatcccccaggcactagcttggcatatgcccaagccctgagatcgcttgtggtttctgtcatttctcagaggggccgtcacttcagactgaagatgtaagtacaagatcattcctggcagcactgttcttaggaacaaaaataacccaaactgcccacagtagggattggtcggccaaattctatttcattcatacatacagccctgacactggtgatacagaagatttaatgacccagggacatgctcgtggtatattccaccaaaaaagcaaattccaaaattatgtctatgaccctaattttgaatatatgttatttatatctatttacatatagctatgtagagcgatgtgtgtgtattagatacatcacatattagacgtaatattcatcaaaatgttataagcagttatctctgagtggtaggattatggatggtttttactttttttattgtacttccgtattttattaatacaagtcttctacrataatacatatcactattctttttgcttctgccatcagttaatgagtgttattttaacaactaaatttggggagtctgtgggtcagagaaagtatagagaactggagagaaaaaattgtaggataatttaataacgtcatgacagagccaaggaggcagggtgttgctgtggaaatactgcccgctggggagagtcagacagcttggaaggaggccctgcctagccccctatttgctgtcggcctggggcaagttgctgatcagtttccaagcttcagattccttagccgtcctctgggagcatgaacaatccccgatgctgggtggatgagagggctgaatctggccgcagttgtggaagtggcttctgaattgcgaatgcttttctcaggggtggaattaggatctctcagcaaggggttaaggtgaaggggctggggcgagggctttcctagactgagaagatgaggtccacgtggggactgggctctgatcccaacgcagctcgcctgttcccgggatcagccacactccttatctagcagacaaaaggtcagttgaaagcaayggagctagccaaagtgtccttttcttcttgatgtgtagacagcccggatggtgggagaaagccctggctaagcaaagcccctaatatttgcattcagagcttccctgacaccatcktgacccgtggaaggggccaccccacctccttcttcccaggggtcagtccttggaggacaggcaatcggctgcttgcacggcaccccctggtggtcagagcagggaagacgagagtgctcgacccgtgctggccactcttccatcacaggatgggacaggagtgggtggggaggggggcagagtcctttggaggatttggcacctcttccagagttattgtgaccatgggacctgcgtgagcacagcgtgtgtgggaagggcctggcccggggacaggctgacctggcttcagggcccttcccagtctcagtctcattcccagggttaataatactgaggtattgatgtgtggatccggcaggtcacacctgtcatggggtgatagtgggatccccaaccaggatctgcccacctgcaggaaggtggtgggaggggtcccggtgggcaggacaggtgggccagcaggagggttgctggagggagtgcatgggacaatcttggcatgggcccagccataacaggcgtgcagtcatggtagtacaacttctttttcttcttcttcttcttctttttttttttttttagacagggtcttgctctgtcacccaggctggagcacagtggcacaatcatggctcactgcagccttgacctcccaggcatgagctccctccttaggctcctgagcagctgggtctacagccacatgccacaatgcctggctatttttttttatttttagtagagatggggtctcgctatgttgccaagactggtcatgaactcctgagctcaaatgatcctcctgccttggcctcccaaaatactgggattacaggcatgagccaccatgcccggccaatgaataagttttctttgcttcaaaaatccatttgcgtttttttttttttttgagatggaatctcactctgtcacccaggctggagtgcagtggcacaatctcagcttactacaacctctgcccactgcaacctctgcctcctgggttcaagtgattctcctgccttggcctcccaagtagctggggttacaggcatgtggaatcacacctggctaatttttgtatttttagtagagatggggtttcaccatgttggccaggctggtcttgaactcctgacctcaagtgatctgcccacctcggcctcccaaagtgctgggattccgggctgctttttaaattgcaaaagaaatatatgcatgtgggaacaattaaattaatgctcagttgtataaaccagaaaaataatagtttcctcttcttacactcctatcttctggaaaatatcagtactaaacactgtggtttagccaagtatataaatatataagcacatacatatacatatacatatacatatatgtatatattatgtatgtcataatcattattacataacatgaatatgttatatatataataatgatacgatatctatactcatactttttttttctattttacacacgtaaaaccatatcaacaatgaacatttatcaattgcttactatatgccaggggctgtcctcaatgctttatttgcattaacttacttagtccttgtgacacacagtactcaaaacaaccctatgaggtaggaattattgtaattccccatttctagataaggaacttgaggcagaagttgagcgacttgcctgcaggtggtgccagagcctggaatggaaaccacacatgctttgccatgtatgttgttctgcaacttgttttttccccctcttgaccctgtgtcatggtatctgaacatctttccaagttagctggtgaagagatacctcattcttttccaagactgcaaaatgtagtyattgatagcagaatgcctgcttcctgtagggtctggtgagatcctgaatgacacactggagggggttcattctgtggatggtgaccccattactgacagcggctcaggggctggggccttccttgacattgctgaagaaaaggtgagtagatggtaaatttcatttgattagtcagtagtaggcttgtttgcttatttcaaacttggtgatgattttactgagcaccagagagaaccacaagggttttggttgaatagcatcaagattgcttctgtcctcatggtacagaggaggtcagagtcccagggccacagaggctctccagggatgcacaggactggtgggggatatgcagtgcaagcttgtcctcacacttgcctgtgaygagcgagcgtccaggcctcaccaatgcamccccgccctcctgctcagttgtgaaggcacatagctttatcagccctttgagtccccttcaagacagaatcagattaactgcaggtgtgttcatgctattgtttggtaattggcttttacacctgcraagccagtttttgaaatgctgggctccctagggtgcaaaattaaagcataaatagttttctcacaatggcccctgctgaaaacccacaacgccagctcattccttcccttctcctgggatgaaaacttaagacagttctcacagctctctcagtcactatctggtaacagtcaattttcacagatatttaaaagtcaagcccagcataatatcaaaaattcaacaaaattacaaacacagtttccccccttctatactcaggcctactgtagactaggaaactgccaggaaagggaagcatggttaggggtttcctctctattttcttacttctctctcctccttatcctcatgatctccccatcctctagagctatttttaacatctgcaggggctggcccacctggagaaatggacacagttgtacttggctggtcaaattgtgatctgggcttttggtgtggaagatgcctgattgttggaactctctcttatgggggcttttgtggttcctgggaggtcttcctgcaggggacctaggatcaaaattccatagtttgccttgtaacttctgcccaggcttccaccccatacaggttgcccagatcttctgcgtggctctttgagtacagcccatttcagccagctccctttggagagattttatcttgtctatctccagcaaaacaactgcaggacaaatacccctcccttctccatccccctcccctcctctcccctttccctctcacctcctccttccctcctctctccttttattccctcccttcctctcctctcctctcctctccccttttctcccctcccctcctcttcccacttccctccttttctctttctccctcacctccccctcctctcctctccccttcccctctcttcctttgtccctctctcccaactctgaatctaaagggctccctcctttcaccttttgtctccctggagaaaatcagacaccagtccctgagcctcccaaattccaggaaatacatacccagctcaccaaatggtttggagtgagtagaggggaggagaagaaccgcagtacactgaaaattctttccaaaggaattcttgctctccaggcactcaaccccaaaatgagtcctgtatggtttcttacacagcctagaggtaggagatgggcaggagctggtagaacgggtgccatttccttgttttagcatggggagattacctgatgcctgtgaaattgcacttgccctttggggctttagctgacgctgagttagaaagagtctcattttaacatcctgggacctcaactttcctctaactgttttttgagacagtaattctgcaaggatttaatatattttatgaaaaaggggctctgtggtcaaatgactttgggaaatgctgcactctacattcctctttttatagattctgagaaatcctgcagcaaggaaatctttttaactttgattagcctggtgttttttgtaaccaaaagaaccacatttttgcaataaataaacaagctttgggaaatgaagatagaacatagtttgctgtcaccagccccaaagctgctctctctttccatttctcccattgctatgaaaccttcagagaatctgcctgtgcattcccaaaggaaactgagtcacagggagagagaagaagcaggaatgtctctgtctcccagcctagagaaggctgaggaggacagaggtgctgcctacacatttctgaagcatcttcatgggcaaagacattgtctaatgccttctggatgggtacatggggaggtcacagggaggcaatgggtttcagtagaagtatctagagctagaccaggctgactcaggagcagtgatttccgtgttaatggaggtgcaaaccaatactgggaatcaaacaccagacataggtgcctgggcagtctttcccatccctggatttatgaaaccatagatgtgaaagtccttgagagaaagaagctacagwaatgcaggtggctggagaaggctaggcagtctgttctcaccagccacaggcatgttgatgggagcccagagacatggtctcttgtgatgcctttgttttcagaatttagcagcaacagcagcggggctggccgaggtgcccatcagcactgctggagaagcagaggccagcagtgtgcccaccgggggaccaaccctctctatgtccacggagaacccagaggaaggggtcactccagtaagtagctcagagcgcaagctccccttcacctgtgtctggggttgtgggttgtgttgggtgggagcagtcactggctttccctatgtgtctgtgaaacacagtgacagtctcatgggggcagtctgtcggagtaagcactaaatagcattgacccattcagtggcggtgtgcagagccctacactgtgctgggcactaggcctggtttcagggatggatagtaaataggatagacgtgattcctgaagacagggtggtaagaggggctgtggtcagtggtaggtgaagcacaggatgccctgggagcactgaaaaaggggcccagagcccagactcgggggcacagaagtttcctggggaaaggatgctgaaggcgggcctgagagggtaagtagaagtcgcctagcagagggggtggaacaggtgtttcagcaaggtgggctggcaggagcaaaggcctgaagcctgaagaagggcagcatacctgtggggtcaagcgtgagccaggggtcggggagaaatggctggagaggctctaaggacacagagaagattcagcagaagtggggagtcactgaagggtaagaaacaaggaatggatgtagccagattagaattccagaaagatcactctgactactgagaggagaaagggtggggaagcaaacttggagaaagaggccgggcttgggggctgtgttggagtttgggtgagtggtggtgccagcctgccctgggatgtggccaacaatgtcagatcctcccagaagtcccagtgagcaaggggctgagaaacatccattgaatttgtccattcacggtgagtggccttggggagagcagcttcagggctatcggagcggtggaagccagatggcactgggctaggaagagagtgggacagggagtggtccacgagggtagactactgcttcaacaagaaagctgtggagtctgaggacctagacttttgtttcaacacagtgacttaagcaccagtagaagctgcactctctgattaggggacacagcttggaagggctattggtgagcacatgcccctcggggttggcagggagtggctggtggcacaccacacgggtgggatgctggggtggtctcgcagcatgagtggtgtgaggaaccaggcttccatatttctgtctgatgtctcactgtgggtttccatgtgaagtgaggtcttggtgtgcaggtgctttgaggggccctggccttctgttccttaccacagtgtggtggatcagcatcatggggcactgacgcggttcctgttgactttctattcagggtccagataatgaagagcgtttagcagcaacagcagcaggggaggccgaggcactcgccagcatrcctggggaagtggaggccagtggtgtggcccccggggagctggacctctccatgtccgcccagagcctcrgggaagaggccactgtggtaaggatcgtacagtgcccaaaggttgaggtcatggtgggagcagctcytgrccttctcagagtgtggggctcctgctcagcaaacccatgggagcctgaggcacggggatctctgaccaaatactcacttgggggtggagtttgccaaggcctgggtgagtgtggtgaagcccctggaggtcagtgagcagctgggccctggggatgggtgagttgcagaggtggggtttgtcccaaggctgcatgcaggaccctgctgcctccacccacagggggtgggagccagaatggaggagtggcgggctcctggagggcgatgggggatcaggcagcaggcggcaggccccagcaagggtcagagggcacggccaggccttcctagccctctcctcgtgcagcgcacagacactgtccagctcctgaaggcagggcacatcatcccaaggcacttggccagtctgtccctgtgctgtctctactatgggtgccctcaagttcttccagctcagctgattcaaacctgaactcctcctttccactcctcctatgttcccacctcaaatgaatgggaccatcatcctccagtcacctaatccagaattttcttctctcttccttaagttctayatcccatcaagcatcaagtcttgttgatttttctgcccaaacacatcatgaatcgccggctctgtcctcctccaatgctggcccctgtgctgagcctgccgtgtccccagcccgggcaattgctaagagccctgtctggcctcctccatcctctcacagcttgtctccagtctttcagccccacttcttggaagcttcccatcgcccttccctgcagacccagctcccatacctggcctgagagcccttgcagggtctggcctacctagccttgctgaccacctcttgggcccgtcctctctgcctctcagcagcacttcagccacactgacctttttctagtttctccatcatgcctctcttcctcatacctcttccctcatcatgcctcataccctcttctctctgctgagaacctttctcccttctctcctccttttaattctagcttatcctttagaattcagctcaaacaccacttcctcaagaagatgtcattccagactgtgaactctccccattcttgtcctcaaaaggcctcatcatcattgtagttgataatgaacttggcaaatagttcatgtctggctccctaccagaatgtaagctctgctagaacagagattactgatacaatattttgttcattgacatacttcattcctgaccaatgataggcactgaatgagtatctgctgagtgagtgaatggctggggtcatcaggacatcacagatcaacaacgccggcctttgatgtcattgcacacacttgtgcccctggtctgtctgtgctggtcaggcagccttcagccttttagcatccatgctgggagaccttgcagtgtggctgggggtggaggtgggggacatgcactgatggtgccacaggccactgggcagttatatggattctttcagtgaacaaagtggctgtctccttctccttcttcttcmtcttccagttgccctttcctttctcctcctcttcttctccacctcccctccctttccctgtcttcccctttctttaatgtctaggcacttacgacagagtgggaaagccagggatcaggttctaccaagtcctagcttaatagaaactagaatttgaccagcagggttgtctgaagatagaagggctatctgtagaggtggtgaggtcctagttactggaggtgtatcagctgtaaagcaaagagtatttgaaacaagtctcagtcaattttggaagtttattttgccagggttaaggatgcacctgtgacacagcctcaggaggtcctgacaacatgtgcccaaggtggttggggcacagcttggttttgtgcattttagggagacatgagacatcaatcaatatatgtaaggtgtacattggttcggtccagaaaagcaggacaactcaaagtagggagggggcttccatgtcataggtagataagagacaaacgcttgcattctttcaagtttctgattagcctttccaaaggaagcaatcagatatgcatttatctcagtgagcagagggatgactttgagttctgtctgtcctttgtmtgtaaggaatttccttaaggacaaattgtgagggaggtatgtacctttcttatcttagtagataccttttaaaggaatagcatgggaggccgttttgccctaagcaatttccattttcatttttccctttggcttagtgattttgggggtcctgagatttattttcctttcacatttccccctttttaaaatctttcagataaagcattttaaagaaaatgagtctctagtttcaggtttagttgatttctcatggctaggagggtttattcctagacaggtaggtcccatgttattaggaaagttcacttttatcaggctgtgaagtctcatgccctacaagagaaaatagcgggagggagaaaaacaacaaataaaaaaagaagaacaatcctggaaaattgatataggtcatattactctgaagtccatacatcagtaggcaggtatgaaagtggcttattatgtaaataggttgctgttattttcctctgaagtttaagttgtctagcttcagtttgcagggctttaagaaagcatggcttaattttagtgatttcaaaaatggggaaaaaatggaaaagaagaagaagaaaaaaatttgaaaacattattatggagacttgtagccagtacaaattttagaattcagtccaaactgtagaaaataataaaaattgaaaaacattaggcaagaccaaaatctaacaacaggtgttctatagtttattttaaaacataagttttctctttccagtcccattttcactaaagaaaaatcataggacaatttcatttgcaaattaagttttagtcttattatacttggcctgagtatttgcataaagtcagcaaaaatagttatttgccatataggctcctctttttttttaattgactttgctggagctttattccataaagaatctcagatttgactttaaggccttaaggacagcccatgcctgcaaatacctgtattaattgggtgaaggcctcaccttgaggtctcaagaaaacttggggctcctggacctgtcagaaagtgacattctttacttaccacaggtcaggaacctgtacagagattgtgtagacaaggtatgaggccagctttcccaagggcttttattggctctataaatcaactttggttccttaaaggagtctgtatctgatagcatgccattccagtcaaaaccatggtaaaataaccagtgtctccagctgtgctctgttacaaaagaaaacagattgttatcacacttacacaaataactatattgtaagttaagaatactcacaactaattaccaaatttttggagagatcaggtagaaatatgctccaaattttgtttatatgagtatattttactcatttttttttgaggctgagtttctctcttgtctcccaggctggaatgcagtggcatgatcttggctcactgcaacctctgcctcctggattcaagtgattctcatggctcagcctcccaagtagctgggattacaggcatgtgccaccacccctggctaatttttgtatttttagtagagatggggtttcaccatgttggtcaggctggtctcaaactcctgacctcagatgatccacctgcctcagcctcccaaagtgctgggattacaggcatgagccactgcgcctggctactcaattgttaaaagctgtaaatagctcaaaagaaaagttttcttggctccgataaacaaacaaaaaaaggatcagcaatgttttaagcaaaaagttataaaaggattttcagtcttctaaaagtccacagttaactcctgttctgcatgttattcatgaacatttcagctcttcatgggagccttggaagttttttctctattctaacattacaatcttcaaaacttgcattgaagagcacctatcagagtcctatgccgattataaaaccaccttttgaaagggataaaagcaaaacaactgtggatgacaaaagtgttgaaacagtcatagttaaagacacaattgacaaggaaacttggttacttctgtggcatacagcaattttacataataattactactgataaaatatgctaaaacatatcagaatcacaggaatttcatacaactctgagcacatactaataacacatttatgtaaatataatccaaagaaggttaaacactgtttcatatttgaaaatacttcctgtatgattttattatatcgaataagccaaatatgtctcttttggacttcaggggaataatagctcagaagaaaagctttcttggttctgaaaatcaaaaaattaatgggacctaagttagaatttgactttggaaattttgtcaaatataaaaagtataaaacacttgatatcacaaaataggatcacaggtcattgtaaaataagtcattcatttagccaaagtgatacctcaaagagttaaaaaaaaaggcaaaaatatttattctttgattgaagagattgatttctcaaacaattagccctaataaaaacaacaggaggccaattaaatttgtttttcaaaaatttttaaacaatctataaaattttaatcatcttgaccataagatataatttccataagcctttttataacctttataacctttattaaggagtgggttaatgctccaagaaaaccttgttaatctgacacaggggccaatatgctggtcttgcatcagcatgcctttgacattaatggttaatttatagagaaactaaacttattttatctctcaaaatctgcccttataatctcatgtgcccacctcttctgcagtagtctttggaccttgaggagttgaatagctttaatttttggcgctatgtctcacgaacgcagtttattttggttgacatcttctacaggatctgtaggtgaggctttaactgctgtcagtgtttaagatttagcaggacttggtgtccttcttagacccaggaatcaaagccctgtaacttaatggcacaagtactttaaaagcacatacagaaatgtagagcacctgattctgtcactgttctgggcaccactatgtaacctgccatgatccctggtggactgaacaaatgggggcaaatgtgggaataaaagacaagagacaaaagagtatatttggaagaaggggtcaggggaaacttgcctcttgtggacaagggccctgagctttacacagccctccatatttattaggcaaaagagacagtgagaaggggagtggaagaaggggtcagctgcttagtccagagtaggcttgcaagactgcattcctcaaacaacaggctctagatgttgcagtagataacctcggcacccgggagtgattgcctccagcaaaccttctgtcggcgggaacacttgtgagtttgctcacatcctgcattcatgataaacagtttgctgttcgatcatatagcctccagtggaatgctgagttggtcacgtcccatgggccttcggctcccttcacagaaagttatatggacgtaataaccttaattaaaaaaaatattctttttgttaatctgcatcttttctaagcaaacgaaaacttagtaataatgacataggaattatttagataaagtgtaagatctgtttattaggccagttacccaaaggcaaaagaaaagaccttctgcagtgcgactgctgttctctatggggaatattatattggaagaaaatactccttttagatctttaagataaaacatttttttagcatcaggccacaacatttataaccagaggaaaaaaaatcttacaggagctgaaaatgagttgaagattagttattatttcaggccttttaaaaggcgagagaaaacagaaaagagcaagatgcaataaaagtcgaactttgtgtaaaaaaattataatgccttgtaatttattaagagtaaagcaataccttaagaaaattttgtagttcaaaccaattctttagtgtataagtggttttttaaaaatcaaaacccaatctctggaaagaccattttaaataatttccctttaattgtagacaacttgctcatatgaaagctttttttttcatctgtcttcttcttatgatgtaaacagaccatttctgacatgcttggactttctagttttcctgagcatccctctttctgaaaaaaaaaaaaaaaaaagtcattttattctaggacaaaatttaccataaaagattctttcttgtataaaattatttttctttaagctttcttaccaaaattacctctttatttctataactttctttacatctctctcatttcctgattcccttcactttgttttatacataacctttaaataagctttgaatgagacaaaaattattcaccttttaaaaaacacacttttttttagaaagaatgttttcttacaatatattttttaattggaatatacccaactaatgaaatatctattatttaatttaactttagattctaaattatgacacatttgtctataagtatttatcccattacatttacctaattatttttaatactgtacctagattactgtatttatgaaaactgcaatagtcattatttaaagttatttccctgccaaccattttatagcctgtgaatttcaggtgtttatctaagtagaaccttaagattaaatatatggttattttactaaatcaagatttagctattttcattaaactaatgttcttgtcttatttatcagacagtacacaagcaaaggttatcctgttttgggctgagtttatagttttgtaacccttgtgccaaattttgacaccttatagtatttggcagggataagtatgaaattgcttgatcaataaatgcaaacaaaaatgtatgctggcaattcttaagacatttctaatattgctttaccagtaattttaaaactagcttattaaagacttaagtcgtgtgaacttgaaaagcatttgggtttatcatttaatttatgagtactctttaagccattgtcataccttgtagcgaaaaacacaacaaaatgtgtatgtacacataaacacacacatacatactcatacaaccaaaaatcctatagcttttacttcagaactctagccatgaaatattaatacaaacacattgtcctgcagaaacaataacaaaaataaatgtctggatgcaaacagtggattttatctcaggagaaatgtaacagcagacttaaagcaggcagaggcagagaagaaagcagagagatagagaacttaggaactttatagttgcagatcgacttttgggctctgaatttttcttgctgtaattgtgcatgaaaataccatatatgttcattttacaaaaatacttgcaagaagaggcaccataaaaccaacagagtgcctgaaagagggtcattctccttgtttttccttattcttagattatttgtttcccacccttttttttttttttttttttttttttgagacggagtctccctctattgcccaggctggagtgcaatggtacaatctcggctcactgcaacctccacctcctgggttcaagtgattctcctgcctcagcgtcttgagtagctgggactacaggtgcgtgccaccatgcccagctagtttttttgtatttttagtagagacaggttttcaccatgttggccaggctggtctcgaactcctgacttcatgatccctcccaaagtgctgagactacaggcatgaaccaccgtgcccggccttttttatttatttattttttattttaagggacgaactgagctgtggcctagcattttagtggagtgtgtcaaagtgtgctggttgcgggtgagactctacagtgtgtcaccactgagccatttccaccctcttacgtgtctcagtttctctctgtgtagttctagcacctccaagaggctcaaaatcaaaatgcagggtgaccagctcctatatgcacttcctgaatgaggctttttaaactaattttgttgggggttccctgtagggttgctgcatgtcatgggggggtcaaccccccaagacactcccacttgccctccagtcacccaggggcacctttcagctgggaggtgcaaaatgccctttctctttgaagctgaggaaactcattctcccatttatctgtgaaaacaatagttcaattcctcatgcaaaatgctcacactagccaattgagattaatttcaggaggaaaggcaatggagaagacaccctttagaatgtacctctgaactagaattagggtcctaaacaataacttcctaggagaaaaaaaaaaaaaaacagctaagaccacttcctgtaaattgtcctcagccacctctaactttgtactctcatccaccattatacacactaaggtcaaatcctctcccggtataaggtaatctctggtacccccaaaagccaaagaggtcaggtcttacaatacaggagagcagagcttcagacctaagaagaatctgctcatgactcttgaaactccacaaagaaaatggaacaccccaaaaaggggcgggtggtgcctttgttctgaatactttaaggggtttgagtcattggaagcctcctctaggtttttattggtactaaagatagtgaagggggaaggaggtatagggcggaagaaaagtaaacgaaagaaaaaaagtttttaagacaggaagcaaggatagcaaacgtgcatgttgtgtttttttttcccctctcttgcagctgtgagaaattttagccaattcagagaggtcttgttacccataatttagaattctcattcagatttgaccaagtcaggtagagctggtcaaatctgatgggagaaagatcagaacaacaaccaaaaaaaccctaacaacatgattactgagcactttaatagtaaggagaaattaggaacagctggttgttaatcttaacttcagctaagacaaaaccccaattcagctacttactagagataggtcttaggcagaagattgctctctaccatcctagaagcaggaaagaatttaaacttgccttccctgttagaaatgagctcaaactccagaaaggagttaggtgccttccatcatcctagaagcaggaaaacttgcattccttgttggaagcaagtaagactgcaaaaaaagaattgtacagcaaaataaactttagaacttgaccaaattttgggagatcagggattctctggaggggaggctcctaggcctcagcaaattgtcctattggtttgaaccataaagaaagctcaagctggtatcaagcaccgatatgagatttgtcaaaggtcagtggcacctccactcagaatcccttcttggttgccaaaatgtgaaccccaaatatctgagacaggtctcaggaaagttaggtagtttattttgcaaaggtcaaagacatgcccgtgacacagcctcaggagatcctgacaacatgtgcccaaggtggttggagcacagcttggttttatgcattttagggagacatgagacatcaatcagtatatataaggtgtacatttgtgctgtccagaaatgcaggacaactcaaagtggggagggggcttccatgtcataggtagataaaagacaaatgattgcattcttttgagtttctgattagcctttccaaaggaagcaatcagatatgcatttatctccgtgagcagaggggtgactttgagttccatctgtcctttgtctgcaaggaatttccttatggacaaattattagggaagtatgtagcttttttttatcttagtagctatctttttaagggctagaatgggagacagatttgccctaagtagttcccagcttgatttttttttccctttggcttattgatttggggatcctgagatttattttcctttcacaaagctaaggccagagaagtgcttagcagagatgtgctagaagggactctggggtgggtgggaggatgccctgaaaggtacgttctaatgctggagctccaggcgaaggtgtggtcctggaggagcaaaggaaagggaatcatggagcctccagtwatctgaggctttagcgctttccaccccccagcctcacacccactgaaccaggggcatgggcgaaggggcacagctcctcatgccaatttcatttcagggtccaagcagtgaagacagtttaacaacagctgcagctgcaaccgaagtgtccctcagtacttttgaggatgaggaagccagtggggtccccacagatggcctggctcccctcacagccaccatggcccctgagcgggcagtcacttctgtaagtgtcatcttgtgtcctctctggctcacaggggagagacaggtctgcatcatgcgacaacagtcatccttggccttggcaggggcacctgtagcttggttatgagcacatgtctgggtgggcagctgctggagggaggcaggacacaatgctggagtgtagcagaggccacagccctgctccctcctagccttgcccaagaatttactcagagacaagtggtccacagttggcactgaggcttagaagagatgcatatttcagaaggggtgtgctgggggtaacgatgatcgtaggtaagaacgtgctttgaaactgggctggcaccacagaaacgactgttacaactccctggcagcctcatgagyraggtgaggtggtgccttaatgctggttttgttttcagggtcctgntgatgamgaagacttggcagcagccacaacagaggagcccctcatcacagctgggggtgaagagtccggcagccctccccstgatgggccaccgctgcccctgcccacagtggctcctgaaagatggatcactccagtaagtggcatagagctgtaagatttgacttggcagaccttacaggggagagaaagaaaggccagagttgtgggaagggctggcccccagctttctcagaggtaggttttcatgttggtttgcaaatttgggcatttgaggagctttaacctgaggaaagcttgaggaaactccagatcatagagaaaaagcaagagattaaagtcaaggggacctagctttgtgtcccaaactgatctttggattgaaatgagatctaayartcagtgttcttctggggacaaagttgacagtaagacgtggcgggtctgtagaggggatgagagcatcagtgctgtgtgtgtgttgggggtgacctccaagtccctgccaacatgagtttttatgactcttggctacaactgtgtgaccttaagcaaatccgttgatttctttggccctccgtttcctcatctgtgaaaatgagtggctgcaaggccaagtcagagaatgaatgcaggttggagaacgtttacaaagctctgtacccacacctagggttgtcaccacttaaggactataactgtgtctcttagaaataggaaacccagacctggccctcagcttgggcttgtgtgaagagggactgctcttccaatgtgaacacatttttaaaggaaaatatctccttggtgatcagcattggctcatcagttccccaaacaccacttggtcatgcacactttgaaagccaccactcaagctacagtcatgtggcccattggccacggtgcggcaggactgacctgtgaggggaggggctgtgggacgggagatcaggacagccccctgaggtcctgaatgccccttgctccggggcctcctatagcggttatcacgctgcttcctgtctctttagagttgtcttgcattcattcgttgattcactcattgactggacacatagcggctctgggccctcagtcaggacacttgtagatagagatgaatgtgacctcactcctgtccgcaacaaattcacaatcaagcggcaggaartaagccatctgaactgacattgattaatcactctgtgctccaagtttacctgattctcttcaccacattcctcttcagtataaggtgaatgggagataagatgtggagaggtaaagtcacctgccactgttgcctgcctctgagaggtagagctgggatttgaacctgcatgctggcctgcaaagctggagctcttgagcttcacccagctgaagtcctcatccatgagagtgtggtgtggtgggaagatcctggactgggggccaggagttcgaggttctgcttccagagatgctgctgacttgttgtaggccctgggcctccttgtcatcatctataaaaggaaaaaaggtgaagaacaactctggtttttaactctggtcaygcattagagatggctgggaagcttaaaacaatgcaggtgtctgagtccagtgctagaccaagtaactgagacactggggctggggctttgggcttgcagggcatctagtgggcagccagctctggattgacccgctcatgcactgtgacttcccaaacaatgtccccctgctcttctgcacctcaccccaaggtatacacaaagcaccaagttcaaatctccctagtgatgccacatcgggcacagatagagccggttctcctgtttctttctctttttaacgttttattattgaaaacctaaaaatgtcacaaaggagcttagacaaaggagcttagaatagtataattaacccccacatacccatcgttcagtttggataattatcaacactgacaatcttgcttcatctgttccacctcctaccaccatcttttttggagagaaggggaatactggagtattcaaaaatcaaccccaaacatcctatcatttatttaactggtaaataattcaatgtgtatggctgatagagtgatctggtacctttgttttggtcatagccatagtatcacgatgcatctaacaaaatgagcaggggttccttcgtattatctaatgccctggctattttgttttaaaatacctctttccagtttgtttgactctgaatccaaacaaggtctacacattgcatttggttgatacgtctcttaagtgtctcttaatctctaattgtctcccgccttctttttcccttttgccattaatctgttgaagaaactgggtcagtttcttccttagacccttgatgttttcagctttgagaagtcagtctggtaaggctggctgtgctcatgggagtgtgagggttactgctcctgggaagctctttgtccacatatattaacaatcataagagcgcatattgctgaccagaaacttctcttctaggaattgattctagtggagatagtctgatagcctttgttgttgccgctttttaaaaaaaggctttgtttacaaggatgctaatctcagtgttgtccataatagagaaaaattgggcataatttaattagccaacaatagaagattaattgaattaaagtatattcaaacaatggaacattatgtagctaataaaattatacctgttagaaatatttaatgatgggggaaatgcttagcatataatgttaagtgaaagaagctggttgtaaacctagtatattgtgtggttaactatttaaaaatacacacatgcaaaaacactagaaggaaataccctctgtaaatgttggcagctgttgcctcaaagtggtggaactgtggaaggttgttaggtttttaatacattgtggtttaatacattttctactatggtggcttacaatttttatgatagattttttaaagctctgagaaggaagagagagagagagagacagacacagagagagttagagatagaatragagagagaaacggagacatggttgatgtctgatgaagacattcctgctaagtccccacgttagggatctgcaatgaactcagatgaatgccccgattcctgagcagagtctaaaagcacaagattgtcaagaaggcacccaccttgggatatctctaggatcagtttttttgtttctgtttttgttttcttgagacagggcctcactctcttgcccagactagagtgcagtggcgtgatctcggcttactgcaacctccgcctcttaggctcaagcgattctcctgcctcagcctgcagagtagctgggattacagacagacatgtgccgctactacccggctaatttttttgtttgcttatttgtttgtttttagtggagacaggatttcaccatgttggccatgctggtcttgaactcctgacctcagatgattcacctgcctcagcctcccaaagtgctgggattacaggcgtgagccgctgcacccgtcctctaggatcagtattggcccagcctctaggatcagtattggcagatatgtgacagagccagrcatgctatactgccatggtgactctaggtcagtttgaatctcagagtcaccatgacagtatagcttgcctggctctgctacatatctgtggccagttttcttcacttctctctgtcacagttgactcatgcatcaaatgggaatcataatcttagaacctacctcttgatttgtgaggattaaatgagttcatccatggaaaacatgacccagcacatagtacatgctcaataaattagctgtctagaattattttgcagatgaggcccagaaaggattagagctttgctcctaggggtccagtaggagtgagagcctttgtctctggattttttagtgctttggttttctgcactgtttacaaccactgtcttcagacgggagccagaagttgattagcaaagcccacactggtcacaatgatgtcattacatttctaaggactgactaatagatcttaacaaatatatggagaatgttgccctggaaatgaagtaatatatttaaaaatctgtgttgtggaacacaagtgagagagaagactgattgtcaggtgtgggtgactccaaatgccaggctcttcccactagtcatttggcaaataggtactgagagcttattatctgccggtgcaggggatggtgcagtgatcaggcagcctctctcttcatggggcycactgacttcagcccagtacaagccctagctcatgcccagctcactgaccaggaccagggaatgtcatcggaactcagcagccccatgtcccaaatatgttgtggccacgttttaaccaaatcttcttcttttaggctcaaagagaacatgtgggaatgaaaggacaggctgggcccaaaggagaaaaggtttgtgctgtgaccatcctggggaacactttggctcctgatcragtgtcctgaacatgttatttaggtttgatttagcccactctgatcaaggggatcgcagaagcagcamgagggctaagcccaaaagaaatggacttgtaggtctgggagaatcaggaaaagggcactgggcagttctgactgagtctcttctcaccacctggtgaccgtggccaagtcccttgacctccgtgggccttggcttctctgtcgagtatcaaagggtcctatgattccacacctggctctgccacacatctgcaaccagttttcttcacttctgtgtccgggctctgggctctgcccctgattttcttcctgggaaaatgttgggcagacaagagcttttgaggaccacaggcctaggtttgcctttttgtagctgtgggatctcccgaaagttctttactatttctttgctccagtttctccatctgtaaaatggaggtggtgatgatgaccctgcggtgtgggatgacgtgaggggatgtttatagaagtgctttagctggtgtcagtcactgcgggaataacaaattcctcttaccaaaacacctattggtgataagctgttcccagggggatgtgtccacagtgaccccagtcaagagatcctgcccagggagcctgctctggccataggcagcagcttggctgcctctgggagccttctcatctccaccatgaccctggtcctctgcctgtctcacctccctctgggctgcacagaggccgttccttgcagcagatgatgctcccgtcctggggcctcctgagtgcccaccggggtgtggggaagggagggccagggctggggagggcggtgtcctcacttctctctgcctctggctacctcagtggacttcagatggagcagggctctggggtgtagcaggaggcacacagatttggggactttactgtggacatttcctctctccttttggtggatctggccatcctgtcaccttatttgtcagagaagccacttctctgggccctttttgacagccaaaacctcctgggatgccactctgtcattttctttcatctgcctcttttccaaatgtgtgcttctgtcattcgaaaagcattttctggggcactagccttgtgccaggtgctgggacctggaggtgattcaggcactgtgcctgcccttgaggggcacatggtcccagaggggcagactgtgagcaatgatgttcctgtaaaggtcacacgccctggtgagaggagcaggtgggcagggcaggcttcaggggagtccacactgggcctgagcactgagcactggtgctctagcagggcccagatcagagggtggggataaatcctggaagaagggagggtgtgtgtgatgcgtgctcatactggtcagctctttccaccacagcctgtgccctccaagtatggcacagaaacaaagggcttctgagccctggsgtgggacaaggcattcccttaagctgtctctgcaaaggacaatgccatttttctttcctgtgtgatcctgattttaaagatgagcacgatttctacagaaaggtggggagatggtaggaacagagttccagccgttcactgaccattttgttctctttagggtgatgctggggaggagcttcctggccctcctgaaccttctgggcctgttggacccacggtgagrttcccatccaggcttgtcacacacacaggtgtaagaccagggatgcggccaaaacagccacaggctgaggactctcctttttggcccccaaagtatcttgcagtcagaccctagggctttctgcctctactaggactctgcagtgtgcagcagcagaactgatttctatccagtttaaatcctgcaccttgagcatcccagaagttcttcaaactcaacacttcccaagctggactcattacccatgccccagacctgcttctcctcctgggttccccatctctgaggatggcaccccatctatgtggtcaccaagagagaaacatccttgagtggtcytctgccttccccagccctgcccagtgtgtccccatgtccccctgagtctagctgtgcagtgcctcctcctcctctcttgggcgatggcaccagcctcctaactggtctctccgcctccatgtcaccacttcccttcccccacacacatgttcccaccactgtgaccttcctaaacacagctgtaacccccaaacccagctcttctgggtgcctctcagggggtgctcagtacacacacattcaatgaatgaattaggccctgcctggttcctgtcttcaggagttaagtgctggaaaggtgttttgaagattccccttgttcttcagatacatttgatgccattcaagtatgcactgagggctctctgggtgctcggcctcctgctggactctgggcacccagtgtgtctcaggtttgggctggctcttragccctagtttagaggagccgatggacccacgcacaactaagcttcgagtcaggtggtcctagcatctcactgagaccttgacagaggctagtgggagcactgtggagggagagaattctgcctggaaacggggtagggagggcttcgtgtaggaggagactgcggaactgggccttgaaggatgagttgggaattgaaaggcaggaaaggaggccgaggacatgagygggctgcacagctgggaggcggcaagagagaagggtagctgtagaggggagtgggagaaaagtcagagagaaaacggggagcagaagttatcgggctataggatataggaaacatttccccaktttggagaaaactcagtgacgtggctgtccttggagtctkgcagttaaatgcaagtagtggaaatttcttctctytccaggcaggagcagaagcrgagggctctggcctaggctggggctcggacgtcggctctggctctggtgacctggtgggcagtgagcagctgctgagagtgagtgtgaaggaggacacgacctggtgtctgggactgccttcaaaataaccccagagggagggacgtgggggccagggacagatgaaactggattggctgctgctggggttgccggcagtgagctcatgggggttcattctacttttccttgtgcttgtatatatgtttgaaattgttcactttgatcagttgcattgtaagtgagtacgagcctacatttatcttcaggacctcctcaccccaccttcttcctttccctggtgggcttcttgagcaggctgccctgcagcaggtgtgcccagtgcccttcacctctgccaactggctttcaatcctccctccccctcctctcaccctattcattaaagagacctgctggttttgtctctgggtggctattctacttcagcttccagaaccttcctgaaatctccttcccttatgcattccctccctgcctccctctccaggctactctttctctttggtgcctcttgctcccctggcctcctgccaaggctggagctccaccagtcctttctgaaattgccccctggggagcttctaccttctctagctgcagctggtgcctctgtccctgagagcctgtgctgaatccctggttgaaagctccacttggctgcccctctgcccactcctcatggccagggctagaagggttctggactccgtggttaaatggaatgggagccaaatgaatctcccagcctggtgggatcagccaacccagcaatgggctaaaaacactagtgcacttcagaaagagttttaaaaacaaggctacaccacaagcagttttttttgtttttttktttttttttttttgagatggagtcttgctctgtcgcccaggctggagtgcagtggcgcggtctcggctcactgcaagctccacctcccaggtttacttactccattctccggcctcagcctcccgagtagctgggactacaggtgccggccaccacgcccggctaattttttgtatttttagtagagacagggtttcaccatgttagctggggtggtcttgatctcctgaccttgtgatctgtcctgactgacctcacagttaatcagaaaactaagttcaccagagcacctctcagaattccaactaattggatctttcttgtattcagccttttgggagaaaacacgatatgatgggctcagaaagactgagattcaaatcccagttctgctactaattagctgtgtgtctgagagcccttgagtcgcatggtctcactgagccttaktttccscatctgctaagtgggatcaccaaaccctacatgtaggattgttgaaagaatttgagagattgcatgaagcacatactcagtatctcattcggtattcccccactgtttctaacagagtctttgtgtttttagggtcctccaggacccccagggccacctggcttacctgggattccaggaaaaccaggaactgatgttttcatgggaccccctggatctcctggagaggatggacctgctggtgaacctgggcccccggtgagcaactgaagtcttctccccatctctgtggctgtggggcttcctttagcaggggaggggtgtacagattgcaaaacccagcactgtccaaggttcgcgatggggagagagcagctagctgtttgtaaacagaaatcctcctcatctgaatcattgctgagattcgaaagaagcagcagccaagaaaaacatcatcctacgtattgttttgctgctttatcatagtcaatacagatggccccctacttacgaatggttcagcttaagatgtttttgactttacagtggtgcaaagtgatgcacattcagcagagactttaccttgagtacccatacagccattctgttttcactttcaacactttattataaaataggctttgtgtttgatgactttgcccaactataggctaatggaagtgttctgagtatgtttaagttaggctaggctaagctatgatgttcagtagattaggtgtattaaatgcattttggacttaagatattttcaacttgcaattggtttatcagatgtagccccattgtaagtcaagaagcgtctgtacaggagacacagattcataaagaatcttggaatcataggccatcagggctgggcctggggtaggagacccttggagaccatctggtccaaccctgtctctaacttccccatagaggaggaaatgtaatccagagagtgaaggacagttagccacaggtgcacagtcagcagtgacccagcctgggccaaggactaggttcctgccttgcacctgacatgaggccctgggcccaccagcctcacctgcctcccaaccctgccctccttttctagcaagcgtgtgtatgtgatatttagcagaaatgttgtgggttgattgtcamtgatgttccccagggccctgagggacagcctggagttgatggagccaccggccttcccgggatgaaaggggagaaggtacggggaacacgggagggtcccaccacatgggagccaccaggcccacactactctctctgacccctaaacctgaccttgcctcttatgtgactgaccccctggcctcctgaaatcccctgctggccacttctgctggatgtctccatcatgggactcatcatgcccaagcctgaactcagcaccttccctgcccactcttgtctgcccctagcttcagtgaatggtgttgccatctacctggtcacctggagcgagaaatggaatcttctcyaactcctccttccctccctttcctggtatgattggtcagtgccaagatggcccagtctgacctccacatctctcacttttgtctccccactgagctggactcatctcttctcattcgcacggtggccttgggctcccagttgctgtcccattctctccacccaccctccagcctcctgcccagttcaccttcctgtagcaggctctcgtcagcccctgccctggctactgagaaaagatcaagggctcaactgcctgcaggacacaccctagctctgtgcagacatctggcccttcctgattcgcacaagctgcctctgtagtgcatcccccaactcctcacacggcctcttggccagtgggctggttctgcccaaatgctctgggcacgctcttcccttctgtcctcctggcctttgcacatggttttctccctgtttgggatgtccttttccttttgtcatcctccaagacccagttcagatacatcctctggggagctctccctgactcattatgagcagaaagcacccctccttcctcccctttctatgagcatcataggaagttcccatgctattgagaacctcccttgccagtgacactaaaggtgttagcttacctgtctgctcctcacccccaccctgacatagagcatagtactgcctctctctccttagaacctagcacaagcctctattagtgtttgatgcatgaatgaaacttttttcagacaccattagtctacttttcccagagtctggcctgccttcatcctcttcattctctgtctgtaagctggtcctgcctcctgtctgcaagcctgtgctggtgctacctggggcgtgtatgtgtagggggtgctttctgcctctgcagtgttcccagcttgatgagataagccatgtctgtcaaaggaaggcaataaagacaaggtgagccctgtgctagggatgcgatcagtgggttttactggggtctagaggaggaagagagatctcagctgggatcagaagtggggccttctgtgaacctctcatggacaaagacgtggaaaatgctgactctgtagacaccaccatcatcactgaactgaatttctagtttccgtcagctctggagtatgtttattttaattggaaccataactcaattttcgtggaaagcttatttctcagaaaaagatacaattgtcaagctttatagaactcattttacatgtaccaacagttttacagaaattaaattttgcaggaagcaccacagacctacactcttcttacctgttcttcttccaggcttccccccacccacccacacacacccctcccatactctgtctcgaacttaaagatacccacacccacaactgcatacaaaacacccttgcacaggcactctgcagctgcttgaagaatcagcagtgcaaggagcagcaggcttgcctagggtgaatgttggagatcaatcacatttgtttctgaaatttgctatgcatctcaatttgttgcactgtgcacatatgaggttttctgatcaagcaaaaacagacttggaagaacttggaaatttgcatctggagagctggcaggaaactttgcacatgatatttaccttaaaaacaaaacaaaaccaaaaaagtccctaataaaccaaggtgcatattcagtatgtaaaataacaaaaaatgtgctaaaggaaatgaacagcttcagggctgtagtagatcataagatccaatgattcgtttgatctttgactccccatcaacaatatctgcccttcaacttgcatacctccagtgacaaggaactcatctcctgcccaggcagtgccttgcaccgttggatagatccacttatagggaagtctttccatttgctgtggtgaaatcagcctcctttctctttagcacagcacatagaccaatctaggcagttatctaaaatggagttttctctacaaagaataaggttcaggttatttagctggaaaaaaatgttttttatataataattattattataaaatatgagattgagatcaaaacatgatgctcattaagaattcatcaaatatcttaagtatgagctaagctatgaggacccaaaggcataagaatgatataacaggctgggtgcggtggctcacacctctaatcccagcactttgggaggctgagatgggcggatcatgaggtcaggagttcaagaccagcctgaccaacatggtggaacttcgtctctactaaaaatacaaaaattagccgggcgcagtggcacaaacctgtaatcccagctgctcgggaggctgaggtgggagaatcgcttgacccgggagccagaggttgcagtgarccgagatcgcgccactgcacttcagcctgggtgacagggtgagactccgtctccagaaaaaattgaaaaaagattgatacaacagacttgggggaaagggtgggagggagtgagggataaaagagtacagattgggtacagtatacactgctcaggtgatgggtgcaccaaaatctcagaaatcaccactgaagaacttactcacgtaaccaaataccatctgttccccaaaaaacgtattgaaattatacaaattaaaatattttttaaatgatacctcaaaaagaatttatcaaatagattattctatgctgagttcgatgatagaaatattccttactttatttttcccaaatcaagatgatcaactaactcttaagatctttagcccaagaaggaatgggtgaggagtagcctgctttctcagcagtagaatgtttctagaaagaatgcagaagaacttgctgaagaagatggatctctgaaaaatcattcctttctgcttttgcactgcagattctgccattcagttctcggaacacacctagtattaacagttgttgttgattttctactttcagaatctaagtcattcatgttattctgcagtctcaaaaggtactgggacacctgggcaggaaagagtttgtgcttggaaattttcttcagtgtccagaattactgtggaatgctgaattgccagtaattgcctttgagtaatttcactgagctgccaaactgtcattgtaaaatcagcttctgtcttttccgttgatgtaagagaaatacaattagatcatcatcaccttccctttctmcaagcaatcccaattggtctttgaacaattctctaaaccttgtataagaaagaaaagagaagtaagctgcttttgcctaggatgcagtaatgggtttagaccttctaacaacatgtttaaatgaaacactgaaatagttgcctaatttcctattttatatcttctttcattatcagaagtgtttggttcaacatctggattataggcctccataaaaccaaatagatggctgggtacrgtggctcactcctgtaatcccagcactttggtaagcctaggtgggtggatcacctgaggtcaggagtttgagaccagcctggtcaacatggcgaaaccccatctctactaaaaatacaaaaaattagctgggcrtggtggtgggcacctgtaatcccagctactcgggaggctgaggcaggagaatcacctgaacccgggaggccggggttgcagtgagccgagatcgtgccattgcactccagcctgggcaacaagagcaaaactccatctcaaaaaaaaaaaaaaaatcatatagaccatagtcaattgtaacagaaaagaaactggttatcagtattacaaacagcagaaggaaaaccaacagacatccacaaggcagtaagatgtgctgtctcagaagccacacaagcaaaaagaatcctcatctccattaggttctttgaggttcctgtgtgctgaaattgagtaatgtccttagaaaatccaattcaccacagtaagccaacattttgaatcaattctaaaccacgatgttgtaacagacggcactattttacctcattcctttgcaatgtttccattagtgaactgataccttcatatttcatcacttttaaaaccatacttgcagctctgctatttggaattccaagattgcatgcatgccctcactgcacaaaaattctctcactaagaaataatgtacaactccaacatcaccattttgggaataggagccttccctcagcctgttcattggagctcctccttttcaccctrcctgttcacataagttccagtaaagtggactcttctacccacaagttaatctactcgtgttccaagctgatggccatcttatctgtgagtcaatggaatggattcagatactctctttttaccatgtctaagctggataaaatcatctaagaccataaaccaaggcccatgatatcttctagaacttcctttgaaactctataagatgccctcttgattggaaaggaatgaggaaggcaactgaaacaattcagtttttcactttatggacataattttctgtaacaagatcagccggccatgcagctacaaggtttttagagggaggctactttagtttctgtttcacaacaatcctgatggtagtttgacttgttactgaaaagatgcacaagattggcactttcattaaagacagtttgcaatgggcagccagcaacaagccaatcatacccaagaggagcagacatagcaactgtagcctctgggttaggctataaaattggcatccagttattggagtcatgtttccactgcaggtggaaggtcacacttagtttctccctggtgaggctggccagyagggaggtgacagagcctagtcgctgtcacttctttcaccgagcacaccttctcctcccatctccccagaatggctggagtgtccctgctggctcctttgccacagaggcaccaactttccatgaagctgcccctggagaccttatggagggctttgctcgcagaaattccttgccactccagcctcagagcctgcctccagagcctggtgcctcacctgggagcccagaccaccctcagcccctgtgatccccattcctaggccaagaactgggtagtgtgtcccaataggaaaacactgcaagagatgggacccttcccatgccccacgcatgcccccaggtgagaggcatttgtcttcctccagcatcaggtggaaaccctcacctagcaaacccatgaacctcacccatgggagcagccagttccgtgaggaaggttatcacaactaccaagcaaacagcatgggctcgagtctgtgaaggagaaagggggagattgttgygtgggggttgcctattgtgtgcaggcagttttgcggacacgtcatggcctcatctttctcatctatcctgagagctttgcttaggctcatactcaactagagtcccaaagtttcagagctggaaggaacctgcaaattgctttagtccctggttttctgtgccctggcagagccatgggactttgtggaagtgccttcgggctggtaggtgaggacagaacaactctacttcaagcatttattaaaattaamattaaattgtaattataaaagtaatatatgaatatagttttcattgcctcatgtgtcctatttcctctttaattatttttgttagagtaggtcctccagtcatattttcacagactgtctgtagatggcaaactttctgagaccctggattttttaaaatgtttttattttcttatttggttgagtatagaattctgggttgaaagtcatttgcccttgatgatttgaagatgatcaccatcatcttccaacatccggtgttgtcagcacaaagtcagattcactctggttctcactctattggaggtcatctgatttttctctttggcaaatttggggatttattgttctttattcttggtgtttaaaaattcctctgcattgttactaaatgtggattattgkttctattttatttttattttttaatttatttttatttatttattattattttttgagatggagtcacgcagtggtgcgatcttggctcactgcaacctcctcctgggttcaaacgattctcctgcctcagcctcctgagtagctgggattacagatgcacaccaccacacccagctaacttatgtatttttagtagagacggggtttcaccatgttggccaggctggtctcaaactcctgaccttgtgatctgcccacctcagcctcccaaagtgctgggattacaggcctgagccaccaagcatggccaatgtgaattattttttaaatgtattctttcatttatccttcttggtactctatggactttttttggggggaggggtgccttttaatctggagacttctgtgttttttcagaaaatttaaacactgcattccttctttctctttattctctcctctgccactccaattaaaccgatgttggaacttctgattgtggcttctatctctcttactactttgtcattctgtctaggtctttttaccctcttgtgttgctttctgggagaattctgtagcttgatctctgtattaattctctctttaggtgtgtctattctgttatgcagtccttctgcagagttctgcatttcgacagttttctatttataatttccaagatctctaattggttctttatcataaccactgtttttatttcataatagcttgtctttgtgtcatggctatgttatcctaccttttctctgtgagaatgtgtgtcttatactcaatgtcctgattgaattgttttcttaactccatttccttggatgtaaattctgtagttgacttagttgtttctcacagtattgccttgcctcagatgtttgtgtttctttcttgtgtgtttacttgtgaaattgggatcctgcctgagtctgttttctgcctctgttggtgcagactgttgggaggtgggcagtagccccttctgagacatgcagggttcaggaaggggatggaaggaataagatgtgccatcaggcagggcacctcagcagctgatcttccgcgtgtagggtgcccttggacctcacagagtttcctagtcatctggggctctgccctatgtctttagcccaataaacaactgttgttttctaaaattaaggtatccatattttctccttggcaggagtgagggtgggaggggaggggagatgggcagggctggacagctagcctgctgcagaatttcaacctatctaccttctggggcccaggggccacatcaygcacctgacttccatcacagcttcacagcagacttttctccctgtggtttctcttgatggctgaggcccctgtcttcaacttccctgttttccccttggcatttctattttggatttaatgccactccccatcttatttttgagcacggctattttagaactatccattctctcatttccatggatttgatataaggaggagactgtagcccaggaacaaaaatgactggggggaaggacatagtctttgatggctggtacatcagcatctctctcaggacctcctgtgtggcatgcaattgctgacttcatctcttgcaggtgcatttgtggtttcctcagagattctccatctgggggccccctaccacagtcctctgatgtaggccactgtcctcattgctgaccactcctgaccgcccacctgctttggtcctctcctctgcttggagctcacagccgactcctttctgtgacatctgcatctaaccccccaggaaactgtagtgtggtccccactgggtgtggacatgcaacctgccctaatgcaacctcctccccaattctgtcttctggggactactccagccagctttgggtctttagatctttccacaagagagccagtcatcatcccccatatatccaaaagtctaggggatacatttcagatcatgaagccccttccctcgctttagagtgggtgaagtaccctctacctccgtcatgggaagggtggggaaggggaccactccagtccactggcagctctccaagcgaaatcttctatgatctctccctcattaatctttaacttctctggtttactcttgcagtaggtgatgagctgatggttgaaaagtgggtttcacaagctttcagcatgacctgcccaacagactggcacctattgtaatgtgtttggtttggagacaccaatctgagacagaaagagtcctattttaatatcctatttccttggagtccataattgtgcattgtcttcagaacacacctcatgacatatgcattaattggtccatgtttttgtttttgtttttttcagggagcaagagggcctaatggctcagttggtgaaaaggtaaaaaaaaaaaaaaaaaaaaaaaaaaaagaactttcttctccctcctcccctttctttgagtttactataattggactgctgggctggaatattgaacatataaatgtcatggaacagagaggaacacatctcaaaggaattgctcagagaaggcagaacagctggggatggtgrggagtaaacacmcttcaatgttttctccttcctcacccctccctccaaatgcattcaaatgagtgcatcagcttatctccaggtgaactgtcaattagcaagacagctgtttctgtaccattaagtggtaccgatcagagaattcatcaacctaattaacttcaaggagtgattttctgattcaggcatgcatgttgttccttccatgagtgaacccagggctagataatcagcctgccctctttcctacagggtgaccctggcaacagaggcttacctggacccccggggaaaaagggacaagctggccctcctggggtcatgggacccccagggcctcctggaccccctgggcccccaggccctggatgcacaatgggacttggattcgaggtacttttccccttttctgtggttataaaaatgatgtgtactaagggctactagaaagaccagctagctaaaccctggtctcagggcagaggctgtgcggattcccctgtgagccgccagcttccaacaccacacctggcacaagtaggtgcccaggaactggatctgaaattctcattcttgctccttccccaggataccgaaggctctggaagcacccagctattgaatgaacccaaactstccagaccaacggctgcaattgtaggtcgcctctgaaaccttcattatgagggttgtcacactgtcacactacagtgaggaagctgtgggctgcatcccggctctgccactttcaataactcaccttctctgtgcctccagcccccaactgtgcaatagggaaatgagatgctctttacagcttgtgtctttgaggaacagcatagaagttttgcagaaaacatgatgtgggaagagaacttgaaaatcatttttatctctcttcatctatttctctctctccctctgcctcttctgtctcttaccactaagcatctctactytatttcctccctccagttgccccattcaatgcacacactttgccccaggtcaaagccctgtgctcctggcaggtgcccctccctactgcctccagcccctggcaggtgttgtccatctcctgccatgaagcgatgccggctctcaggaggaccgatcccctggatttcattctctttgttaaatgggccccagagctgagcccttcagtctagcamagattcagggtcaagaggaccctcacccaatgctgggagagggccgctgattctctcactctgtggagtgttgcttccttctgactccagaaggggcatttttcgcttattcttggttcccattgcctgggacaaaataagcataaaagcttagggggagatggtgagacaagaggctagatggaggtgagcaaagtgactagaagaatatttatttttgtttatttttccagggtctcaaaggagagaaaggagaccggggacccaaggtgaggtcacagagccaaggtgggggtgggagggctttccagcctggttctgggagcattatcgctgtacagtgaatttttttctcacttcttgctgctttgaccagggagaaagggggatggatggagccagtattgtgggaccccctgggccgagrgggccacctgggcacatcaaggtcttgtctaatgtgagtatcattcaggtcagagcttgtctacatattttccacctttgccaaagggaggagaaggttgtccatgacttcaaagcttctggctatgcaggaggcatgtagccagtgcctggtgttagaacttccacctgccagcacctacctgttcctcccccagttccactgttctctcacatggtgcttctagatttgtctcttctgattagcagcatttggggtcaattgaaaaaacaggctaggagcattagagatgttggggtcttgaggaagccccagataagcagtgcacactttccccagccaagtgcagagcacattgagaaataaagccaaagatgaggaggtaggcccagataccaccttgattactgatggaggttaggtggaaggccttcacccagtgggagagccacatgttcctgccaatcagacggacttgcccatgggttgccagatgtgcttcccagaggcaggcagatctgaaggaaagaagtgtggctgagctgggcatgccccttggtgcttcccaaactgcccatcaggaaggtccctccacctcaccacggagggggtacaggagccaagagaagccaaggattacacccttcrtgtcacaggaaacatctttatgtgctccctttagatggctctttgatagtctattaaaactaaaactaaaaatacccattctccaaaatcccacatgggaagatgyccacacaaatggaggaaagcatcctcttcccaactctcctcaacaaggaaggcagtaacttcatccttcaaacccccatcatggtacagcaagtggcctatttacatgtctgactcctccacctgccctctggggctttttttcttctctgtatccccaccactggcctcatagtgctggtttaatcagtgtttgctgaatgaaatgtttggtgtcattgaattctctattcctatgataaatactctggcataagcactcatgggcatgcactctgcatcaggtccatgctaggctctgtgggtataaagataagtaaggccaggcacagtggctcacacctgtaatctcagcactttgagaggccgaggcaggaggactgcttgagcccaagagcttaagaccagcctgggcaacatagcaagaccctgtctctgatattaaaaaagtttctattttaaaaaattaaaaataaagataagtaagacagagttcctgtcttcaaggagcctccagtgaggtcaggagaagggctgtaacagagctgtaactgacaggcaaatgaacataaagaggggaacaagggagaaaagactgtttgggttatgaggaatcaaggaagacttcctagaggaagtatctttgagcagggattggaaagctgagaaggattttaccaggtaggcacggaggacagaacttccaaagctctagtgtcagggatgccctgagccaaagcagagggtaggacaatgtggtgtgctccaggtcgagggagctgactggcagaggatagtgcacatgggtgtgtgtagagaatgatggaaattggagagaaggctggaatgtgggctgggaccagatcgcatgcatttaatattaagacatcacatcatgaaaaatcctggccctttagagagaaataacatcatgctggtagaccacagaaagacaagccccaaataactggaaaaaggatgactaaagttagaagaaaaaaaaaacacgatttttaaaaatcaaatatgtgtaagggtgtggggaaaaaggtaatctcatgtgcttctggtggaagtgtaaattggcccctttggatggctctttggcagtcttttaaagctaaaaatattcatattccaaaattccacatggaaagatctccacacaatatggccgagtgaaaaaagcaagttgaggagtaatacagcctgatgccatttatgtaaaataaccacatggacaaacacacacaccccaacactgtgctttctgtgggtgcatataatatgtatatgtttaaactctaaaaagagaagacattcgtatattgtgtgatttaaaaattaagtaaaggaggaaagtgcgaaggcagctcagagctgttttataagaagggggagggagagctgtgtttggcagtgggctgagggcgttctcagtgtctgcggtgttccgctatgctgggtgactttaattaaagctttgctgccaggaacaaggcagaacacatgccatcctttgtcctcattgtctgatttttctcttttcagtccttgatcaatatcacccatggattcatgaatttctcggacattcctgagctggtggggcctccggttggtatctacagctgccccagaatgtggcttttacccagacgcccctgttgaaacaaagtcgggttactttggaatccttttagctcctgaagcgtagagctagaatatatcaaagtagaatggaaagaaagctttgcattttttgaaaagttgctttcayattaatttgatcatgtggaaagttgtctccaaagcagtggaagcttccagtcctgtgcaccggcaatatgtgtcatggaaattagagaatgctaagtaacaaacagatgacatctgttgcacacttttggcctgcttttatttacattatcttatttcatagtataggaagagcctggagacacctttccttgtgctcaagggaaacgaggaagaaatggactcattctagtctttatagccccattttagaactctggaaattatctgtgtgttaatttccagatctctaaaatgggattataatgtatataagaaatacacattatttttggccagaagtggtggctcacgcctgtaatcccaacactttgggaggctgaggcaggcagatcatgagatcaggagtttgagaccagcctggccaacatgttgaaaccctgtctctactaaaaatacaaaaattagctgggcatggtggcatgtgcctgtaatcctagctacttgggaggctgaggcacgagaatcacttgaacctgggaggcggaggttgcagtgagccaagatcgcactactgcaccccaggctgggtgacaaagtgagactctatctcaaaacaaacaaacaaaaaaaaccaaaatatacattatttctgcaagttggcagagttgactcatggcacaatggccctaagatgaaggaagcttcctcctacagcctgtagaataaatactcattgcatctcccagcatctgctggtcagcacaggagaaaggaaggagctctggccttaggagccttgaggttgcagccccatcttctccacacaccactctgagcccctaattctcttctctgatgacacctcaccagcctttgaggcaacttgwaagaagtgagggatgtgaaactgcttagcacactgtgacgctctgtgcaagtcattgtggagacaggtttatgccttcacagctgtgcaatgccgatgtccctgcctctcctgcagatccccatgaggttgccctgaatcccattcatccagatccaggggaaaatctagtgctgccccaagattcctgcaaatatctgcagactcttctggcaccaggtttctcccctgctgagtgacctcattgtgagccatcttcctgtctcctctgtactgcatccatttgatttctatgaaaaccaataatccaaaatacctcaataatgaaaccctagagcaaaccagctaacaagtgaaagtttcttcccaaggggtctttgttttccccaagctattggaggtttctgatattaggtgggtggatactgaagcaaaacacagagagactaaaaccagagattgggcatccctgtcctcacagtccctgggccttgtctgcctgcattaccatgcctccaccccttctctctcttccttgctttctttccagtcactgtcctccccttggcaaatccagaccctcacagggccccttcttccctaatgctgtgtcaatccgtcttcccagctgtgggaacatgctgaggcctttggaaggggctgggagggagggggtcctgctgactctggaaatgccgctcctaatccagcgtgctctatctttggtgtgtcacaggggcyggacgggttgcctgggctgccaggatttccagtaagtaccaccctcgctgtcttctatctgtgccccgtggctgcgatcattctgttccttccacctagaatggcatttcctccatctatgcatgactgagctccaggggcatcttgttcattaactttttcttgatatttttgatagatatggggttttgccatgttgcccaggctggtctggaactcctgagctcaagaaatccatctgcgtcagcctcccaaagtgctgggattacaagcatgagcccctgagcctggctgattttctgaactttttacattttctaaaggcacatatcatatgataacactaaaaatagtgctaactagacgttaaaaaacaaaagagagaatggcaaccatgaccacgattgtgaccatgactctgaccatgattcttggttagcagaagaaaaggccaaacccctaagctccagccccggcttggctgctccaagacctggggcacatttcagagcacactttcctctaaatgagtggtcctgtgttcctgagggagtcccaggctctgcaggagagcctccaggacctccactgcagggagtaaggagggggccaaataggcacattccaggccactgaccttcaataagggaagcttcactggacatatttgtatatattaggctttcatttaagactttatttgggggaaaaaaaaggaaggaaaagagtttcactgctaaacaataataacaaatagttgaaagccactgctgtaatgggtaattcastctttcatccagacaagacaggaacttgtgaaaagttaaaatagcaataaagtgttgaaatgcctttttgaggcagatgtggctgtgtgagtcattgtcacaggcattcagtgtctgttggagttgagaagaggttgcctctggctgcatgtgtggatttggctctgcagaggggtgggtgggcattcctatggggggggtggcatgagtgctggtgcagaagcaatggaggagtgcagagaggctgcgggaagggagtcaacctgatggtgtgggagatgagatgttgatgcctggctgggatgggctggggtgccaggctaaggtacctgggtcccatctcataggtagtggggagccagagaaggggtgggagtcgtggaaggggatagtggaggaggcgggctgcagggtggcctggaggagccgtggggcaagcagatgcagcaggcccagataataggctggatcagtagtgcccagttggaggaaaccaatgttcaaaaaagtgtgaagcctcaaggcctcttaacactcagtgctatcttctttctgccagaccacagtttctggaccacttaaggttaagaaaatgtcataggtaatcatgacttccacctacctgggggatggcagtgtgtattctactgttgagaaaaaatatatttctgattggtttatgcattttaatcttaacgaacaaccaaatactatataacaattccttccagggycctagaggaccaaaaggtgacactggtttacctggcyttccaggactaaaaggagaacaggtaagaggggcccaggtatctgagtgrgattgggcgctggaatttgctaaacgtttcagattggctgaaaatagctattaacttttctcttctttgakatacaattcacatgcyataaaattcacccctttaaattgtacaattcagtgatttttggtgggctcataaggttgtacaacctcatgaaccactctgtaattctagaacattttcatcataccagaaagaaaccccatacttattagcggtcactctccagctgttaacttttttaatctccaggttctctatgagacgagaaggtacgaagtgggtagtgaaattgatttttaccataatttggaaagagaactcaactcaacactcctttgttctcacacacactgtgctttgtctaaccammtgctgggcatcccccttagaacatgcactgcctgaggacaggcatcctgccagcttcttttccatagctccaatactaatatggggcctggtatacaaatggtactgaatacacttgttggacgaaagcatrtataattaatgagtagaacaaatgttaatatttataaattataaattgagcattctgcagttgaacaacagtcttggtccaaartctctggaataaatacttagcacacagaacacttcctgagaactcccagggtaccaaacctattgttgtgcttgtattcttttgtgtttgcctcttagaattaactttccagttggtttttatagataagggggagagtgacgtccataaacagattaatatattcactcgtccatgtatatactcatccatctttcgtccactgacccgtgtggtgtgccaggcagtttcctgtgctaggcgtagggatatagaaataagatgaggaagagatatgcaaagagctaacagagcacatgcttacagctggaatggagctctgtgcaaagccagtgggagcactgtgcaaccccctgagcctgccatggggagtcaaggagggtgggtgtgctctgtgggatgggggaactcctctcgttcttctctccccccatcattctataatataatggtctccaaggaggagagggcctccaatatctagtgggccactgctccagggcatggagggctcggtatgctgggtgaaggtttggcatcacgtggggatgtgtcttgggatgcttttcctgccacaggcctgtggagatggaccagggctggccagctcaggcttgggaggaggcccagggaagcaagagcacctcttgctttaaacactctgtttaaacactctgtttcctatgtggtaaggtcagatggatctagagggacggacatgacayccccgccctaacctcctgccaccytgaatgactggtccaggcagccgggcagttctgctctggccattgcagtgaacgtgctttctctcactctgcctctaatgcttttgtgcttgcttcttctccctgctggcgtgctcaggactacctttcctcaycagtggagtggtaagatctaaataccaggtgtgggcttagggggatggaagaaagaggctgctctgcttgctttgatgctactgtcctagctactcccagccccattgaaaagagacttctgtgtggctcagccctgctccccaggggccagcattgaagtttaggrccaaagcctcagagtcagatagaaggtttctgcacccagtcttgttctcttgacaatcatcttctcagcagcctctagcatagtagatgtctctgctgaggacaggattggggtcaggatcctgtgttcttgccaccagtctacccatcactcattcytaatgtctgggatagctttgcctaactaagtaagtgtttgcacaggagcttagagtttggaggcaacgttgcatatggagacataaggcctccatgttgacagaggcctctagtttttataccgtcatctctttcctaatttcaggtgttttaacaagaataagtattcttggtgggaacagatctcaggttgagttgctaggaaagcaagctgtcaaatacattgggagccagagcttccttgagggcaccatgtggcaggagatagacaggaccacactggggctggatcctggagggttgagagtgaggatgcaaatctgttatcagtgggagcctgaaggggcatggaagacaggactgtcctgtgccttaggacggtaactctgatggtgcatagagggaatggctgagagaacattcattcatttaggaggctgttgcaatactctagtacgaggtaattttggagcagtggggtttcaagtaggatgaaggcaagagaaataaatcatggctgcaggactcagaggtctctgtacaaggtggcaaggaggagtctctgtacaaaactctctggacaaggtggcaaggaggagtcctgacttcattgagatgttctctgaattgcagggcgagaagggagagccgggtgccatcctgacagaggacattcctctggaaaggctgatggggaaaaaggtaattatgtcaccagaccctgcaggcacatatctgccccagctttgcatctttgtttctgtcccaaacagtgacaagtatatatcttcctgttttagggtgaacctggaatgcatggagccccaggaccaatggtaagtcagagcgtctctcagctggatctgggctggggtttgaagcatttttcatacttygatttggttagatttagttgtcccggttatgaaaattcaaagatgtggcaaagatgtgcaaaatgtgcatatactagggtaaggctgactacaattaaataaacttttcagtgatttaacacaatagcagcttatttctcgctcttgcaaattccactgtggttgttctcagcttggyatctctcctccaagaagtgactcagggatccaggatgcttccattctgtgattctgccatcttgtggattcaaggtcgcacaggagctagcaggctgaagttggggagggggaagagattgtgaaagataataaacatcacttctggcacattctgtaagccaaaacccagaygcttgtggcctcaaaatgtagtttagctgtgtgtccaggaaggagaggtgcacttgcagttataccacagaacttgccagctaaagatgaccaatttcccagraaaccctcaaaggaaccccacaaaacctctctgggatttttgattctggttgtgaatatgccactcatttgctgtgagaccttgtgcaagccctcttctctctctgggctcctgttttcccatctgcacattgaagagactgaattagtactaaatgatattagggcccttctggccttacggctctgggaatccataacccatctgggcttctgagcagctcttgccatttctctcaagggcgaaccctaaacttacttccctgtgtagaacattctctatgggtcagactgtactgatgcttcacataggtcatctcatttcatcttcacaaccccaagaagtgactctcagaatccccattttatagatgaggaaactaaggcccaaggaggttaagtaacctgcccatgtgacacagcttgtaagtggcagagtggggatttgaggccagccagtcaggctttaggtccagtctcttctcagatgaacctcactgcctctaatgaacatttgaaacattgaacatttgaaacattttgggctagagaattgtatacaggtttgtttggttgaagttggatctcaggtgtggggagaaaggacctcacatttctgtaacagacttgtatccttgaagaatggcctgtaactttcgaggtgaatccttcaaaagaccttctgaggcctttggtccctgaagttaagaagagtggacacccaaagtcaggtagctaagacagactgagagattcttgtattaactactggttaaccacctactaacctccaatactgtggaaaatacaaatagttagtggtgggggtcagcaggctgctgcagatgccatggcggtggttcctactgaagcccagcttggacacagcttgccaaacacaggcagtaagtggcaccttcttctaatttgcatgaaggtgctgtgtgggctagctgtggccctagtgaccagtgtagcttataacgccttctcaaattcactggtgtcctgttacacaaagtgtagaccatgcaccagcatcactgacatcacttgggagcttcttagaactgtagaacctcaggccccacccaagacatactggatctgcatttttaacaagatccaggtgattcttaacacacattgatgtttgggaagtgtattagtccattctcacgctgctatgaagaaataccaagactagataatttacaaagaaaagaggtttaattgactcctagttccgcatggctaggaggccttaggaaacttacaattgtggtgggaggcatctcatcacagggcagcaggagagagaataagtgccagcaggggaaatgccagacacttacaaaaccatcagagctagggagaactcattcactgttatgagaacagcatggggaaatctgcctccatgattcgattacctcccaccacgtccctcccatgacatgcgggggttgtggaattacaattcaagaagagatttgggtgggcacacaaagccaaaccatatcaggaagtgttgcactagaacataccaaccaagtggcctgtgccctgtcaaccccatctgtctttgcttttctttccctaagagtaatacagactgggtactttacgtactgaccctgtttcaactcagtttttgtttgtcatttttcagagcatggctatgtatgtttatggtaggatgaaaagggacttggagtgccccaggcttaaatcagtcattcttctgggagacacagcagacccagctacagggttggaaaggcgcagactgagggtagaatttgttctaggaagacatacatcatcagtggtgttgtctgtcaaccaagtagtttacatcccagacattagaaggcaggagggttcctgaaggttgcaacagaacagtggttctagaagcctgtggtcctggaaagccagcactgaaatagggtccatggtctggaactcagctggatgactggggtgtcagaccaagactctggttcctaggggcaggttagagcaaggaaggaaccaaatcctagagtgggttatcaggccaggctggcctgaggggcgaggcagggctgcgttattcagaatgggggatgcgataagccctgggacataagacctagggcagaggtccatgttctgggctggcccagcacctggctaccagggagctgaggccctgagctactgacctcttgctccttagttaaccctgactgcgaggggctgggtccagagtctggggtgggttggagcctgcaggaaagcaggggatggtgtgggttgagcaggtgcttctagctgagagcggagaggctggagacaaggaggccgcaggcaggggcttctacctggctccctgccctccttcctcctgtcagtggatcatcgtcaccactgcctgcaaaagcgggcttgcactcctcatttccctgaaccaagactttctgttcttttctaatctggcatttgttttgcctctaggggcccaaaggaccaccaggacataaaggagaatttggccttcccgggcgacctgtaggtatcagtgttcattggacaggctggagggggargacacgtgggccaggctggtctgtgggcggagggtttactgaggtgtctgctgtgggttccagggtcgcccaggactgaatggcctcaagggtaccaaaggagatccaggggtcattatgcaggtgagtcaccctggggatggagccggaggttggtgtccagagagggtgagagagtgyggggtccacagagcagggcctgtggactgaatgttcaggaatgttgttcttcttccttcactgccactgccaaaggtcctcccacccagccctgtccttcagctccctctcaggagggtcctgccacctaaaacaccttagtggaaaatagactttcttgtgtaggacccagagggagtaggggagaaagggatctggtcatgctcagaaaatgtggttccaaatcccagggcctctaactctagggtaatgtcacctctcccctcctttacacagtcccagggatcactcacatcactaggggctcagtgagtgctggaagtcagtatcaaaggcagatcagstacttaggtggggcctcccaggttggcaaacactgggcagcagcagggaccctggtctagaagaaaaaagccaatgtttattcagcagctgctgtgtaccagacactgtgcaaagtgattttgttttgttttgttttgttttgttttattattattatactttaagttctagggtacatgtgcacaacatgcaggtttgttacatatgtatacatgtgccattttggtgtgctgcacccattaactcgtcatttagcattaggtatatcttctaatgctatccctcccccctccccccaccccacaacagtccccggagtgtgatgtttcccttcctgtgtccatgtgttttaaggagagtttctcatttagtcttggtgataactattgcatgagatactatgcagggatcttgttttacataagaggataccagggcctctagaagtcaaggcacccacccaaggtgacccagctaataatccccaaaccaagatgtaaacacagctctaagtctattgctgcttctgtttgtgccacactgcttttgctttgtatgcccagaaatccagaaatactattttcctgaagcattaggggttgagtctcactcaccaagcccactggaaccggcaggcaaaccagacactgacgccttcatttagagtgatcaatacactttctgcatgaactaaactcttcatgcctgccctcagagcctcacctctcctgctgcaagctcctgcctctaggcttagaggagaaactgttgcatggtactaaggccaagctggcttcactttgaaaatgactgtgctatctaacaasagttttgcatttatgcttgcatttctgagacacatttcctctggcaatatatcacatgagggacccccacagtccattcccacccgtatactgggaatgcactgataggggagccttaggctcagtatcaactgggtgtcagaatctgagttgcaatctcagttctgctgtaagttgctgtgtggtcttgagcaggtcacctcccctctctgggcctcattagctgcatgtgttaaccagagacaatacttgttgccctgccatcttccctatggtttgttgtgaagatacagtgaggccagggacatagaagtgctctgtggctccctgagcaacctgagagagaagttggttggcttcagcagaccctcctttccttcctctggaggaagtgtcctgtggctgcccctgcattcacaacaacctgaactaatggaatggcctttttttcttccttcagggcccacctggcttacctggccctccaggcccccctgggccacctggagctgtgattaacatcaaaggagtaagttggcacrcagtgggaagaccttcccrattggcctaagctggagtcaggtgtcctgttgacctcacctctcttgttstcattacccacaggccattttcccaatacccgtccgaccacactgcaaaatgccagtaagtagcaatcactgccttaaagagcaggctttggcatggatagcaacttggagaaaaagatcagtctttgtcttgggccctttctatcctcaaatgtcctctctgatgtcttctgtcccctaagtgtagaccctcaagtgactagaagcttttagataacaggtcgtggcaatgaaatatactggatcttctaagggtgcacacacggtgaggtgcttcttttcatacaatctaaaaagcagtgtcttttgttattgcgaccacattagcttcatgcttggagtagtataaaactgggaaaaatagacccgttagaaaacatagattagaaaacaatccatgccaacccatgatctttgcattgagaactttgtaactaactatgctgccctttcccagtgatcacatcactgcaccgcacacaacactgacaggcagggctgatctctcccattttatgataatgaaacaaactgtgactcagagaagctcactggcttgtccaaggtcatgggacttgactgagctgggatcataactcaggtctcctaaccaccaggcagcaggtgcagacactgggatgctgaggggtcaggcacttgcccggccccccagccattgagcagctctgtccctgattttttacccacaggaagagagtcagatttctgtgagaaaacccagtggggagggtgggccttgtgtacaggccttagtcacagaaccatgcataatcattctctcattcattcracaaatatttattgagcacttatgcagtgctaaggactctgccaggccctggggacacaacggtgaactagacggatgtggcctctgctctcaggagcttgcaaattayaatttagaaatattctttgaggtgagttcgtaattgatccctgttggaggtgatgttaaggcttgggtcatagccttcaaaatgacgcagtttggccgcgtatttgcccagacatctggctaagtctaaacgttgaggcatccaagtctgcagctcagggcctgggaactctggcctasagggcaggacccacctatgtcaggtgactaacgggctccaggctctacatggagacaacagcaacccagtatgtgtttatatccatggcctgaagagaaacataaaatctcagtgctggagtgaccttcctgggcagtcgctgcatcccacctgcttatcacacaggagagaccacacagcccagagaagcaaaaggctggctccaggtcacacagtgagtcagtacagcagcctctcctaactaacatgatttcaggcctcaaatgagccagccacagaacagcacttgacaaattttagagtgcggtaaaaatgctactgcaattatcatgacctgcaccaggacctctcacagtaaccatggcctttgggggtcgtggggatacctaaaagaaggaaaagataggctcaaagcatttttagtaagattttttacttcatattgcctggctagatactgtaggagctgggtcatagacgtttcttgtccaactctcaaaatggacattttgaaacagaaatgcttcctcttacagccagcatctcatgagccccttctagtttcagctccttccaacaycctaatcatttacagctcatgtctgtagtggagaaactttatcagcatagcctgcaagataacagcttggagctgcaactttcatccttaacttagaaatgtttttcctggtagatttcctccccactcccatcttttcttgatggcccctgagcagcttgtgaccctccacccgtaagcacagaaggattttggcaccatacggatgactttgattctacacatcaattgggaagaagccaggtttcaagtggctttgtctgaatagagaaggaaatrcaggaatctggggaaaactgggaaggaatattatccagaacagcctggactccagacccctgaaacttaatgaggtgtccagaatagcacccccaatctaatgataaccccctttgctaattacctgcccatgatgctcatctttgattacatgcaatagctaagctaatggctgacccggtttcacggttgggcatgtcacttgctcggatgcttgaccttacacatgaatcaatcccaactgataagaaaggaagacaagaatgttcacagttggccaaaccaccactgccacgatttgttgtcttaaagctttgggcttccttatggctgagttttttggccattaggcctcagctctgtctccccagctcaactacatcatgggtctcccagtttaaagcctgggatgtctgtgcattgacaactcctggggactcagggctttgggggactccagagccaaaggaaggcctgactctgtggcattgcctcttttgtcacatgcycccgggacagtggctgcctgtttctgcaaacaccasggcagagcttgcagtgcctaacctggccttcctctctttccaggttgatactgctcatcctgggagtccagagctcatcacttttcayggtatacactcccttcttcatcatttgtttctctgggacatctccttgaggaagatggttttcctttgcccagtgcagggcgcagactaggtggtcaggaaggtctaactggatgctgtaggggtggggatggcagcygagccaaggctgtggggctgtgcacctctctttggtttggtcacacatgtgcctattctgctcatcttagctgagcctcctagttggcaacaagcactctgttctttcaattgttcatttgttcataaaacattcactgatgcctattccttacttggtatgatctgcactgggctgaggcagattccaagagcctgagaagcgctgttcctgcctctcaggctcttggaacctgttaagtgaaactactttaaaaacaattatagtgcattatactaagagctgatcagggaagggccgtgggagctcaggagacccttgcctcggtgtccatgcaactttgtaagcatctcctgggagcttgttagaaatgcagaacttcaggccccaccctagacctgctgaatcagaacccgtgttttaaccatctcccgggtgaggtgagtgcacagcaaagtgtgagaaatgctggctcagagggtttgagtagtaaatgtcagcatattcatagccacatgcaggagctttgctatggcacatcagaaaggcacaggccaggggatggggcctgcaggtgagcagtcactctggtccccctgtcctcacacaccctgtcacgccacttggggtttaaatagaggaaggtctttttcctccaatattcactttcagcttggctgtgtcaccccggcccacgaggtggtggtctccctgatgatatctagccctgtggtttttctgtcacttctgcttaccaagcccagcctgtttgcaaactctatgcttagattcagttcaaggctcccctttcccctgatgcaaggtggaccttggggagcaggggatggagctggatttgttttctcagattccccaattgttcctcttccctgtgagcctcccctggaaggagggggagggaacagatctttctggatgtgacagctcctagtgagcaatcatcctgcttactgtgtgcagctactactgctccggttggtgctggtgcacttgctgtcttctcttctgatcactgctgtctgtgggctcagtgtgggtgaaggaggccccatgggccccactgcgcaggtcattggtctcacacagcattcccagggttggagaggcctcgacagatgtagttgccgctccctactgaccccctgttgacaccatcattcctgtgatgctcatattccctccccttcattgagaaagcctgagtcgctagcctcatctacactttgtggccccatctctaggctcaagaccattggtgggttgatctgtcacacctcttgggaacgaggaattcaaagacctagcgtccaccctacccatcaaggtggggaaagggaaccacttcccttcccaagcagtgatctcccaaaaggctttcctccatgccccctcccatataaagagttgaggggaaaggtggggatggaatgccagttctgcagaaacagtgtttctcactagtcctgtggggatgtacaacacttcatggtgggcattctcacaactttgtacgtagaaaacttagygcccttggttgtcctgtgcgggcactcttgggagagccctcctgttcccttacaaccccaygctacacaggcctagatgagatgagtctggaagattgacatggtgctgagtctctgtcttcatttgtggcactgaccaagccagggttagcygcagcctctgctgcactcacgggatgcgctgctggaacctcagtgagagcacmtatttcatcttgccttgcgttactgtgagctctgtctgtctcccagtagactgagcttttcaaggttgagaatgtgtctgaagcatctacctctgccctctttatgattttacacttgctgatctctcaggagggctttgtttgagtggactttgctaaatgagcttagtttgaaaacctgtctcagaaaggttttatatagaaagaaggtgattttccatttttttttaacatgtatrtgtttggtggcaggtgttaaaggagagaraggatcctggggtcttcctggctcaaagggagaaaraggcgaccagggagcccagggaccaccaggtattccagctcttgttctcaatcttgcctttgattttttgctcctgagaacaaatgcgactgagaaatgtgacctagccagagggtaagactaatgacattccaccctgaccacaggctccactggtttctagtgaaaaccaagcatgggcctggcatgtccaatagggaacattgtcaagagagaccagaaaatccaatcattcatcttttatatgcaaaacaatgtccaaagaaggccagggacctacctgggatcccacagtgtctgggttgatgggcccacagtagctagcacctgtttctgcttccaagcagactctgttagccaacccagtgcaggctcacatccactaagatgtaactgtggttgccaacttagagacttttattttaaaatttctgaaattacaatcgtgaattttacgaagcatttctttttcaggtcctccacttgatctagcttacctgagacactttctgaacaacttgaaggtgagtatttctctaccaatatttggcctgtgtttttcaggttttggtttatgtcagagactgagttcatyccactcttactgaaatattcctgtgttctctgcttccagggggagaatggagacaaggggttcaaaggtgaaaaaggagaaaaaggagacattaatggcagcttccttatgtctgggcctccaggcctgcccggaaatccaggcccggctgtgagtagagacccctccaagtcatctaccccaaagacttacagctttccyggaagcccccaatgggactaggcagttagggctagtcattgtactataagctggaggcagagcttggggattagccagctctttccccatccttgttgattgatgggcaggttggctgaggtccctggagagaaggtagctggtcaaggccacatgaaggtaggtaacttccaggccattagtcacactgccttattcatgacattggtggaaaattcactccacacaaagaatgattaatggtgaatgcatcagataacagaagcagaatggaaggtaaggagatatttttagaggagctgtttgattcttctgaaattttatcaaaggagctcctagataggtgtggttttcctaggatgagagatttttccaggtgaaaggagagaaagtcaagctgtgcccccaacaagaatatgactagatcattgacctttggtcccagagctcactgtgagggtagaaccagcaaagccagagatcagagttctgcctctagctctgcatctaatttgcttcatgatcttgggcaagtcctttcacttctctgggcttcagtgtctccatctgtgaaatgcaaaggctagactagatgatctccaaggtcccttctgcctccaggagtctctggggttctctgtagaatcattcaacataatgactgggctgccatcttggaggccttaccccaccttgaattgtgcccaagattgaggatagtaataacaatagctggtgtttattgatttcttttaaatattctcataaaaggactagatgggacttcgagtgatgaatgatgctttctctctgttattgtgtgcttgccttgacagggccaaaaaggggagacagtcgttgggccccaaggacccccaggtgctcctggtctgcctgggccacctggctttggaagacctggtgatcctgggccaccggggcccccggggccaccaggacctccagctatcctgggagcaggttagtgccgtaaacagtgcccttgttcacgctgtccctaccattgtgttcaaggtcacagcatctgggtggcttgtcacagctgcactgcctaacagagggctttcctggataccgccttctttcttttttttttaattgagatacaatttgcacatcataaaattcacccacctaaagtgtctaatccagtagtttttaatatattcatgaagttatgcagtcatcaccactgtctaattckagaccattttcatcacaccaaaaagaaatttcataccaattagcagttgttctcttttctctctttccctctcctccaccagatctgggcaaccatgaatctacttctgtctccagatttgcctattctggacatttcatataaatggaatcatataatatatggccctttgagtctggcttctttcacttaacacagtgttttcaaggttcacccatgttgcagcacggagttcattccttactgtggccaaataatattgcattgtataggatatacattttgtttattcattaatctgttcatggacatttgggttgtttctactttttggctattatgaataatgctactatgaactttcgtgtacaagtttttatgtgaacatgttttccgttctcttcagtatatacgtaggagaaattgctgggtcatatggtaactctatgtttaactttttgaggaactgccagactgttttccgaaggagtcacaacatttctcattcccatcagcagtggcagtgtatgagggggttccaatttctcctcccatattatggtatcctcattgtatctttttgattatagccatcctacttkgtatgaagtgatatctcactgtggttttggtttgcatttccctaatgactaatgatgttgagcatcttttcacatgtgagtggaaacttcctggctgctttgtcaatgccttaggggcgtgagaacctgtcttaatgaccagcagtgactggaactctgtatataaaaatctattcatcctttagagcctcacctcctcatatgcaaaactggcaaaattaaagaaaatctctatgtaatgagcatgtatcagatgccaggcattttgctaatcactttgctatggtattttattgaaacctcacaacaacrctttaaaaaaagcattaacatccccattgtacaggtaaggaaagtgaggcccagagacatttaggaacctttccaaggtcacacagctaataagtgacaccaacaggattcagacccagagcagtgtagctccaaagcctgtgttatttctactatgtccattggaggagacaataatagcagcaataatagcatgaaggcatacttttttgttgtttggcttggcaggagccaggtatggtggaagcatacctggaaagagacctacagagtccttggcataaggagagctttacacaggaggtgactttggggctggggctttgacttagccttggatcttttggctgcaagtgatagaaacgtaactcaaagtagctcaagcaaaggggaaatgtactgggtgtgaaggagggagtgaacagtcaacttgtgggagaggtagataaacagctggacctcaggaacagccagagccagggactcaacccctgcaaggattctctggccatctcttgtctcggcttctctctgcatgcagtttcacgcttcctcaccacaaaccacatcctctgcacagcgggaaatatggttactgacaacttacagcttccactgtcagctagaaatcttgaacttcttttactattttagtttgaaaagtcctgggatggggaagtcctagagaagggtcctgatgrgcctgacttgggtgaggtacccaatcttggacaaatcacctatgaccaggaggtcggatcacatgagaacatggtagctctttctggaaccaaatggttgtagaggtgaagggaaggtcccaagagaaggagatgaggacactggtcctacaaaggaagaaggtgccgagtgkatggaaccacaggtgcccacacagccatgagggaggagtaggactacaggaggtggaggcatattacagggtgagtgcaaggtggagaaaawctgttgtccacagcaacactacattagggctgccgggatgccttgctgcattgagcaaggattgcttctcacataatgtatagcaattcagtttacaaaacactttcatggccattatcccatgtagtcttcacagcaaccctgggaggaagataaaacagatattattataaaattcatctcacggatgaagacactgaagctcacagaggtgaagagacttacttgaggtcacaaattctattaggaggcatggctgggatccaaatccgagtccactggccctctatccactagacatttgccacctrtgtgtgggtgttcaagtcctatgttggaactgaacatttgcttgcaaygacctgaagractgtataattttactggggcttgtaaaaacacccttaattctgccaagagcttggcagatttggaggagttgtcgggggtagggtgagcagaggatgagagaggtagaagaacagccaaaggaatagttgtaattatactactttatgtttgcctaaagtaagggcttttcagttgaggaatcatagactcctagmgagttcaaggatatacctccaggatttgtcatcccagtaatatttttttatagaattatgtgtgcatttctctgggaaagagggcactaaccttgatctgatttttaagggcactgtgactcttcaaaagctaagagctcctggccggatgaatgctgtacatgtacaattttcaaagcactcagttctcaccgcagcccagggaagaagaaatgcctattttacattttgcagatgaggaaacagctttggagagcttgctgtttcctcgagatcacacagctaggaatggacaaacttaaggacttgagtccatgtctctggccccaaggccagggctactgtcactgcaccaccctggtctcctcccactccctagagccttctcttcctctttctgagcctgcttcctctgttcagtgtcacatgcttgtctcttgggtgaaataagttatatgagtcaggacatttttgaatgcaagtgacaaaatattcaacttaagctggcttttataaaacaaccacaaaaggaattgattcacttatgaaacggaaaagcactagccatggcttcatccagggtaacaatcaagaatcccagctcttccctgaaccagtcaatgtggcctaagtcacacgctgggggcacagcacccaagatacaggtggaagttgggatgctttgtggcgctgtgaatggggttgaacacacttctctccgggagtcakctgatacctcagacatttttcagagtgtggtttttgtgtaacttctcttttctgttttgtcttagctgtggcccttccaggtccccctggccctccaggacagccagggcttccyggatccagaaacctggtcagtattatcatcagtgtgtagtcatcattccatttgggatagatatacttaaaactctgcctaygatctcctgtgtctgacatcccttggggatcaggccttcatgatagtaggcttggtgcaattccataaatagtagaagggatttgttatctatttggrtgacttattaagtaaaaagacrtgaaaaaacaaaatcatgtatatgtaagttccaccattcraatccttaattgactaagttataacaagaaccaatcatattacttatatatttatatatatatatatatatattttttttttttgctggatgaggggtggacggggtctcactctgtcacccaaactggagtacagtggtgagatcacggctcactgcagcctcaacctccctgagctcaggtaatcctctcatctcagcctccagagtagctgggactacagatgcacactaccacacctggctaatttttttttttttttttttgtagagacagggtttttgttacattgcccaggctggccttgaactcatgggccaccaaggtgattctcccaccttggcctcccaaagtgctgggagtacagacacgagccaccacgcctggccaccaataatagtatttcaaaaagcataaacctgctcgggtgcggtggctcactcctgtaatcccagcactttgagaggctgaagcaggagaatcacttgagtctaggagttcaagactagcctgggcaacatagtgagatcctgcctctacagaaaaatgtaaaaattaactgggtgtggtggtgcatatctgtagtcccagctacttgagaagctaaggatcacttgagcctgggaagtcgaggctccagtgaaccatgactgtgccactgcactccagcctgggtgaaaaagcaataccccatctctagaaaaaaaagaaaaaacaaaacaacaaaagcccaagagcataaacaatgttacaacaggtccttgtgctggtcagatttacttggataattcagtcttctccattctgccaaagaacatctctggcacattcgttacccygcagttcgttggaacaagacatarcactccaagattactgtaatgcacagaaaaatggacaaatacttcrcaaggatgtcaggagtccaaaaatgctctttgatctttgctggatgttagttgcaaaatttggctgccaaaagaaagaactgtcctacatatgatggaattctgatatttggttccsttggggatatctaagtcattttgatgcacaaagccattatcttcaaggctaggtgaaaattaatattttataatctttctcagttacaatgaaaaataaaaactctcttggccgttatttctttgagatttgatgctattcaatagatttttgtagcttctgtatgtgcttctagatatgccaaatggctgtctaatctttggcacttttctaggcagagaaattacagacctccattttctatcatgcatttaatgtaactaccaagctagacaaaaaagatttaagaccttaagtatagttgctcacttgcttgcctttcttattccaaatgaaaaatttgaaactcttcaaggaccagcatgaagtaacaccatttaaccatgttagtgccaccaagtagcttaaaaaaatagaagtggtaaaacttaccagtgcttttgctaatacccaaaccaaaacaaagataactccattgacaatttgtaaatgtctttatactcacataatattgtcatttttgttttaattcatttattataagttagatttgtgtttcaaagtatacatgtttttgttttatcaagaagaatgccctttagttactaatgaaggtatatacctctatctggcacattaacaagcctctttattgagtatctggggacggctcctagttgactttacagagaggccaggttatcagatggtgccattcctctaatgataatggcagtgtttggaatttaaatgatctgacaggtcacagcattcagcaacatggatgacatgctgcagaaagcgcatttggttatagaaggaacattcatctacctgagggacagcactgagtttttcattcgtgttagagatggctggaaaaaattacaggtaatttctaaacttcctttaacacactgccttcaaataccctctaaaaataataatctactcccataaatgccatttttttctgttttgaaatgggagaagtttgtaattgatctttcatttcaatgtactgtttttcttaaagctgggagaactgatccccattcctgccgacagccctccaccccctgcgctttccagcaacgtgagtagttaccctgttggactgctcatgcattcatttatcagcatttcctgagtcctccttggtatctagcaccaagctctccaaactctggacagtcagctgtgcacggtttagtatctggtgaaatcctagaaattaatgggtgctaacaggaggttcccacagtagagcggaggaataactagatccagaggctggagacctgctgttcccatgtagtagccaaatcttcttgggcagagggcttcctctatcttggcctcagtttgttcatctgtggaatcattggttggtataagcaatctagaagattcctttaatttttggcaccatctgcctcataagaacatgggcaactggcattgtccatcttctarccctagagcaatgctttgaggtgggtactatcatccccgttttgcagattatgaaactgaggctctgaagaggtagctttctctattaagtgaaagagttggtgattaaacatgggtttatcaaaaagaatgcccttccttgattsagtgctctttttaaaactcttgagaacattttctccctttctgaagatgatttcttcagcaggtcatgaaactctttacagttaagagtcacagttacagacaatggcaaattatttaaagcatcttctcaagaaacattgcacttgcacctcaatacactctgaagaacagattgaatgcatattcagaactgtttcttttcctccttttcataacagccacatcagcttctgcctccaccaaaccctatttcaagtgccaattatgagaagcctgctgtaagtacaatttatacatttaatcttcaaatactgagtgtatatctgctaagtgctaggtctcatgcttagtacacagttcctaccatcatgatacttatagactagtgagagaggcaaacaaaaaacagagaattacaatacagtgtggtaagttgtttgggtgaaccaagcacagggtgctgggggtataagggagggcagagacgtctacctggaggaggttacctccaaactaagacccaaaggacagctgagttcgggagtgagccaggtgggagagaggcaaagggaagatggaatagagggaggtaaggggaagggctgtgcattcctgtaattgctagtattaaattacaggcaaaagagtagagttcaaggcagaaaagggagacatttagtctgtggaagtcagcaaagcaagtgctaggtttcaagggtctgcaagccaagccaaaaagtttgaccattttctgtgggcaatggggagctacagaagggtttaaagcaggaaacaggtatgacaacactagtgtttcagaaattaccttggctacagtgtgcagattaatcagaagggacaggagcaggggtccaaaggccagttaggtgactcctgtgttatctgaactagaatcacagcagtgagcccatagactagtgggcaattggagagacatgaaggaagcagaagtgactaattgggtcattgattgaatatggcgcattaaagatgagaaaggtcaagaatgatgcccaggtttctgcttggatgattgagtggtgacagtttcctttccagggattgtttcattgctgggattagaaagtctctctattcctttgctagcttaagtaaagatctcgtttaaatcagcatagaaacctcatggaactccatcacaggaagaacagccaggcctgggactcttgtctctattagtctgctttgctctctctatagaccaccttctgaaagggtctttcttcctcccaacctcaccccaaaacacatatataggtgacatgagcttgcacacagctttgggtcaccctggcactgattcttgccctaagtctgtgtgatcttacagctgctgaccccagtactactgactcagttcagagtcttgggagagatagtttatatggtctgtcttgggtcaattgcccactcccagcccaatcaagagttaccaggagaatgagtttgaaggtctaaggccactccttatggcagggattgtgggggcattttctattgtgctgctattgaccaaggaggaactaatttggagcatggtgagtctgaggtgcctggaggaaacctgagtggagactaccaggaaggaataggttctgaaggtctgaaaccccacagtgggatcttggctgtagatgagccatgcaattactacggggctggttggattcccaaaagagaatctatacagtcagaagggattagactatgaggagcaaaactgaaaaggaactgatgggagaaatatgagaaagaaactgagaagccatagccagaaaggaagaaagcaagccaagcaaggtagtagccaacagtgtcaaaggctgccaggaaattcataagaagaaccaaaaggtgtccttcaaatttagaaactagagcaaagcatttagtagccaaaaagattctagttggttgaagagtcagtgggaagtgaaggaagagaaatgtgagtgtcagtaacccttcaaaaagccccaaagttagggcagtagctaaaggattttttaaatggtattttataaattcagaactaatacgtattcattgcagaaaatgtcaacaatgcatgaaaagaatggagaagaaaatagtaacacacctacaattttatcaaaactacaaccatccacaaaatagcaattttaacattttgagtgttataacattactgtcttcctaaaagtacaatataaaaatgttgtcattttataaaaatgttccagcaattagagaaatacaaacatgagaacacaaaaacccccaatctcgtcattcagaaacaaccgtaatttcagacatttctctgtgtctctctaaaggacagtagggcttggtgggattagaggtggcaaggaagccctgcagttgccccctgcctgtgcctttcttaggtggcccctggcattggggaagcctcattccatcaaggcctcgtgtgatgcactctgatgtagccccaaagcacactggttggaagatgatgagaccatagggcttcttccctcaggcaccagagtctccagatgcatgaggaagaagacggggggtgggggcagtatagtcagatggcaaggacatcaaagggtcagggtgtatatgtggaggtggaagtctggtggcctgcctgtgattgtggtgggtgggcagcatgctaaagctccctcttaccctaatggctgggaatgtagagcataaaatgctagccactgggaggcctgctggggaagccttggctcagtgcggggcaggaaggagatggggatggggtgtgatgctgcttgacctggacctccatctagtatggtggtcaagacagaaccaggatgaataaaaagagagagactggagcaggtggcagccttggggtctgtcctctgcaggaaggaaaggggtggtgaatggagaaaaatatccagagatgtgcaagggctgcttggggccagtctggacactcactgtagctcatggccagttgtggccaactggctggaagctggagaagcagaagaccaccatggtgatcctggtcactgggacacacagaggctttgttcaggtctgagaggcggggtagaaaccaggagagaaacactggccgcctcctgccccaccgcctgagcctcatttcatgtcctttggcttaagatatttaaaaatattttcctttttggtaacttggacccaggtcctgcaccagcctctcagctctaagttgatgagataaaagttacccccgagatgagattgatgggaggcagggagatgagtgttccttgattatggaatgcattccagagggtgtggcagaaaggctgagagagggcagtagtaggaggctgggttttgggagagaaagtgtggaagaaatagactacggattggtttttattttggctgctgaccaagatagcagggatgtgaagctggaattactataagacccctagttccagaagggtctatctcagcagtcttagtcataggtgccatacccttctttcgatggctttctcccagatccctcatgtgatcagccccaggcctatccaggagatggaagaaagggctgcaggcagatagctgggagaagctctgggatccagggccaaagccagcttaaaacccctgcacagacccagaggtctcaaacttatggcctgcaggtggattccgagattcagatccctgaagttctttatttggtccaagcaatattttgttctgtttttttttttttttttttttttttcacctaaggaagacatttctaccacttagagctgttcagagagctgaaacaggctgcttgggagaccatagctctccttccccggaaatggtcaggcagagactgtaattccaatgtcagggagggattgaataaaatgacctccaacgtgccttccagcctaagaagtctggaatctttgcaggaatgtgagatggttctgggggctggagtttgcctttgattctgactgctctcttttgtctcacatttttcagctgcatttggctgctctgaacatgccattttctggggacattcgagctgattttcagtgcttcaagcaggccagagctgcaggactgttgtccacctaccgagcattcttatcttcccatttgcaagatctgtccaccattgtgaggaaagcagagagatacagccttcccatagtgaacctcaaggtaaaaataaatatggttcccattgccttctgcatgcattggtcgctacagggcctggaggcagttttcattcctgacatcaacagaagactgttgacttaagcctgctctctcccttactggctatgtcactttgggtgggttctttgccttccctgaacctcagttttctttatgcttgtgtgacccttgragcatgcaggaggagagatagtgataacttctttcattgatacagggttttcttgtttgtttacaaagtacctcattatcttaatagggacttctaataaacatgagagttattcattttttagtttgtcagatgagaaaactgaggctcagaagaagaaaccagtttgcttaaaatcactgcaaactagggcactttgtcctgaaccctgttttggtgttctgtgcccatttaagcagatatttctctgccccatttgtgggtaagacagggccttgtaggatccctcgattattccatagaaatagcagactctttcaaggctatgcagagaaacctcgttgccactcacatacaccgtggagaagctctgggtcctgatgactgtttcttaaaggtacttcaagaccctttagtctctgcaaccccagtactccaatttaaaaccttgaggctagcaagttccatcctaaccccatacccagcactttccacctcctctcccagaattctgttccagcaccttcacccactgaaattatttttattcttggatctctctacaagggaccaggctgtttcaggaaaaggactaaaaagttcatctccatctcacccacagtgtagactggcacaaggcctgccacaaatttgaarcttagtatgtatgcataatattttcaaaataacaataataaaataaagacataaaacacaattttgattggaaggaggcttgtatacacttctaataagagaaattccctcaagaaataagacagtaaaagcaaaagcgttcatggatggattataaaatcaaaccacaaacatttcttgagttttcactctgtccaggctctaggattggggctggagactctaatgtgaggtggcatctgggccttgaagagcgagtaaaaatcggccaagtgtggtggtgcatgcctgtattcccagcactttgggaggcygaggtgggtggatcacctgaggtcaggagttcgagaccagcctgaccaacatgaagaaamcctgcctctactaaaaatacaaaattagccgggtatggtggtgcatgcctgtaatcccagctactcgggaggctgaggcaggagaatcacttgaacctgggaggtggaggttgcagtgagccaagatcccaccattgcactccagcctggctggatgacaaaagcgaaactgtgtcaaaaaaaaaaaaaaaaaaagagtaaaaatctaactcatttgtaggctgatggtataatgattctaatgtggtattttgtctctatagggccaagtactttttaataattgggactcaattttttctggccacggaggtcagttcaatatgcatattccaatatactcctttgatggtcgagacataatgacagatccttcttggtaagtgagggtggaagttctcagatatggtgtgatagatagttttagggggcatcctaacaatgggatgcctttatcagctgcttctctaggatattgccaacataaagccacagtgaggcaactgagggcctcagagaaagccttgtccttggagtcaraagacccaggtccagtaactcaatatggaatcctgggcaagacatttccattctctgagcctcagctgccttacctgtcaaatgggcaacataaccacatctatgtcatagaattgtgagaataaaatgaatatatgtgaaaacatatagcacgcrgtgggcacataataagtggtaagcaatgcaactcctggggatcctgtaactctacactgtgatttgcactctaaatcttgaaaattatgtgagtttttcagaatagaacaactcagcaaacctctcctcactgcctactctatacgaggcctgaggccaggcctggaaggcacaataataaacccacacagctcctacttttacagggctcacagtctacagaggaaatagacacacactaactgtgactctagacagaatattgtaattgtaagtggagaaacaggtaccataggatatacaggatatgtttgttttcatttttwyttaggggtgagaatcagagatggcttcctgcaagaggaagttgtttattggcctttgaaagatgagaaggagtcactggtctgaaaatgaaagagaagccctccagaccaagggaccccatgagcaaaggtttagattcacaaaagaagagggtgtgatttgaaaacaactgcaagctgggtrtggctgcaatctagtgtgttaagaaagctagcaagggcaatgaggatagagaagtgatttggcatcagggttaaggagtttaacttgattcattagacttatgccaatttgcttaccaaaaaataccacaaagaagtgtcattttgaaaaataacatgacaaaattactttataggccccagaaagtcatttggcatggctccagcccccatggcrtccgccttgtggataactactgtgaagcatggcgaaccgcggacacagcggtcacgggacttgcctccccgctgagcacggggaagattctggaccagaaagcatacagctgtgctaatcggctaattgtcctatgtatcgaaaacagtttcatgacagacgctaggaagtaatggccttctgatgattcttaaagagttttcaattttttcttatgtgaagagttgacactgaaatctaaaatgtttaattgttgtaaatattacagtttttttttttttactacatattctttacaacagcaaccaaagaaaacatacctcaatacactcaaaactgaagacatagaggactcagatcaaagacaaaatctgatccatatattggtgctagattctgcaggaaaccccagcagtgtgaacgcatcccaacataggttaagagcaarttgaaaacaaaggccatggcattctgccactgcatccttcagacagttatatcctccttttaaaccattgwtgttgagtgtaagatgtccttcatgttttcttataaagtcagtgtttagaaatgttaccctttctaagttatatacagatcaaatgcttttttctttcacgtacatscatcatttgcaactgctgttcgtacacagaaacaggactgctcaaatgatcctatttgtattttctgatgctatcagactctaatgtttttttccctaaaatattattgccatcatgctttaggaattttatatttttacacaatcatattttagtatggtgtctgtttatgtaactctgacttgctggaaaagttgaaactccaaataatctgaaactagaaaagaaatagcacataattactaccttccccttggcggctctcctccccaacccccmccccmcaattttatgacttccatttggcaattgttgaattataactgcgactgaaacaaacaggttcatagagatgaattttytgagaaacatatatctacatgttgtataattggattttttttccatgtaagtgaacataaaaacatcttttccgggtgctttcttcatttgactttttcccgctagttcctttattctccatcactgatgtggaagcagacctggggtgggtttgctaatcctgccacttgtgctgcccccaggcgatgatcagagaactgaaacgttttcccatcatgctcatctgccctggctgttgtcttccacctagtggggccagtgtaggttgtgtagagcctcagagtgggaaacaggatgagctgtgattctgccaccgtctcagggcatgactttgggcaagtcggcctctgtctctcaaggagattgggataagacaagcatagtattggctaccagtcattaaatatcagacttctgatatatcccatttcattttcataataaccctgcaaagtagttttttaatctctactttacaatgcaaaaaaaaaaaaaaagtcaaagctcagggagttacttgttccagatcatacactggtgaatggcagggctggtttcagactcagggtctgcctcacgtcggggcctatgatcttcccaaggaacccctatgcaagcctgcctctctgctccctcccagctgcaagcatgtgattctctggctcttggtctgaccctctaggagaaacataatcaccaggcaagaagtatgctgggatatttcctcccattcagctgggctggcccagaagctcagcaaagtgaatccgccctcagaatccttgaagtaggaaggaaatcaaagaggaaaaacaaagaaaaaaaggcagcccagaatctccatgtaggggctgcataaatacatgagtggtgagaatcttcctaatgagtcacagaatgaagactgtttgaggctggaaagcccgagaggtggtttttgaggaccagcccatccgttgagtgatgagggctgggggtgcttggtatggacaggaactgcaaggggaaggcgggcaggaggctaccaaggccacgaagcgcagacaccgtccatttctgtcacagcccacctggcccagagttacagaagaggcaatgtgagttggggttttggggaggagcccaaagtcagggagacctcatttgctaaccctggaaagagtattgaggcttatggcattgccattcaggcctctccatgcaccagaggaggtataaccggctgacccagaaggaggccctgagtcagccccagccccatttagacttggagaatgagtgtcaaaatcctggacctgacattcactaaacaccagcccttgcccaagctttcccgtcacatgttgaaaaccgtcaacctggtatcctcaaggtcactcagacaagccacagaggctcctctgcaggctgtgtcatcggagccccaccccatctcaggaaagccttaaacactccaggcctagcctggcccttctgccaacggccagcacatctgtgatatcccccagctcccaaacctgcctgcctttcctcatacttcctcctctgaacacctgacatgtgtagcatccgagtcttgttacacagttgaaacacaatggcggaagggcctctaagccttcactctatcccatgcctggatgtctcaaatgtgcctgaatgctgagccaattaacagtctcaggcatgataagggagggaagaattgtcacgagtaattcatctttatcgtgctagaggtcttttggagacttgctgtgagtccatactgcacaccctcagggtctgaagcctgcagcagccaaagcccctacccagcaacagaaccagagggatagaaacagctgccagcccatgtcaggggccaggctccataaggtggcagactctggagggtgcacaggagcagagggtctgagcaggtatgtggggagagcatgaaggaggtggtccaggagaatccccctggcaacctggacgtggccacatagagtagaccgaagaaaaacccagggaacaaggagaatgggctgcaggagccatccttgcatttcccgtctcctcctggacttcatgtggctagcatggtgtctcttgaacctgtaaagggtgtaagtcagagacagcgtggaattctgggaaccatcagcaatccagtacagctgaatagcagtcaagacactttctattagtccataaagggaacacaactcaaattcacaagtttttttgtttgtttgttttttttaaagaaatgtattggctcatgaaaccaggtaggacggggatgcagagactcaagcaacgtggcatgacaatgtggtcactcactctgttctctctctcggtgtgtgtatgtgtgtgtgtgtgtgtgtgtgtgtgtgtgtgtgtgtgtgtaagactatgtctatctgtcttgcttctctttttctgtgaatatggctccttccatccaagtgaggacaagattcatgcggcagagatgtctgcaaacagctctaggcttatgttattccaccaccccagagagtggctccagaggaaagagaagacttcctctcccactgggatgatacgaattcctggaaaggactctgattggttccaactgtatcacaggcccatgactgtgtttggcagcccccaccccagaaatgagttgggcagaaggaataattcctccatccaaaatgcatggggatttgcaatgacctgaaaatgagggatagaaggttgacagggccaacaaaatagattctaccacacacagcagcagggaagatcaagtgtgggggacgttgcagtgaaataatagacagaggtgagatcatgctggccttgaaatccaggatgaggcatttagactttatcctgcaactgacgtagtagttaagaagaaagtacttaggcagatagtgagggtacaggaatcctcagtaaggttttccttttaatgaaaagcagccccaaaatcaagttctttctcttcttcttcttcttcttttttttttttttttgagatggagtctcactctgtcaccaggctggagtgcagtggcacaatctcagctcactgcaacctccgcctcccaggttcaagcgattctcctgcctcagcctcctgagtggctgggactacaggagcatgccaccatgcccaggtaatttttgtatttttagtagagacagggtttcatcatgttggccaggatggtctcgatctcctgacctcatgatccgcccgccttggcctcccaaagtgttgggattacaggtgtgagccaccacacccaggcaatcatgttcttttctaacaaagagcagcctgtaaaattgagctgcagacatagacaagcaagctggaagcttgcacaggtgaatgctggcacttgtgtcaataggagaaggctacctgggactaggcatgatcaaaatgatggctccatgttcccttctctttgccagccacgtgtacagtaaggagcagacaagatggcgctggccaagtggaaggcccatttgcagaataagattagggtggggtgaccagccttccccaagtgctatgtaaacgtcgcatctggtcaaaccaatctgtgggccctacttaagtcagacaccgcctcctcaagcctgcatgcatataaaatctgctgcaggttttccgtttcagtcacctcttcctcatgagagggaaggctgctctcctctcaccttcctattgcctattaaactttccgttctttgacccactcacatgtgtccctgtccttaaacttcttggtgcaagatgacaaactccgagacaatgttgctgcttcacaactggtagggcaccttgggaatatttaaatgaggtaagagatggtattggatccatgtttgagaaagatcaagcaggttttttgtttatttgtgcactcattcagaaatatttcttgaataataatttgtacccaggatcatgtttggacttgggagtacaaagataaatgatgcccccacttttcaaatctactaagtccattctaatgccacagactgtttcaaatctcctgtatatttcctgccacctgctctccacctcctcagaaaccctaccagtgggggacaagcacatgcatgcagtccttgtctatcctaacagctggagaagtacttttctggttaccccttgagctcctggtccatcaaaacaccactgagcctcctcaaacctctttgatagccactaactgattttctccttttgctttccatcttgtactccaatttatagggccggtaaatagagagatgccttggtctgtgtctgaattttggtcctgccacctactaaccatgtaatcatagccaagctactgaaaaactccaagttactgaaaatagtcctccacactcagtccttccctgcagctcagtttcttcatctgtaaaagggggacattcatggaaactactctcctttcagttaatttacaggaagcactgggaacagcattctggccccgtgtaagcgtccaatcagtgtttgctatctttggcctgttccagttgtctctcagtaggagctgggggaaggtctctccttcaaccatcctagctggtgtcttccaatctgcctggcttctctgcctgtcttcaggcacagggctgggactcaatgtatacatagcagtacagctctgcctgctgttggtaaatatccgttgtcccacgaccccgaatgtctggactatcctggccctctgctcctgcccttcataatccaacaagtaaaatgttatcatctggctcattagcggctgctgacaagagggctgaattccttctgatagacaggcacacatgccacagcgactgtttagtcatctcatcatccccctgcatgagcctgctgggggccctgagttccaagaaggacccagagcaccctgttatctgatatgtttgtgggaggaaattgcctccctctcctctccttccaaacttgtgccttttcctctggtccttctcttagtgagtggctccaccatccagccaggagcctaggaatcttttatttattcaacgatattgactaagtgtctccttagtaataaaaataacaacaataaaccataaaataagtgctaggaagctctgcagagttgggatatttttatgatgactactttgatttttttttttttttttttttgagacaggatctcactctttaacccagggtagaatacagtggtgtgatcatggctcattgcagccttaattcctgggctcaagtgattctcccacctcagcctcctgagtagctaggactacaggtgtgtgccaccaggcctggctaatttttagtacatatacatatatatatatatgcatatgtactaatatatgtatgtttagtacatatatatgtttgtagagacaaggtcttgcaatgttgctcaggctggtcttgaactcctggcctcacaaaattctcctgcctcggcctttcaaagcgttgcacgtggtggtcttcccttgaggcaatgtggtgctggctcttttcttatcttccctaggactgttgctcacatctcctggcctctacagttccatctcctccagttcattctccacaccaggggagagagctttctagaaagcctgtcatacttagtgttttgatttgagtttccctttagaggaggattcattaatttctctgcaaggcgatcccaagaaacaaggtaagagagcagagaaatgagacagggatgggaaggaagattttaaagggtgcatctagttctcactgtgagtgactagatcacactgtcctcttaagggttctgggagcccgtgcagtctggcacctcagagtttccaaccaaagggacaaggatgttatggtcttcatacaccaacccctctcagtctttgaaaaacaggagggcgaggcactggatgagattccagtacttctggcctgctgcacacgacagagtgggctcagctgccacagaatgctctcaggcagacacgtggatgctggcagtgggaacttgggggtttatgggcggggcaccccagagactgcagtatcaggcccaatctagcaggaagtcacacaaggtttacttcaagataacactttgagcttacaatactttcctcaaaccttactgaaatgataaaaacaacagagaaaaaacaaaaaacaaacaaaaaaagacctgcaaccccttgttaaaaaaggaagaactatctcaacctggcagaaactttgaggactttctggaagatagaaacctgctatgattggctatcctataaccacagcagcaaaggcagggcctgtcttcgagtccctcctgaggctgatagccacaggaaagtgccagtagaggctgaaacagaaataagctgggaaaaggct

SEQ ID NO: 6870 - DNA, 109977 bp, Homo sapiens
atcggtcaatggtgccttattcagtccattcagtgaggccatgttttcctggatgttcttgataattgtggatattcgtccatgtctgggccttgaagatttaggtatttattcccatctttatagtccaggcttgtttgtccctgtccttgagaaggttttccaagaattcaaaggggattgagttttgtggcctaagcctgtggttactgcagccatctcagcacttgggggtgccctaagcccaggaacactgaaactcttacagactcttaggtacacagccttggtgtatctaagacttgggaagataggggagaattccctgggttaccaggcaaagtctctttctctcttccctctctttcccaaatcagaaggcatctctctccaggcttggctaactggagctgggggaggagtgatgcagacactctactggccacagctggcattacactgggtcatacctgaagcccatggccttccagaccagctctgtattggggctcaccaaggcctgcagccactactgcctggttatgcctgcagctaatgtttattcaaggcccaaggccacattagtcagcagatggtgaatcctgccaggaccaagtccgtaccaaccgggcagtggattcccttctgacccaggatgggcctagaaacactatccaggaacaaagcctggaatcgggggcttcgggaatctgtttgatgttttatcgtattgtggctaagctgatacccaagttgcaagacaaagtcctctgtgctcttctctcttctttccccaagcagaaggaatctctccccaagcatcagtacctgaagtttgggaaggagtgacatacatactcctgtggctgccacagctagtgttaaactgtgttgcaccctaagtccactgcctccaagaccaggacagcactagaccttgcccgaggacttgctaacagaggaaaaaaaatctgtgaaatatttcagagtggaatattttgagccaatatgagtgatcatggtcttgggaacagtcttaagaggttctgaggaagtatgcctgaagcaggtaggttatagtttggttttatacatttccaggagaaaagagttacaggcgaagacataaatcgatacatggaaagtatatattgattcagcccaaaaaagcaggacatctccaagcagggacttagtagttataggtgggtcttaaggattcttcagttgacaattggttgagagggttaagctattgtctaaaggcttaaagtcaatagtaagtaatgcttgagttaaaggaggttgtggggtccaaggttcttgttacgttgatgaatcctcataggtagcagccctccgagagaatcaatggcaaacgtctgtctctttgcagacctttgagatgtcagactctcagttcaactctgccagaactgggaaaagcctagaaagggaaggcctggttgcattaatggagattatctacagatgcaaatctcactcacaaaagatagctttgcagggccatttcaaaatatgtcaaataaatatattttgaggtaaaatatttttattccctacagggtctgctatctgtcatgtgatgctatatcagagtcaggttgaaaagcaaaccatattacagcaggtttatttttatttatttatttattttgaggcagcgttttgctctcattgcccaggctggagtgcaatggcacgatcttggctcactgcaacctctgcctcccaggttcaagcaattctgctgcctcagcctcctgagtagctgggattacaggcacctgtcaccacacccagctaatttttgtatttttagtagagatgaggtttcaccatattggccagactggtcttgaactcctgacctcaggtgatctgcctgcctcagcctcccaaagtgctgggattacaggagtgagccaccacgcccggactataccaggttaacttttaaaactcatttaatgatattttatggtttgtagggtgtgattccttgcatgaatggcctgaggtcttgtttataatttggtatcttattgccacagagtctgttttgtccgtcttatgatattttaacttgaatgctggtcagttgtgcctaaactccaaagggagggggtataacaaggcatgtctaacctcccttcccatcacggccaggaattcaatttttaagatgtttctggggtctctttggccaagtgggagttcattcagtcaatagggggcaagttgggggtgcttagcattttatgtttagtctacacactttagtccttgtgtcctgactgccactcaaatagactcaggacctcagaccactttagttagccagtggtgaagctagccatgacctgggtttctccctctggagcacagaattctcctctgtcccaaggcctgcctaaatgcactgtcagaattctaggcacctgcagaattctgtcctgtgttatgttccaccgtgacggggcagcactgacttccagtgcaaagtcccacactcactttgctctctctcctccaagcacacggattctctttcctgctgtgcagcctgtggttggaggaggggtggtataggcaatacagggagatcttcccccctacccccacccyatcttcaatgcctctttccttatcattacggtaaaagtaggcactgtgatcactcacctgattttatggcttttatgaaggtgctgtcttgcgtggatagttgttctatttggtgttcctgtgtggagaactatctctgggggggttctattcagccatcttgatccacctccgccctctctccagtcagtctttaaactgctggcaccgaagcctccagtgcctttctcctctatatcccatggagagttactgaagtagttctttttggatttcagttggccttttagtagagcctttctcctaaaggattaaaacgtgagactgcgggcttgagccaaaaagcagtcagagggacaaatactgggttttacttagaataacccacctgcctagtgccagcctaccactcttgaacaaaacttgtatgattcccgtgtctccatttagaataatttaattctgaggagacgcctctgtttctccactggcctctggacatggaacaggcacatgaaaattacctggggcagctatgggtcacatcacctctcttactctagccagccagcaggcacttgaagttcgcaatctgatgggctgaatttctgaaaacaataacaaacacaatgtcacttattttttattctctaaatttacaacccattaatatacctccctgtaagctgtctgattttgaaaattatacatgataaaatctttttattatacataaaaaagagttctgtagtttgtattaatagaaaattggtgtccagacatattttaccaagtaagtacaaaataactaaagaatatccatttgaaagatacaaaattattatcctgctaggagcaccttggtgtcaaggtgacttcagggaataatcaggtaattcagctccttggccggagtgaagaatggaatgttgaggctggagaactaagcagggctcaagaggggcctggtgcactaggctaggtcatttgggctcaatcatgaggggacaattgaggcagcattagcaggaaggtcaggtgaccaccaaactttctgccagatctgagtttcttctcttttagaaatgcagtatttgtataaaaatgaaaggcttaccaaaggtcacattttaaattataaagaaaaaaaatcatcttttttttttttttttttttctgagatggagtctggctctgttgctcaggctggagtgcggtggcgtgatctgtgctcaacctccacctcccaggttcaagtgaatctcctgcctcagcctcccaagtagctgggattacaggcacccgccaccacgcctggctaatttttgtatttttagtagaggcrggttttcgccatgttggccaggctggtcttgaactcttgacctcaggtgatccacccacctcggcctcccaaagatctgggattacaggtgtgagccagcgtgcccagcctcaaaagttcatctgtgagccacatttagaaggtagataaaaaattttgactaaacacagcttagaatctataaattgttaaacttcagttctgttgagaatctttgagatccatcattctctaaatgttttctaccagagaaacaggacaatggcttgcaaatattggttatcagtatttactctatagctcaagcaaacaaacttatttgcacttaaaatacaaatattacctaccttgatttgagtgttgttgttctctcttaaatttcatttcccaaaaatgatggcaaaagtactgtttgttttaacttgacccatcttttgcaacccagcttaatcatttcacagattcccttttgaaataaatgggctagatgatcagacaatagtggcaaatgtttgtcatttcaatgacatatgcaagagatacctttagtgaaatttgtatatcaaatttccctttgtgctccttttttccctagtgaattcagcattaaagtgtttataaatatttttggtttattatttattaattcaaagcaaagaatgccaatgtgaccataaatatctcatttatatatcataaatatctcattatagaaatatgtttagagacatctgttttattattttaaagaagagtacatattatatattaaggtaaaaatagtactaaaaaagagaaggtagtaaataaaaaaattctaatgaacataaaacatcataaaaattaacttaattaaaaatcagccaggcacagtggctcatgcctgtaatcccagtactttgggaggccaaggtgggtggatcacctgaggtcaggagttcgagaccagcctggccaacacggtgaaaccctacctctactaaaaatacaaaaaattagctggatgtgatgggacatgcctgtagtcccagctacttgggaggctgaggcaggagaatgccttgaacctgggaggcagaggttgccctgagccaagatagtgccactagactccagcctgggcgacagaaagagactctgtctccaaaaaaaaaaaaaaaagtataaagataaaattttagtatattgtgaattaattactagactcaattgttataggaagctttgtttttctggagctcttatattaaaattattaaaatcctcactgaaaagtataacatgtgttttctttaaaagaaagatattctatatctgaataaagacaaactttgaacgagtggtatatgccttaataaatattggagaatatctattctccaatacttagagaatgacgacagcatcctccacatggcgttttcattgccagtcacaactttcctccacctagtgttctctagactgagacagaccaaggaacaattccctagacctcctttgcagagctaggttatgctcagaccatttgcagcaccaaggacactgccattcaggtcaccaaaaaaagatcatcttgtgagccctgtctaaaccaggccccttctaaaatcatttcagtgtgaaactgagtccaggtgggtcttcatcagtattagagtggacctgccagatgtatgcttgcagatgatgcaacatcaaagcaaatgccctgggcaagagaagaaaggccaaagcaatgggcttactggtttctagctttgagccactcttcatagtgccaaattcccattttagggtccctttatttgtattaataaaaataaattccctgggtgtaagttcctgtaaagtactccctatctgtattcctgggcatgaaagggtgttttagttccaattctagttttcccacttagaggttcacctttctgacattaataattaaccagattatctgaattcttcaagttcagtttatttaaaaggagactatcctcaaaagtgttatatccgtggtttcctgctacctccaaccatgggccttttkggaatactttgttttttaatcttcctggggaaaacctggggayaggagcaaacgtaagtaaaacaagctatcttcatttttcaatgcatcttagttatgacgaatgaagagttaaatttaacagattctgttaacttgaaaataacttgctacttctgagaacagcaagtgaatagtatcatctctgaatgagaaagtcatggaagcattttgatttgatgagtagctaacaacatgacagcttttatggaattgttatttattaaaatttacgtaagtgattattcaaattcctcttcaaaaaagcacaaaagaaactccagataataaactttcttgacattttttgcttattttaacttggtgtttagttttctttgtgtttttcatagactatacacagttaaaccagggttatttaggagtcaatctaatactgtgatctgaaaatctgttgttgtagtgacttctaccatacatttatgagctgacttttcacaatttttagtgtcattattgagataatatgcattttaagtaatgttttaaaaataatgatcttatatctagaaatattttaatactgaaaagtaactgcagatcatctaatcaaacctattcattttatatatgagaataagtccagataagggaagtgactgaccaaaggtcacagttctagagagagagaaacaggatttttattaaggtctcctgtttatcacttcaatttttttcattttgtcataaatgtatacatgtaaatatattatatataaacacatacttaggatrtcattcttttttagcaccctcgtatttctgatctgtgatctttttacatggccacaagcactcaactaccttagcatcctgcctttattctttttgaaagacgagcagctaaggcttagagagactgaaattaagtgacttcaaattggtggcagaactagggctaggacctgggttccatgattcttgtccagacttattctgaattctttctactagcccttaataaaaattatttcctcactttctctgaagaagtcagagtgtaccatttacaacatggcaatcaatcactttaattaattggttgattgattgattcaacaaatatttattgagcatctaaacatatgataggcactgcagatatagcaaacggtaagacaattcctagagcttgcattctagtgggagaagcaagtaatgaatgaatgaaccaatgaaagaatgtgtaaggtcaggtaggtagtattatgaagaaaaaaataaagcagagtatgagaattaaaaaataattatggggcactattttaaaatgtggccaggaaaggttctcttaaggaggctgcactcaaacagagcctgaaggaagtgaggaagcaaaccatgcaaatatttgaggaaagagcattccagatagaggccaaaataacattcttgcctctctgcaagctcagtaacctgatcctctgcagcaattgaaagacaaagaaaactatgaaattatttatatggatagmttatgctactgataagtcaataagaaccaaaatctttataaagggtggttccagaatattcttttaggggcttctaaacactatgtatttttgcttgacrgctaccatcacatagaccagcagtccccaaccattttggcactagggacaggttttgtggaagacaatgtttccatggaccaggattggggtggggatggtttcagaatgaaactgttccacttcagatcatcaggcattatattctcataaggagcttgcaatctagatccctcgcatgtgcggttcacaatagagttcatgctcctaggagaatctaatgccaccactgatctgacaggaggcagagctcaggtggtaatgctcctttgccccactgctcacctcctgctgtgtrgcctggttcctaacaagccatggactggtatttgtccatggcccaggggttggggacccctaccatacacaattcaaaattaaagcaatactaaacttaaaaacataaagcttctataaatactgaaattaaagtagcyttatatccctaaatttttctaattacaaaactctttataaattccatttagtacaacagttgaaaatgttaattctggaaacgggctgctcaggttcgatttctaattctataatttgtgaattatagaattcataaatcctatatgtgtggccttgggaaaattaattagcagtttcttcaccttaaaattggagtaatagttcctcacagagtggttgtaatgacacaatgagtttatacaaataaagtattcagaatagtgccttatcacagggcaaaatttcagtaaatatatcttattatcataaaaactgaactcctctcattttctgccatctcctactaggcatgtggggaaggggaattcagatgatggttggaaatctggaaattctttcctctcttttgtaatttgcctgtaagtggatccaaattaattgtaatgcaggataactgtcagatgctttaaaggatttaattgctgataaattaattccattgttactaaaaacttcctgcttttaccagactcttaaaatgtcacaatgttggcaraagcctggaataattctgccaggtggggtggtgggtgccctccaagcttgttgggccacttgaattagtcgatcactatgcccttttgggttaaaacacrtttttttcctatgtaatagcgtatgtagttctcgctattcaaattagatactyttgtgatatacacttagtaatccagtttatatttgtaagtttttaaataaaataatttttaaaaatcactcaaaagcatgtatagactcacttccattattgtataaatcacatgaaaagtaaaaataagagaacagtctatggttgtgaataacatataaacttgacctcaactgtacacataacaactgagaactcatataaaggcctcccccatttacttacaaaccgtataaccttagccaagttagccttttaccacttgcaaagtacgaataatgatagtaccagcatcattggcttattgtaaaaattaacaagagctgtatgtaaagtgctgatacagcctctgatatgtggcaagtacttaattaccattattgtttgaagatgatgatttgctcttaaaggaccatcatcactatttccatttccaaatgcacttcccagctcactcatattctatcctttccgttatccgtttactagtataacatagtatttctaagatcactccctttaaactaatttagtgagattaataaatcttaacatgtattgagtactaagagtgctagaccttttcatatatatgttcttatttaatctttaccagagcctggtaaagaaggtgattattttcacagtaagttattttagcctcagaaagacttagtgactttaccacggtcactcagccagcagatgccacagctggaattcaatcactgcttttttcttcattgagcaaaaaatattgaccccatttacatkttctggtcaacatgattaaaagtcttccttggctgcagtagctaagagaaagtgctgctatcaccttaactttctaaatgtaaactaaacctccagcttctcaggtcttaattccaaactacttggaaattatgctgaagttatggtgggtcacaagtacattttgacttattagtatcatttttaagtgaggaaatatatgtattttaaatggaatctctcaagtgagagaaaaaaatcaaaagtaaaagaaaatatgtcatataaagacattgagccttatcttttcctttttcaacagatatgtcatttcagcaccaaaaatattccgtgttggagcatctgaaaatattgtgattcaagtttatggatacactgaagcatttgatgcaacaatctctattaaaagttatcctgataaaaaatttagttactcctcaggccatgttcatttatcctcagagaataaattycaaaactctgcaatcttaacagtatgtatttatcctttattttctttatatatatatacagaatattctcaataaaaatgtgtacaaagtttgaatattgataacatatagatttaatcatttacatccactgtgggattattagatgatgtcagtcactaatgataatgtaagtgaaaattctaacagaaacagaaaattctaaacagaagttatgtctgctttttgagcaatgcatgtccattttcacattcttattggaaaataaagttgtactaatgtgaaaatatttggagataattgaaaatacttgtttgctatgaaaattactattagaaagaaattgagaaatatgagtatgattttatctgtagtacattgcccacaaaaatccatggatattattgaacattcgattgaactctaatattctacaattatagtttcaaaaactaaaaaatttgtgattactaaagtgaatagctctcattgacaacctgcagttaatagaaagaacaaccttgatcaaataactctcctattaagatattgtagtatagattgcttagagacatacttgcaacttatttttactaaaaattctgatacttaataaagaaaatcaaagaatatcagacgtaaaatgggctctgcagttcatttagaccagagtttctctaaagtgagttctttataaagaaattaaaaatggaaatttaataaagagcttaaaattcgaattatattgattttgtaacattttgaatttattttataaatttgttttgagtttttaattatacaaaaatcataagcataagattgtaccgttttaagtttgtatatatttaagtatctttgtatcaaaaattattttgattatgttataaataataaaaagccaatgctgagggtcctccatgacttttgtcctttaaaaggactatgcatrttactcaagtttaagaaacactaatctaaaaaatttctagtcaaacayaggaattctttaatgttcttagcagtaaatgctcatatctcttaacaaattcttccacttattaggtttgttaacaattaaaattcatttattaaaagtgttacttttatggcatatgcctgtaatcccagctactcgggagactgaggcaggagaatcgcttgaacccagaaggcggaggttgcagtgagccaagatcgcgccactgcactccagcctaggcaacagagtgagactccatctcaaaaaaaaaaaaaaaaaaagaaagtgttactttcaaaagacactcttttatctgatacaatgtatttgtggctcttagttttaaatttaaatcaaacaaatttaactgaaattaaaaatgcagtatctcagttgcactagcaacatttcaagtgttcaaatagccccaggtagctattggctaccatagtaaacagcatagatatagaatatttctgtcatcacagaaagttctctgaacagtgctgacctatatgattaactgaaaaactagattaaggtggggcaatcatagtcaatacatattttaaccatttaattttatcatagcaatatcatgtatctttatttgccaattgtttaatgttgtaccaaggtcttttaagtgtgggtctatggattgcagtgtcaaatctcatttattacgtgctacaaatttaatggatcatctttgttctatagtttcttttttgttgttgttgttgttgttgttgagacagggtctcgctctgtcacccaggctggaagacagtggtgtaatatcggctcactgcagccttcgcctcccaggttcaagcaattctcccacctcrgcctctcaagtagctgggattaacaggcgtgcaccaccacacctggctaatttttgcatttttaataaagaaggtgtttcaccatgttggccaggatggtctcgaactcctgacctcaggtgatccgcccgcctcggcctcccaaagtgctgggattacaggcataggttactgtgcccagcctgttctatagtttctgtttcttaaaaggggagaaagaacttaaaggcacttacaaagcaatctgggtgcagaatatttatagatttttcttgttttccaaacttttacaataatttcgcatagctaattctacagcagttggtttttgtaattaactttcatcccgtgtttccaaagcctaatttttcatagatacacttttcttttttatcacttttcatgcattaaatttacatatcattgaatgtaaaggggataattacaaacataaattggaaaatgagcatctcaactcaggggagcagaaatatgtgaggtaatactaagggtccagagatgctggacacatgggcacggtgactgatgcctgtaatcccagcactttgggaagccgaggcaggtggatcacttgaggccaggagttcaggaccagcctggccaacatggtgaaacccgtctctattaaaaatacaaaaaaaaaaaaaaaaaaaagttagctggacatggtggcgcacacctgtaatctcagctacttgggaggctgaggcaggagaatcacttgaatctgggaggcagaggttgtcgtgagctgagatggcaccactgctttccagcctgggcaacagagtaagtgagactccgtctcaaaaaaaaaaagctaagggtccagagaatcggtcaggaggtttcacaaagggaatggggagcatggggtaacccagcaaactaattgagtgaaggtttcttaaaggcttttatagtagtagtttcactaaatgtatataaaatttaggaaacatggaaccaaagagactttcaattgcttaaagctaaatttttattatgtaattagacactgaagggcttcgggcaaaatttatttactcttcttgctcctgtatcactttttaaatgattacatatacatactgattgttctaatgagattacagttgtatttagaaagttaatggtttaataactttagaattattatactttttccatcaacaatttcttttccagatacaaccaaaacaattgcctggaggacaaaacccagtttcttatgtgtatttggaagttgtatcaaagcatttttcaaaatcaaaaagaatgccaataacctatgacaatggatttctcttcattcatacagacaaacctgtttatactccagaccagtcaggtagattataagatatttcttcctctgggtgggggatttgacagtattgacactatattgtagagctttttaatacctgaaattgagtggagatcggtttctttttaatttgctcaaaagactctcaattcccaaagacatctatacttacaaatatttaatagcattttaattttaaatttatggagaaagtgctaaataaattacaaaaccaacaattacattacctgccccatcacttatttccaagtagaaaatgctttttcaaaattgtaaaatgttgaatgttatgtaaaaatgtaaaatgttatgttgttacaaaaaccaactgctgtagaattagctatgcgaaattattgtaaaagtttggaaaacaagaaaaatttgttttccaatatgttacaatttattaaacaaatataagacttaattgcaaatataatttggcaatgggaaaatataatttattgtagaaccatgttcattaaaaattccactgggtctggagctaatccccaaactggaaaaataaatctaacctaggggatcagatatttcagcagaggataaactagatcacagaaatatatggatattaattttcaaaggggatctacctaagaaagttactgttagaacattgtttaacattcatggttcttctgttagaggcaaaagggcagaatagccaatcaaaatcatgtgaataggaatgactggacctattcccaatgaaccaaaagtaaaacacagaaaagtatgaatgcttcccaatatattcatgtgtttgcaaagccttccattcccccgtttctccctctcgtcatcaatgacttttaagtacatcagaaatagaatattagagatgtatatatgggaaggagaggctatggaatttcattaatgatattcttggaggaggacagagaaaggaagtggggaccatctgactttgttgaaaaactttgtacacagtagatatttgctaaatgttggttgatgttgatgatgagaatagtggggtggaactggactgaaccattaccgtttcagcaggagcatttgttatgatcagctcagaaaggaaaagcctaaagggggtggagatattgctatctacttggccagaataaaatctccagaataatagcatcttttttctccaagagacaactttttatacaaggaaatagtctctgcccacaaaggttgggtccttttagacataatcatacctagaaacaagcatatcatctctcttgtcctcctcctacattgaaggattcttttttgcttggatcctgttgacacgtcccacaactaagggtcatcagtctttgtccagtaagcagtgtaatatccagaggctgggaccttcctcggttatcaaggctttccttaagaatggcttcatgtctcatgcctgtaatcccagcaytttgggagtccgaggtggggggatcacaaggtcaggagtttaagaccagcctggccaagatggtgaaaccctgtctctactaaaactacaaaaattagccaggcactgtggcaggcgcctgtaatcccagctactctggaggctgaggcaggagaatcgcttgaacccaggtggcagaggttgcagtgagctgagatcaagccactgcactccagcctgggcgaaagagtgagacttcgtctcagcaaaaaaaaaaaaaaaaaaaaaaaaaaaggcttcatgtattatttctctatcaggactttactgtaagatgatgtaatacctggccaggcacagtggctcatgcctgtaatcccagtactttgggaagcccaggcgggtggatcacttgaggtcaggagtttgagaccagcctgaccaacatggtgaaaccctgtttccactaaaaatacaaaaattagctggatgtggtggtgcacgcctgtaattccagctactcgggaggctgaggcatgagaattgcttgaacatggcaggcagaggttgcagtgagatcgcgccactgcactccagcctgggcaacagagcaagactgtctcaaaaaaaaaaaaaaaagagaaaaaaaaagaagacgatgtaatatcctcatccattctaatcgtagagtaaaatgagagaagtttgctataaatattggcccatttctgcaagatagtgaagtaaattggttaaaagcagactctggagtcagattgtctgggttcaagtcacagcttgagctgctgtgagctgtatgaccctgtgtgaatcactcagcctctcagactcccactttcctcacttgtaaaatagagataataatacaacttacctcatagagttgtgagaattaactgaattagtatgtgtaaagcacttaagatagagccaagcacacagtaagcactaggaaagtgttttccattattatctatggaatagcacaaagccatatttacagaaaagaaaaataattacttaaaagtattttttaatcgtcttgttatttatagctataatgtcccgatcaacacatttaatctgaagattcttgagggatttttagtgtaagcatctttaggataaaggcttcaaggctttactggataaatgactttagaatattgcccaaaatccttcaatttcataaagcctgtgtcctgccttcttccccagcttcatcacctactacggccccaccctctatagacacaagccaaactgacctcctttcagatgctttctcacaccgtttccccatccatattaaggcctgtgtaacatgctgttgcctctacatggtacattcttgcccctcctttgccttgttaactcctacttcaccctcacgtgtcatcacagatccttctaaaggcagctttcgctgatttccctgacctcttcaaatctccctcttctacatgctcataaggccaggcaaatatcctttgtggcacttcacaccctagaattttacatataattgtgtttgcctctttcctccacaccattaaaagatgtccatgtctgatttgtttcactactgtatctcagtacgtagcataatgactggcacattagaaggcattcaaggccgggcgcggtggctcatgcctgtaatcccagcactttgggaggccgaggcaggcggatcacaaggtcaggagatcgagaccatcctggctcacacgggatgtgagctaatacaaaaaattagccaggcatggtggtgggtgcctgtagtcccagctactcgggaggctgaggcaggagaatggcatgaacccaggaggtggagtttgcagtgaaccgagattgcgccactgcactccagcctggcattcaaactttttttaaattaataaaccacatcttttatttttatttttatttagtgagtgtctcgctctgtcacccaggctggagggcagtggtgcaatcttgtctcattgcaatctccgcctcccaggttcaagcgattctccagcctcagcatcccaagtaagtgggattcaggcgcgtgccaccatgcctggctaattttgtatatttagtagagatgggatttcaccatgttggccaggctgggcttgaactcttggcctcaagtgatccacttacctcggcctcccaaagtgctgggattccaggtgtaagccactgcacccggccaataagccatatcttttatacaaaaaattgtatagatcttgcctccaatgtaccatcgctgtgaagacaagattaattttctaacctaaacacaaactgggttaaaaactagccaaatagtagtaacagaaataataataaaataaacatttattgattacttagtatgtgtcaggctatgcaaaagctttgcattatttaattctcacaaggacactatgagcacacactagtattcctgttttacaagtgagttaactaaggtttagagggattaagtatcctgctcagggtcatactaaaaagtggcagaggcaggagtgaaaccaaagtgtttaattccagggcctgtgctcttaacttttgtgactttctgacttgggcagcttcccagtgatactcaggcctagactgggtgtgtcccaaaaagcaggagataggatttgtggtgggagacaggtgtgaggggaaggagagagcagagaggtggggcatttactgagcacattgtttttatcttgtgaacttagtaaaaccagtgttaatgtggcttcttatatagagctttgcataatactgatcttttaaaagatactgggtttatggtgccagttctattttattttgtgggtaaagttttggccatgaaatgatttgagcatcagcaacaccctagagaaattaagtttgtcattggaaagaattagatcactgtgtctcaaacagctgtgagttaaaagcgaaacagatgcttttgtttaaaaagtagggatctattaactgacagaaagaaatggaagagaactaacagttattgagcccctgccattgctcttttaacaatgagcgaacaagtgtaggatctggctcaataaatagaacaaaaccatataatccaaagctgccttttgcaataagagctaatttggagccttgtgggttttcataagtggaagagtgtatgtctgaatcaagctcccaattttccattaagatcttcaactctgagacaatatattatgctcctctataaccatatggtgatgtcactattttgctactatgaaattcttaataaataatggcctaattacagatgtaattaatttcatactgtgaatgttttctcaaaacattgtaggtaaatgtattttaagaaagtgaactgtactttaaatccactaagagaaatagttctttaaaggaatccctgaggattctcttaaataagagaatctttagtaatgtatatgtctgcaaactaatttttgtttttttcaaatatggacttttgtgtattgagttttttaaagtaagattcatctcttttaaggatggttgttttaaaaaatcaaaatatccttgtttttagcagagtttttgattatatcaattattcttacagtaaaagttagagtttattcgttgaatgacgacttgaagccagccaaaagagaaactgtcttaactttcatagtaagtattttatttatttaaataatactttaattcatttttcaggacaagaatctcatttcatwaccctgtcctcacactacactaaatcattcaatgttccataaatggttattgaacatctgcaatgagtatagaatcatagatctatacctctgtaatacacgtatgtgaaaggctcatacaaattaaatttcaataacttgaaggattttgagctaaaccatttaagtacaatcttgctgatttattttttaaagaacacccactggccgggcgtggtggctcacacctgtaatcccagcactttgggaggccgaggcaggtggatcacgaggtcaggagatcgagactaacctggccaacatagtgaaacctcatctctactaaaatacaaaaaattagctggtgcagtggcaggcgcctgtagtcccagctacagctactcgggaggctgaggtgggggaattgcttgaacccgggaggcagagcttgcagtgagccgagattgtgccactgcactccagcctggtgacagtgtgagactccatctcaaaaaagaaaatctaaaaaaaaaaaaaaaaccaaaaaacaaaaaaccacccaccaatcactaagaattgactgaatacccatttaactataagatatacataatggatatatctattatgtatttattatgtgcaaaagaactatatttaatggtacttactcttaaggaacttagagtttaataactattatactaacacaaaaaatcttgctaaatcatgagttaaagattggcagtaattcaccatttatcagacatgacatatgtaacagacgctgtgcattgaactcccatgatctcatctaatttgtgtcacataccccaaacacttttgtgaggaaataaaataatacaactagttataactgctcagttattaacagtaggtatactactaatggtccttcaatataggctgcagcacttttgctgctactcaaaaaaaaaaccaaaaaataaaaataaaaacttatcagaatgcaggtgcaaaagcatagatactacagaacaaaaccatactaaaatataaaacaaataaattatacagtaggacaaataccatgagctcagagggaagaccaatgagaggtgagagtgggggtgatacacatccttctctggaacggagtagttaaagggaaccctgagttgggtgttaatgaaaggaattgacataaattatttaaaaatagtgaagaccatccatgtaagaaacagttgagttaagctatgggggcaagaagaaataaaaaaaaatgaagctagtaaataaactgattgactgatagaatgtctgaaagagaactaaggagagcaatgtcagctcaaatgccctttttctatcagggaatgataggggtgtggatgtatgctctttatccaacgtcttcatggttgaacttaagtgatgcagaatcatggcataacctgcagaaaaatgaatgtcagtcatctcttgtaagagctgccccaggaagaaaagattgagaaagctgatcccagagccttaaggagttaatatagaggaagtatcctcaaaatagtacctgagaaagatgatcttagaagaattgtgcacaatggatagtgcgatgaagaagagccataaaaatactcagctacaagtataattcttgttcaaaataggcttctgtaagttttacaattaattacgaaataaaacctctaaaatccaactgtgaatttcagtcatggtaaatggtgctaagattttttgctttgggttttttgttggtttgtttgtttttgtttgtatgtttttgacaaggtcttgctctgtcaccaaggctggagtgcagtggtgtgatcatagctcactgtagcctcaaactcctgggctcaagccatcctcccacctcagcttcctgagtagctaggactacaggcacccatcaccacaccctgctaactctttaaacatttttttgtaggctggtcagtgactcatgcctgtaattgtaatcccagcactttgggaggctaaaatgggaggattgcttgagctcaggagattgagaccagcctgggcaacctggagagacctcatctctactaaaaattaaaaaaaaaaaaatagctgggcatggtggcatgtgcctgtggtcctggctacttgggaggctgaggtgggaggattgcttgagcctgtgagttcaaagctgcagtgagctatgatcacaccactgcactccagcctggatcacagagcaagatccctgtctcaaaaaagttttttgtacagataggggcctcacttatgttgcctgctatgtttatgtgttgagttaaggctgaattggacccccatgtgtagtccaaagaaagtcaaaacctcatttcaattatttgctaacccaaacacaaaattaagtttatggggaagctttacgagaactatcaagtttgtttaaccatttgagagttttaccaagctgaaaaatgcccatactatacatttataaaacatctggctaaaaaatataattcatagaatatttgcttttgaaagctttaaatgaacatatataaaaattagattctggtatttataaagccaacaaaattcacatttagtttatcaaaaacatcattgtttgtttgtttgtttgtttgttgttgtttttacgtgttgttacacttcatcttttagatgtacaacagagagttgagtctcttcaagataatgaggagagatggggaagattggaaaaagaagaagggaaatggctgaaatgaaccatatttcccttctataacatttaacwgatcttcatccttcatatttaatttgaagacatgggtatttgtcttcaaatatttgatctataaatattttgtacatcaaagattgtataatcagttaaattttttaaaatgtagtttctggcctttgagggtgtttgtttttatttacaggatcctgaaggatcagaagttgacatggtagaagaaattgatcatattggaattatctcttttcctgacttcaagattccgtctaatcctaggtatgtaaaaatagttgttaataaaaccacatacggaacttttggtgaagaagcaggtaaccagttaaagggggccacctaatgttaacaaagggtgtcacataggtggatatgcaaaatcttttgaagttctagcaagaacttaagctctgttcttggcaaaaaatttccaatacttctcagccattctttttacatatagaaataaaaattgggaagaggaaaaaatagtacccaggtttttttgtcataaaaaacatcaactcctacccctcaaagtatctaatagattgtcagtttaaaaggctggtgtggtcttgttccttgctctggttgctataaaataggrtcgtctgtagtttttgcctggataaactaccagaaggcaaagtccaagagggaaggagttctcagagctatatctattatttggcctcacatgaaaggatttaagaaaaagtttaaacagggttcaatgtaataaatattcaatgaacacattcttggtatgtgcaaatcacaataagagggagagatacaaaataaataatccacagtccctgctttcaagaaatttgtaataggccaggtgcggtggctcatgcctgtaatcccaacgctttgggaggccaatgtcggtggatcacctgaggtcaggaatttgagaccagcctggccaacatggtgaaaccccgtctctatcaaaaatacaaaaaaagccaggcgtggtggcaggcacctgtaatcccagctactcgggaggctgaggcaggagaatcgcttgaatctgggaggtgagggttaaagtgagccaagatcatgccactgcactccatgttgggcaacaggagcaaaactccaactaagatagaaagaagaaggaaggaaggaaggaaggaaagaaagagggaggggagggaggaaggaaggagggaagaaaagaaagaaagaaatttataatagagcagaatgaataagacaagtgcatctatacatggctgcactagaattttagaacaacatctttttatggtcatttttcctctgccctcagttaattcgctgactgaaatttttctaaaaatttaaattgaatttggaggttttaaataacttggataatttaaaaattgtgtacattcttgaaaatactacatgttccatagtgcagaattaaacctattattttattactgctatcatttctccaacttcatcttgtgccacttgccccrtggcaaattatgtgctagccatggtctggcatgtccagtgctttcctacctccgtgcctttgcacatgtcatcccctctacttggaatgggcttcacctggctcttcataagcctggcttcttttcattgttatgacccagagtagaagctgctacaaaaaggctattcctggatgcatgatgtaatgtaatctcttgctttgttttactccctatctcagcatcttgtttattttcttcatgacacttatctcaatgtcataatcatttctttacttgcttgctggcatttttattccccactagcttataaactctttaaggtgggccttgtctgtattgcacaccagcagttcaacataataggcccttgataaatattcattgaattgatgatgatggtaataatcattattataatactattaacatttgtggacttcatagccaatctgcaaggtaggctcagtatatatatgtgtgtgtgtgtgtatatatatgtgtgtatacacacatatatacatacatacacacacacacacacacacacacacacatagtttttttgaaacagagtctcactctgtcacccaggctggagtgcagtggtgtgatctcagctcaccacagccttgatctcccgggctcaagcaattctcccacctcagcctcctaagtagctgggactacaagcatgcaccaccacaccagactaatttttgtatttttttgtagagatggggtttcatcatgttgcctgggctggtctcgaactcctgggctcaagcgatcctcctgccttggcctcccaaagtgctgggattataggcatgagccactatacctggcctagtatatgtttttgaataaaggttattaattaaagccaggtcattttcatcttttaaaaaccatgctttgtttccaaccataaattcatttttgtgaggtgtaaattttatcatctgtataagcttgtcttgtattatatgtttctagagacgttattatggattttgtactgtattttggattttagtattatgttagcataattaggctccaagattaaataaattctcagaaataataagttcttcaaatcaaaactaatgactgtattaagataaaataccaggaaaaataatacaatatatgaaaaactggttactaaacaatatctattatctattatcctaaaaatgctcaattatttattgcttaaaaatcagtcacaaataaaatatattacttaggttttatatatctttgtgtattcttccctctttaaaacaggaatttattagatctcctctgagtgaattaaaaacatttgatgacatctataattttaaatattttgcttccacagatatggtatgtggacgatcaaggctaaatataaagaggacttttcaacaactggaaccgcatattttgaagttaaagaatatggtaatttctgacaagtaaaagtttttctttgctttttgttttttgtttttgagatggagtctcgctctgttgcccaggctggagtgcagtggcacgatctcagctcactgcaacctccgcctcctgggttcaagcaattctctgcctcagcatcccaagtagctgggattacaggcaccaaccaccatagccggctaatttttgtatttttagtagagacagggtgtcaccatcttggccaggctggtcttgaactcctgacctcgtgatccacccacctcggcctcccaaagtgctgggattacaggcatgagccaccgcacccagccaattaaaagtttttctataaaaagttagtgttttgcaataattctttttaataatgtagttaatgcaaaattattcccagatgaagatgaggcagcctgtacgtatggctagaagtactggctagaggttggagggaggagtagtagttgaatgcctagattctagttccagcatgcctttaaccctgatcaagcagaacaacctctgtgtacttgtgttccccatcagagagctggaagagatctagtcccctgaagagcttgactagtaaagatcctttctagaattgtgattattattaggagaaacttaaatagtcatagatgaggtgagtggaacccagtaaaaccaataaatgatttacttgagtcttaaaaccaattagtgacaaaacaaaaacaacaattaggtttccttacccctagtccaacactattttctggctcctaaattcctaatatattcatttgaatatttaagatattcttattttgaaataaattatattaatagactaacaagtaacgtaaatagtttaatctttcatttcttatagtagtttactagcatttctgtgtgctctgctatcaaatttaactttcttctgcttgaagccattttttattccctcaagagattcataatgacatggagaagaataaatactgacacaaattttaacaattaacaagaaaaacagtgacaaaacaaattcgttatgatgaaactcaaccttaaagattacaggctctctgtaacatataatcctaacccatctcccttcttctaagtgtttttgtattttctctgtatatctagaatccacccacctcttactgtctgtagccactctcatcaattcatcagcactctccctcctggactacagcaaaagcctcctaactgatgtctctgcttccaagctatcttgcttggtattagccaaaataatcttgaaatgcaaatttcattatgttatgtcacaattgaaaagtttttttgttttcaaggaacctatactctaatggaagaaataacctattgcctataataaatgctgtaatcaaaatataggcaaagtgcttctggattgacctctgattgttggagtgggaaggttctgcagagattgttgttggtgatgacgatgatgaygatgatgattatgataataaagtggatgttgtgttgatgttacagcttgtccaactataccagaaagtctagctgtttgctaggctttaaagtctgctctaatcaaaatggtaatattacctgtttgtttttattttcagtcttgccacatttttctgtctcaatcgagccagaatataatttcattggttacaagaactttaagaattttgaaattactataaaagcaaggtaagaacatttgtttttttgttgtttttatttttatttttcaaattaactcaactctggttgatgatagttgcccaaagtgagatctgtgatttattatcaaagtgtgccatgatttggggactaattgataaaggagacatcatgctggtagttcatttgcttattctgattttagctgattctgagtttagctttgttggctattcaacagcaaaaacaaagaaaagtgccaaagatctaagtttggtgtatgtgtttagaaactagggtaacttagaatattgggactgagatatgaaggattcacttcctatctttttttaatgatttaatcagccagctaatgctgcgtaactacttcaaaacccagtgccttgaaactcccacatttatgagtcagctgggaagttctgctgatctgggccaggctggtgtcagctgggctcacccatgtagctgcagccagttggtaggtcagctgggggctggctggtctaggaaggtcctgtccatatgtctggcagttggatggggctaaaagtgtgtgtgcctctcatcatccagcaggctagcttgtagcagcagcaacactcaaagaggcaatggaagcatgaaagtccccctgagcctaggcttggtgctggcacaccatcacttccacacattmttttgtccaaagcaagttacaaggtcagcccagaggaaatagacccctcccacactttgtggacacaatgaactgtgcaaaggtcgttgatacatggggaggtagagaattgggggttagttttgcaagcaacctatcacaaaagcttaggtcattttaaaattacaatataatgtagttataccaatctatataactatatgtgtggggtactcttctaagtactcagcatatattagcacatttaatctttacaacaactctatgcgttgatattgttactattcccatgttacaagtggaaaaactgaggtacataaatgtttaataatttgctcaaaatcatacagctagtaagttgcacagcctgtctgcttccagagtccatgcctcaaacattaccctatgctagctctcttattagcattgatttgaaaaatagagtgtttattacttggtctaaaccagcataaaaggctcacttgagagaaaattatagaaactgacctcctataatggggactatttattcaaaccataaataaggaaagttagctcttgctatagtattatttgctgggtagaaagtttactttattcttactttaattctaaactaaaaagggaaacatgcagtttaaattttttatgaatagatctcatataacagtgagattggacacgtaccttttaaaaacataaaagaaaacagagagtagctgatatcaaaattatcaaggaagtaatttggcatataggagagggccctgattctaagtcttgtgatctccccaagatcaatttttttcatctagcacatagctttattaatgtggctttatgaggatgaaatgtaatagtgcatgaaggacgctttatttattattattatactttaagttctagggtacatgtacacaacgtgcaggtttgttacataggtatacatgtgccatgttggtttgctgcacctattaactcatcatacattaggtatttctcctaatgctatccctccccgtcccccaccccatgacaggccccagagtgtgatgttccccgcactgtgtccaagtgttttcattgttcagttcccacctgtgagtgagaacatgcggcatttggttttctgtccttgtggtagttcactcagaatgatggtttccagcttcatccatgtccctgcaaaggacatgaactcatccttttttatgcctgcatagtattccatggtgtatatgtgccacattttcttaatccagtctatcattgatgggcatttaggtgggttccaagtctttgctagtgtgaatagtgctgcagtaaacatacgtgtgcatgtgtctttatagcagcatgatttataatcctttgggtatatacrcagtaatggaatcactgggtcaaattgtatttctagttctagatccttaaggaattgccacactgtcttccacaatggttgaactagtttacactcccaccaacagtgtaaaagcgttcctatttctccacatcctctccagcatctgttgtttcctgactttttaatgattgccattctaactggtgtgagatggtatctcattgtggttttgatttgcatttctctgatgaccagtgatgatgagcattttttcatgtgtctgttagctgcataaatgtcttcttttgagaagtatctgttcatatcctttgcccactttttgatggggttgtttgtttttttcttgtaaatttgtttaagttctttgtagattctggatattagccctttgtcagatgggtagattgcaaaaattttctccattctgtgggctgcctgttcactctgatggtagtttcttttactgtgcagaagctctttagtttaattagatcccatttgtcaattttggcttttgttgccattgcttttggtgttttagtcatgaaatccttgcccatgcctatgtcctgaatggtattgcctaggttttcttctagcgtttttatggttttaggtctaccatgtaagtctttaatccatcttgaattaatttttgtataagatataaggaagggatccagtttcagctttctatatatggctagccagttttcccatcaccatttattaaattgggaatcctttccccatttcttgtttttgtcaggtttgtcaaagatcagatggttgtagatgtgtggtgttatttctgaggcctctgttctgttccattggtctatatatctgttttggtaccagtaccatgctgttttggttactgtagccttgtagtatagtttgaagtcaggtagcatgatgcctccagctttgttctttttgcttaggatgaaagacactttaaagtgcctcaagtgctttacrtaatttcaaattgttacattttatctgaatcctgttattgtaaccatgttagtaaaacagttttatgctattgtctgacagatatttttataataaagtagtcactgaggctgacgtttatatcacatttggaataagagaagacttaaaagatgatcaaaaagaaatgatgcaaacagcaatgcaaaacacaatggtaagatgttaagacacagtcactcacacctacagatgcatccagaggtgagagatgagaagttacttaaaaaccatctagtccaatcccccattttagataggttgaaacttaaaatcctccattggcttccctttgcctttagggtaaagttcattttccttggcatcagcctcccttaccagctgatctcatgccctttcctccctccctcccctttgtattaatcactccaatttctctaactgaccaaagtctctcttgcctccaggtctttacaatatcatttattctgcttgaaaatgctctttcccattgtcacctcctgccccttctttgcctggctaattccttctcattctttaagtttcaacattgacagcctttctctgggaagcctcccctgactcttctacactaggttagctgccccggctgtatagcctcttttcttaacacattcttcacatttcattgcagcggttctcaactaggggtgattttttattcccaaggagacatttggcaatgtccagagacatttgtggttgctactggtgtttactagggagaggccggggatgctgctaaattcctaccatgcacagggcaggcccctacaacaaagaattatcctgttcaaaatgtcaataatgctgaggggttgagaaacccttctttactggaatggcttgtttacttatctatcattttcaatattaaactatttgtgagtctgaatcatttcccttatatgcccagagacagcatagtttcttgcaaggaaatattcatgaagttatttgtccatagtttagggctaatgattgctggaactgagattagggcgctggttccctttcccttattcagcgttctttacattataccacagatgatatgagttcatgtcatttttgctcactttttcgtattcatttggtttgcatcatcaatcatttatcctctacaatcttattaattcaagatgtaaattaaatgcatttttaaaatgcaaaattctatgctagacactgggatgtaaggctaaataagacaaaaatgcctgccctcaagtcgctcaattttataagaaaaaataaggcaaagtttattttactgttgtgttaataattaaataatataatatgacttaaccccacatccctttactcattgtgtgttttaaaattagtatttaaatttgtaagcagtgaagtacaaattaaatattataaaaaccaacaaactctcagttaagggcggaagtacgctgagaggcctataaagatgaatgatgacgcaggaattggaagaagtcgtgtttgtcagctattaccaaaaagacctgttggaccatgtgatgttcaagacccttctacttctataattctatacaaataattagaaaataacatcctgggcttaatcgtggactcggttatctactttacttttgacactaaaccattcttctgacatttaccttcaatttagaggttagtaaaagcagattttattaatttttccttataagttcttctccgaaataactcctcctttttctccttttaaaaagttgataaatggaattgctcaagtcacatttgattctgaaacagcagtsaaagaactgtcatactacagtttagaagatttaaacaacaagtacctttatattgctgtaacagtcatagagtctacaggtaagtgtgtgtgtgtgtgtgtgtgtgtgtgtgtgtgtgtgtatactttcttttgaaaaatatttagacagaatattaaagatataaataatttccaatttctataattatttcacattgtattttctttcatagttaaatataattataagaagtagacttttatatagttacaaaaaggcagtagggctctgcttctttttagtcattggacaagccattgggtccctattacctccacttctactgcaaaaatgggaaaacagtacccaattcatgtccaaagtagttctgcaggctctctgccttgaccatttggcaccctagtgtcctcacgtggtgaaaatcaaaaccaaaataagattatgtgtgtaaaactatttgataaagtactatacaaataaaagttattactattatcattattatagtctacataatgatggagtcaaactgaatgtttcctaaagcctaaagttttcaacattattttaatgtttcttctttttattttttcctcaacttattttaaataagttcagtttaagcagtatctatgagatatttaaagtattgccaaacagacaggcttgcaaacattaatgatgtatgatgccagcactaaagtggcttacaaattagcatcaggtataagacaggtgaagaaagaactgttgcaagaaagaattccatatgagctctaagcaaaatattaatgcaataggattcagaggaaggtgagcttctagatgattgttgagcaagcaagaacagtgttgtgaagatgatcagtcttgaaaaataattagggttttgaggcagagttgctagacagggtgaaatagaaaccctccagagagagggcagatgaagaagagtagatggtgaagcttaatctttgaggacagcagatcatccagtttggctaaaatataggatatgtatagaatgtattagagatgtaatattggaaaggagtttgggaatattaaagcttcaaatgttattcttaatagtttaacttaatctttacctggaggataacattattgggctcttgccagttgtctggtcatgtccccttccctccccctcccccctcccgctcccctccctcccctccccctcccctccccctcccctccccctcccccctcccgctcccctcccctccccctcccctccccctcccccctcccactcccccctccccctcccccctcccctcccctccctccctcccctcccgagtcttgctctgttgcccagactggagtgcagtggtacagtctcagctcaatgcaacctccgcctcctgggttcaagcaattctcctgcctcagcctcccgagtagctgagattacaggcatataccaccatgcctggcactttttttgttttcgttttttagttttagtagggatgaggtttcaccatgttggcccggctggtctcgaactccctttcagggttctttctatatcaagctccctttttctgatttctctctatgtatctatgctctgtgaacaccaacccccatcccccacctccacttctgtaaggctcagtttctggcctgacccttccctctctcctcaatcccttgaatacagtcaactgaaactcaggccactgatgaaaagtggtgtcccttcctggcatccttcctcagtccagtcctgtagctctacttctccaagggcttctctacatacgagcttgtgcataaggccttggaaactcctgaggtctaaactcttctctgctgtgcccctctgaagcaagacctatgtcctacttactactggtaaatgaatgaatgcaagaatggagtgagtgaatgaataagtctgtggagacatatagagatgaaatggatatccatacagatcatgatactcctaaaaactgtcaacatgatgcttgccatttccttaggtggattttctgaagaggcagaaatacctggcatcaaatatgtcctctctccctacaaamtgaatttggttgctactcctcttttcctgaagcctgggattccatatcccatcaaggtagattgggtgagggggtagacgttgctacatatgatcatcttgttctgttcatggaaaacatgtgggtggcaaacagggtaagaatgttgccatgaagtcacagagggagcttattctgtgaaacctgcccctcytggtggacacagacagggatgggaaattgaaggtcagctgcagccttggcaatgacttcaaaagtgagggcaagatagccttgtattaggcatccctaaataagcattaaattacatgtaataaataagcattaaattatatgtaaataaaatctcataagactctagttcaaaaatacaaacatttaaaattatttggtggcaaattcttaaaaagccttaagatggagatatcattccttgaaaatagactcctttctctcactatgtttttgcctccagtgtgtctcatttgyttccctctgtctctgtgttgtctttgtgcataactctgttcaatctctygtctctgtattgctctctgttcttttcatttttgcttctttccgtccctgaatctctttttttctgtcttttttgcttactcctctgcattcatttttctctctttcaccttcttttcctcctctaaatgctgacagtatagaattgaaacattcatgtggtttttagatttttatctatcattatatattttattayaaataatatattttattatgttgattaaatggaaatgtttattccctgcccttaatttagaaatccagagcaaaatttttttttgttctttgaaaatgtgttactttttaaaatcaacttaagtacaatcaaaatgtgttatttattatttactgtgggtcatgggcttttaagaaaaaaaaggatttaccaagcccaaagcaaggtttggacatgcttgtaggttcttacatatatatactatatatagaaaataatatataacaaagtatcatataatgcatatacagtaatatataatatatatactaaaatatgtaaatatagcaatattatatagaacataagcttaaaatatgtttatataaaagtaaaataacaaactatatctgtgtggaattgtgtgtgtatatatatatatatatggcagtgagaggtagatgttaaaggaaaaaaggtgtatctatttttgtttctcatattcaagggacttattcccagaarcgattgcctcattttctcctttatccagtcctaaaccaatcaaagaaatacagaagttagatagcagaagaccttatcacacctactccttgactgacttaatagaatgatatttatgttttgagtttgcttgatttatgggagaatctattcaagaatgatttaactaaatagaattaaatctttctataagctgagaatacacttctctttactaaattaaacataagtaaaccaggtgtggtggagcatgcctaaatagttccagctwcttgggaggctgaggtgggaggatggcttgaggccaatagttcaaggttgcagtgcgctatgattgtgcctgtgaatagccactgcactccaacctgggcaacgtagtaagtctctgtctcagaaaaaaaattttcagaaaaaaatacataaataatttatactttggtggggaggaaggaaaattatttcagaattgtgctttaaaataagtgatgagctgttgaaatagatytggattgttttgacaaacaggtgcaggttaaagattcgcttgaccagttggtaggaggrgtcccagtaacactgaatgcacaaacaattgatgtaaaccaagagacatctgacttggatccaagcaaaagtgtaacacgtgttgatgatggagtagcttcctttgtgcttaatctcccatctggagtgacggtgctggagtttaatgtgagctgaattctcctgttgtattttctaggacaatgtgtactcttgaccatgtgttttggctagtgtgcagaacagatgcggcagattttacacatgagtccagtgaacagttccataattttgcatccaagacaaattagtcccagagacaatctgctaatccattgaatggtccttgaggaagataaatgtatcaattttttatttgggagttaattgttttatcttacaccgttaagaccatatcagactctagaagcttcagaataggtatagcagtgcacatgagtgttaggaatatcctctcttcccccctcacttttaatcccctgaagggccacaaaagggtcaaaaatatggaagcctcccttttttctaactacagaaaccattctactttagagcccacttaatagtcttctctcgcagcaaatattatttaagttcccaatctcaaataaaatatgagcaataacatagtaacatagttacaaagtaacttagtaacataataacataggccaatgactgcagcatgcatatgctcactgtcatctattgagcacttactaaatgctaggcatcatgctgagagctttatgaagaatacatgaaacaccatttaattagcaagatgagttagaatattatctttgccattgtgtggctcaggaaatggaggcttctaacctctcttttgattaactaattttatccagagttaatamgtggtggtactggtatgtgaaccagtgtgtacctgactccagagcatgagctaataacacttctgctgtctgagggtagatattgctgccatgatatcatttcttctccacctcatatttataagcacccatctgtgcctctacttcacaatgaaactgggccagatagtctctgagatgttcgttcatagctcctgtccccaagagttagtgctacctccccactacttcccttctcctacccccatttcctaaatgcttaggcatctctctgtaatcatcccatgcgaggagaagtcccaacttaccatgacatttcaggaagaccaccaataattattcctggagcatctttctctcttcatttcagacttttccgccatagcccataatcccatcattcttgtctgtagtctttgtaaagttgcttgacaccacagctgtataaacactgaagtaatggagggttttttcccctttascatttgttattgtgaaatttagaaatttataaagcaaggaaaataatttgaaaggtatgttttacagaaagcattacatcacagtatacatgtctttttgaaatttctcttttcaggtcaaaactgatgctccagatcttccagaagaaaatcaggccrgggaaggttaccgagcaatagcatactcatctctcagccaaagttacctttatattgattggactgataaccataaggctttgctagtgggagaacatctgaatattattgttacycccaaaagcccatatattgayaaaataactcactataattacttggtaagtacataatgatggatttacatcttattcccccacctggaacattttcctttgcctctagagaggcattagaattatcctttatacttttattcccaaagcactttcaagarcatcatctaacttgaacatcagtttctcaaaaaacctttgaaatagggcatgattttcatgaccatttcacagatgaggaaactgagggacagagaagttaaaagacttatgatggttactcagctgggaagaggaaaattttgatttgagctgaggactctgactcctgttctaataacactttttaccaaagagagcctagttattccaaagcragaacctgattaaatcatgttgcctctgttctctttcatggccaaagattatatgcctagacccagttcggataagtgaattttattgtcaaaaaatggggaagcaaaatcctctcctgagaattgaatcctatcttgcctgttccaattcygtagctgagcaacatccctattgcatcatttatattaaacagaggtggatcgatgaagcctgttggtgaaaccaagaaaaaaacttacagaaaatattaagagcttcctgacaatcaccaaataaatggaatgaattatttcgacagccaggccaagtacatgctgttggcttttcaacatttttgaggaagaaattgaaaaaacagtaatgaggaccatagataaatattgactgataaagggaaactgtttatggactagataccaaatccatgtatgcagttctggtctctaaggacaatttaagggacctctgagggcattttggcttcaygtgattttttttttttaatcttaaaccttcaatttagaatctaaaccctggctttaaatccccaaataagatgcactccacttattcatctatttttttttaatcrgtgaaacaaaaggggttttagtgacagtgtgatgactttgaacagtttttgggttcaaattttagctctctaatttactagttgtgtgattttgaattaaaatcagtatgacttttagtttctgagcctcagtttcttaaatgaggagaataatattcctcttattgatgtattgtgagaatgaaaggagttaaatacatgttaaagttcctggcacatagtaggcccataaacgttaactcactctttcttccttccttccttccttccttccttccttccttccttccttccttccttccttccttctctttctttccttccttccttctttctttctttcttttctttctttctttccctccctccctcccttctttccttccttccttccttctttctttctttccctccctccctccctcccttctttcttgccttccttccttccttccttccttccttccttccttcctttctttttggtggagtctcactctgtcccccaagctggagtgcagtggcatgatttcgactcactgcaacctctgcctcccaagttcaagcaattctcctgcctcagccttccgagtagctgggattacatatgcccaccacagtgcccggctaatttttttatttttagtagagccagggtttcaccatgttggccaggcaggtctcaaacttctgacctcaggtgatctgcctgccttggcctcccaaacttctgggattacaggtgtgagccaccgtgcccagccaaaattggtatgtctttttttttttttttttttttttttgagacagagtcttgctctgttgcacaggctggagtgcagtggcatgatctcagctcactgcaaacttcacctctcgggctccagtaattctcatgcctcagcctcccgagtaggtgtgattacagtcatgcaccaccatgcctggctaacttttgtatttttagtagagatggtgtttcactatgttggccaggctggtcttgaactcctggcctcaagtgatcggcccacctcggcctcccaaagtgctaggattacaggtgtgagccactgtgcccagcctaactttatttttctttaacataatttctgctccagctccaggctgcatcctaaagcacaggttttgtttttgtttgtttattttttacttattgttgctgctgctgtttatttttagattttatccaagggcaaaattatccaytttggcacgagggagaaattttcagatgcatcttatcaaagtataaacattccagtaacacagaacatggttccttcatcccgacttctggtctattayatcgtcacaggagaacagacagcagaattagtgtctgattcagtctggttaaatattgaagaaaaatgtggcaaccagctccaggtaagccacaaattataagtcacaattgaattttcttttcaatgaaggaggctgccaaagttttagctgcttctgaaaagtcttgtctcatacmaatgatcttttcttttctttttcaaatgaacttttaggttcatctrtctcctgatgcagatgcatattctccaggccaaactgtgtctcttaatatggcaactggaatggattcctgggtggcattagcagcagtggacagtgctgtgtatggagtccaaagaggagccaaaaagcccttggaaagagttaagtaatgcatgtctcgctgcagtgttgcatgaagtgtggccaccaggctaggatatggaggaagaactaagggaagactaggcctgcttttctgtaatctactcaacatactcatttttaggaaggtaaaccatcctcctgtcagctcccaaagcacaggtcaatcctcttttgtttttcaaatgtaaatgtaagcactttaagaatatatgatcatggtagcaattacattcatggaggaaaaattactatcagaatactttggaggtttagggtagggtgttgatggcagttatagtagctagtagcagcacaggaaagacctgtataggtaacatttggattttttttaaattctcattgaaatccatagcacagaagaatctcaaaatcattcaattctcataagttcctatttatcttattatgttcagctattattttcgaggcttgaatgtctttgaacaaggaaggaaggactgagaaactgtaaaattaaaaaatactcggagaacgaataagcctgtccaaacaagtcttcagccatttagaacctagggacctccccaccaaaatgcacaaagttgtgcttttaaagcaacttaaaattaatttctatgttaattcagtccttcatgcattcatacctatttatttatttatttggaacattatattgattgcagcattcattctatgtacaaaacactatatatcagtttctaagaaactcctcatcaaagctatttgtttaagacttagttcttgatttaactttgaatagttatgtatttataaatacaaaaggacaaacttagaaacaaagttgggaaattttgtctttgatcatttgaaaaatatcatctgtgtatttcactggtttgtgataaccatgtaacaattagtaccttttagatctttagaggaatgatttatacatctcaatgkgctcaacattttgcctttctggacaggtatttcaattcttagagaagagtgatctgggctgtggggcaggtggtggcctcaacaatgccaatgtgttccacctagctggacttaccttcctcactaatgcaaatgcagatgactcccaagaaaatggtaaaatgctcagcatgtttattactgaaaatcccattgatcatttgccccccaratctcatttttatccttcttcccaaatattctgtaccctgatcttagaatgccaagactacataactcacctgtataaaatgtttcactggccttcaagataaagtacaaattctttagtgtagtactcaaaaccttccatgatcttcgccctggctctctccaactagctcttaccctgctgtgccttacgttatgtttaagctctacagaaccaagtggagttcttgagtggcattatgctattttgcacctttgggcctttatttattggaattggtttccccttcattagcctggagaagcaatgtaagaatcatcgcctctacaagacctcttccccacatagaatttataattccctcctcctttaatagggaggctattgcagggactagatctatttacaagttatagaacagcattgtgtcattgtgcattcttacatgtagttgtaagtcctgctcacctactgcatcaggagctctttaaggatagtaaccataccttaatcatcttctttctatggttttaaaattgttcataattatacttgatactgtggtattcatagttatatttgcaataatatagcacaaagagcaaataataaaaatagcatacccaacaaaagcatcactcactctaaatgcttaggtatttctctggaatcagtggatcagagaggctgcaggattcaaaaccaaattcagataaaataagtcaaaagatatgacactagatcatgaactccactaagataaaacaagtcatattaagaagtatggtgcacagttcctaatccaaagcagcccctcaatatttgttaaggaatgacttgtgaaggctctaaatacttaaatagtttcatggaatttttttttgagattttatctcctttttaatccttcttctttatctttttttaaaaaaaccagatgaaccttgtaaagaaattctcaggccaagaagaacgctgcaaaagaagatagaagaaataggtactgtaagattcawgtgattgtaaaaaggttrtggtcatatcattcaaaaactggacaaaattaaatgttatataaattcccctaattgaaataaaatgaatgaaaagaaagatatgtatggaggtctagcttatctctctcagaaagattaatccaaataaagtctagtagttcatttgccatagccttaatctaaggaaataggtctttattacttcaagctctaaaatccaaaatattagcttttatttgtcataaatattttctctctgataacttcatctggcaattaaaatcatatccttccattttattctgacaaaatccatgatttgactattttggggatatacctagaagtctattacttctatttcatatatttaactgttagtagcattgttctttggaaaatacatcttgtgagaattattttaaaataattatttaaatggttatgataattcgtcatgttactgtagaaagaatatcaaactgggagtcagcaaattgagttcaactaatatcatgcctatggtaatataatagtttcttccatttgtatatgagttattttaattctaacctttattctaagttctaatgatatgaaaagagagacattgactaatctgagcacttacaatgaaggataatgctactaggtgaagtccacaaaccatgttatataagaagtttttgaaaaataggatattcagcttgaagaaggaaatatttgtatagtgatgatagccatcttcaaatatttgaaggcttcttggatatttaacttattttcttaaaaaacattttctattctttttctatatttttctgcatattttcagcagaacccaaagttccagtttcaagagttagtatttagcttaattgcaggaaaccctttaaccatttagtgtgagctggaatggaccatttggtaaggtcacattctccccattcttagaatagttccaaggggagtctggacagtcaactagccataactattgtgggtagggggatcatatagcaacagaaaccaggtatcccttgagattccttctaagcctgagatgttatsactctgcgtcatcaagagcacttgcattattaccatttcagctgctaaatataaacattcagtagtgaagaaatgttgttacgatggagcctgcgttaataatgatgaaacctgtgagcagcgagctgcacggattagtttagggccaagatgcatcaaagctttcactgaatgttgtgtcgtcgcaagccagctccgtgctaatatctctcataaagacatgcaattgggaaggctacgtaagtatgacattttctatcagaattctgctcaatatggggaattttgtgtaattttatgctgctaagaaaggcagttttcatgatctatttagaattgaaagtagaaaagataacttgtaaatgtccataagaaaaaaaaatccttcatttttgggcatccgaagaggtacagtacagagcagagtacactaggccagagttaagacctggcataaccttaaagccaagtcatcccataaacttgaatgattatttatcctctctgagcctcatgcaaggagcttcgaccagatcctctccaatatgcctgtgagttctacaagtctacgcttttgtgatattacaaccattaaaaattctgtctatatctacattgatgaaataaaggagaatatttctaaatctagcctaaggttaagtgtacttatataaaagctgatgtcttatttcagtttcaaccacaatacatgtttccagaatttatagaactctcattaacatgttttcagaacttttaggactttatatatagtctttttttttttttttttcagtaggaatctggctctgtcacccaggctggagtgcagtggtgcaatcttggcttactgcaacctctgcctctgggttcaagygattctcctgcctcagcctcctgagtaactgggattaaaggcgcctgccaccacacctggttaatttttgtatttttagtagggacagggtttcaccatattggccaggctggtcttgaactcctgacctcaggtgatccgtccacctcggcctcccaaagtgctgagattacaggcgtgagccactgtgcccagcctatgtatagtctttaacaaaacaagcaaaagcaaaatgacagcttctgttttatacttatgtgtgctgcgtaatgacattttcatcaatgatggaccacatgtgcaacggtgatcctataggattataataccgtattttttctgtacctttcctgtgtttagatatgcttagatacacaaatacttatcattgcattacagttgtctgcagtattctgttcagtaacatgctgtacaggtttgtagcctaggagaaataggctatactatatagtctagatctgtagtaagttataccatctagattagtgtaagtacgctccatgatggttacacaacaaaatcatctaacaacatatttctcagaacatagccctattgttaagcaatatctaataaccataattttggtaaatggccacaaaatttatgtttgtagaaatatattcattgagatgtacagtgtctaagattcagattgttttccaatatttgttttgctttgtttgtttgtttgtttgagagacagagttttgtttttgttgcccaggctggagtgcaatggcgcagtctcagctcactgcaacctccgcctcccgggttcaagcaattctcctgcctcagcctcccaagtagctgggattacatgcacctgccaccatgcctggctaataatatttgcttattataagcagaattttaataaacagtctagtccatatgttgtttttctttttggagggaggatttggcttttttttctcttaattttttttaatttttaaatttatgtgggtaaatagtatttacggggtacacgagatactttgatacaggaatgcaataagtaataatcatatcatggaaaatggggtatctatcccctgaggtatttctcctttgttttataaacaatccaattatactcttttagttatttttaaatgtacaattaaattattattgactgtagtcaccctgttgtgctgtcaagtactaagtcttattcattctttctattttttgkacccataaaccatccccacatccccctcatcctcctactacccttcccagccttctactctatatctccataagttaaattgttttgatttttagcacccacaaataagtgagaacatgtgaattttgtctttctgtgcctgacttatttcacttaacataatgacctccagttccatccatattgttgcaaatgacaggatctcattcttttcatggctgagtagtactccattgtgtatatgcaccacattttctttatccatttatctgttgatggacatttaggttgcttccaaatcctgactatttttaacagtgcagcaacaaacatgggcgtgcagatatctcttcgatgtactgattttctttcttttgggtatatacccagcagtgggattgccagatcatatggtagctctattctttgttttttaaggaacctccaaactgttctccatagtggttatagtaatttacattccccactaacagtgtacaagagttcccttttctccacatcccctccagcatttgttattgcctgtcttttgaataaaagccattttaactgagatgagatgatatttcattgtagctttgattgcatttctctggtgattactgatgttgagcaccttttcacatgcttttttgccatttgtatgtcttctttagagaaatgtctattcaaatcttttgcccatttttaagtgggattattacattttttcctgtagagttgtttgaactccttatatattcttgttattaatctcttgtcagatgggtagctgcaagtattttctcccattctgtaggttktctgcttactttattgattcctttgctgtacagaagctctttaacttgatgtgatcccatttgtccattttggctttggttgtctgtgtagtggggtattactcaagaaacttttgcccagaccaatgtcctagagagttttcccagtgttttcctatagcagttttatagttagaggtcttagagttaaatctttaatcaatttttatttgagttttgtatatggcaagagataagggtcacgtttcattcttctgcatgaatgggataaccagttttcccagcaccattaattgaagagactgtccttcctccaatgtatgttcttggcacctttgtcaaaaatgmgttcactataggtgtgtggatttgtctgggttttctattctgttccataggtctatatgtctgcttttatgccactaccatgctgttttgaattatactatagtataatttgaagtcaggtaatgtgattcctccagtttttttctttttgctcgggattgctttggctattctggtcttttgtagttccatatgaattttaggattttttttctatttctgcaaagaatgttattggtgttttcatagagattgcattgaatcagtagattgctttgggtattaaggcgttttaacaatattgattcttccaatccatgaatatggaataactttccatttttttgagtgtcctcttgaatttctttcattggtgttttatagttttcattgtagaaatcttttacttctttggttaatttaattcctaggtatttaattttatttgtggctattgtaaatggtattactttttaaatttctttttcacattgttcattattgacatatagaaatgctactgatttttgtatgttgattttatatcctgcaactttattgaattcatttagcagttctaatagttttttggtggagtcctcaggtttttccaaatatgtgatcatatcatttgcatacaaggataacttgacttcttgctttctagtttggatgacctttatttccttctcttgtctaattgttctggctaggacttccagtgcactaggacttgcctagaaattgcagtccttgtggcctagactgcccctcaagttaacctagggccctagagcactccagcccatggtggggaggcttgctggaactcaagctccaaccactgggatgagcgatgcccctctggctagggccagtccaaatgctccctccatgggcagacaccagctgagtacagcctggttctgctttccaccgtgacagtgcaacactgagttcaatgcaaagccacagaatgactgcactctccctctcccaacacagagattctccatgctgcacagtcactgctaggggatgtgggaggagtggcattggtgcttcaagactatctttcctgccctcttcaatgtctctttcagtgatgtaaagtcaaaaccaggtactgtgattgctcacctgattttcggttctcttgatggtgctttttgtgtgtagttagttgttaaaatttagtgtaccaacaggaaagacaaatggtgtaggcttctattcagccatcttgctctcccctctcatatattttttcgtttttcaatttttcaactataatcatctggcttggcttcagctggatagaagtctctctctgcagccccctccttcctggaactctccctcattccagacaagttggccttgcaaaactcccatcagtgttgccacaagtcttcaaaatcatcaggctctgcttgtattcctctccctgccctagtctgtaaactgcctctaggcagtaagctggggcaattttaggtttcacctaattgtttcctttctcttagagatcacagtcttgcttatgctctaatgtctgaaaactgttattttgcatatcatgttttgttttctattaaggcatcttatatgaaaacagaagttcagtccatttttattaaagtaaatataaacaaattaccaagttaaagaaggcagagaaccatataaagcctccttttttctaatataaacacaattattacaattatatatataagtgcaaataactttatagactgatcgatatcttgtataatctcaggaatactaaacatttagcaatttaagaaaaaaatcattaaagatatttaatgctttgttttgccaatgctattagtggaaaaatcctaaggcctttatagtttgtttgtttgtttgtttgtttgtttgtttgtttgtgacagagtctctctctgttacccaggctggagtgcagtggtgcaatctcggctcactgcaacctctacctcccaggttcaagtgattcttgtgcctcagcctcctgagtagctgggactatagacacccgccaccatgcccagctaatttttgtgtttttagtagagacggggtttcaacatgttggccaggctgatctcgaattcctgacctcaggtgatctgcccacctcggcctcccaaagtgctgggattacaggcatgagccactgcaccctgcctataattctattttggaagcattaaacaaaatgttttatttacctttcagaaaatgcttaagttacagattaatggccatattttaaaattcacctataagtagaatttatattgtttttccataattgaatatgatttttttgtccagacatgaagaccctgttaccagtaagcaagccagaaattcggagttattttccagaaagctggttgtgggaagttcatcttgttcccagaaggtattatacttctttcatgtttccttgaaagaaatgtggataatgcaagtattatggccaaaaatctagaaactacccatttcccaatagcttgcataggagttaagatgatcctgcaatttgatcaaattttgttttgttttgctttgcttttttaaatttttatttttttaatatacatcgtactggtgattggctccaggtcagaatgaagaagggtgctattccatttaattttatttgacttcaktatgcatttactacacacaactatgtgcgatacactatattaagccactatttttatcctaaaatatctgtactataaaacaaacattaataaacaggaagaaaagttttctttttaaagttttctattcaacacattttaaggaaacacttcctctataccactgaaaacagtgatgggctgagtcctcgagccatactcttcttagatgggcttaaagcactggttttccaatgagaaggcaaggaatgagttcaaaggcctgcagttgtctcctcacgcatctccttatttctacccttgtcttctctaatccttcttccacacaattgtccatttcatctgacattacccattagctagcatgtcctctagtaaaccttctggccactgctccccacactaccagtgattggattaattgcaccctcaattaaccctgttgtgtgtatcatattgtattataatgacttgtttactttcctgtcttccacattaaaatgtaaatacctcaaaggcatgaactaaattcagattactgttttatatccaggacttggcctaggatactgaaaataaatgtgttgaacgaawgcacactgcctctgaactcttataatgccttattggtacaattattacagtgcagtgtaatttatttacttaactatttcttccactagattgtaaactgcctgagagcaggactgtatcttatcagtgctgtttactcagtactcagcactatacctgatacaaagttggtagacaatagctgtaaataaatatacaagcttaatcataatcagcagtttttagttatgtcaactttgttttgagcagtgctaacatgcatcactttgcttccctattttagaatatactcacaacaaacatctttttctttgtttgtgtgcttggattttgcaatgtttcaaaggcattcttctgaacttgaattctcatcatagaggtrcaatgtctaaaaacatgcaatatataagagagttactgaatatatttttcttgatgaggttttccttaatgatgtgatttcatctcgtgaatttttttctttctctaaagtagtttgaagcaaaaattctgttaatggatgtctctgttaagttgggttaatcaatattccactgtatttgaatatcaacattttaacttccagaaaacagttgcagtttgccctacctgattctctaaccacctgggaaattcaaggcrttggcatttcaaacactggtaagcaggtttaagtgatatatgcatttaaatagtgatttgattagcaagatgtaattctttgttagtatctatttagtttacccaggacttaaatggtagcaatttttaaaaaatattcttttttttatgtattaccaaaagacttggatatacccacatctttgaacatattgatttctcctttcactcctctcttttttttctttttcctttttttgtaaatgaagaaggggtctcgctatgttgtccaagctggtctcaaactcctagtttcaagcaaccttcccacctccaccttccaaagtgctgggattacagcttgagccactgcacccagcctcaagtctttattttccttcacttttctcactgactgggagcttgtgtagagttagaaacaaataaatgaactctcttgggctgatctttatgatgattaagtgcagatgctttccaaatagcttcaggaatggttttgtttgtttgtttgctacttttgttttaaaatcttggtttccacaatcaaaattttatactcattaaacatggagccaataatgaatatctaaaaagatttggtgtgttagttgataaacattctcatgccttaaatagaattaactatttgttgaataaatgaagttttttgttaatactaattattattgaaattaagatcaatgaatagaaaattcaaggacatgagttgagagttcagagaaaaacatgatctaatattattttttccttgaagtaaagcaaatgtgagaaattttaataccaataaaacattataggaatttcctaatatgattctactttgcttccactttgggctgaaggtatatgtgttgctgatactgtcaaggcaaaggtgttcaaagatgtcttcctggaaatgaatataccatattctgttgtacgaggagaacagatccaattgaaaggaactgtttacaactataggacttctgggatgcaggtaagtaggtgttaatatttatgggataaaggaaacattctctggttttctgagaattctattagtggaattaccatacacaaaaaagtagaagttcaactcagttcagcaatagaaaccaaacacttaaaatgagcattgtactatatgtgtagggatgtgaattaaagggatgaaggaaggaggaaggacaagtaggtattcatgtaacttcaattgaaagaataaattgcataagataatccatgtgctgtggaagtccagagaagggtgaattcatctttagttcctttatttgcctatactcagagttccttgatttccttgattctaacaaccctttcctccattttagccattcatactcatcttcactttatagatcttatcatcctctctgaaatcttgatttcagacattcacatctcaccatccagtgacaacctccttcctgtcctcctaactcattaaccagattacttccatagctctgggtcagtagcatcactgaaaccttcagtccattgactcaatcccttttattgtcctttacttccctgctctttttactttactccttgttcagattagaattcaccagccatcattaaaaccacactgactaaaattatgccaactccctggatcctatctcactccaggacacaattccaaccatgattggacccaccatttatcttctctttgccagcacacccctaaagagaattatataataggctgactgatttgatttgaaaatcacagtcacaaaactttgcatgagaattcaatgtgttccaaaattctagctatatttttttaaaacactaactttattcttagagattagaatttcagtggtttcctaaaattttgcttacataccctcttgttttggaaaaactatgtatccctctgacactttttttttttaagacggagtctcgctctgccctctgacacattttaaaattggcatctaaaatttttatcatacattttttaaaagatggcaatctattacttttaaaatatttaaatattggtatcttaaaataaaactgttttatcaaacttatgtatagcagactccaaataccatagcaatcaattttttaaatgctcaaataagcctttttttttcaagatggggtcttgttctattgcccaggctggagtgcagtggtgcgatctcggctcactgcaaactcctcctcccctgttcaagcaattctcatgactcagcctcctgagtagctaggattacaggtacacgccaccatgcttggctaatttttgtatttttagtagagacaggtttcgccatgttggccaggctggtctcgaactcctgacctcaagtgacccacctgcctcagcttcccaaagtgctgggattacaagcgtgaggaactgctcctgggctcgaataagctcttagcaacagattacatatcattccttttcctcaatgaattcatatttccattttactcccctaatgttacatattttatgcatgaatttttttctgttgatcaccttattatactttaatgaacaaaaatatgcacatacattgaaaatgaaatatcttaaaatttcatgattgtaaaattccaagtatcaaatgatatgtggatttaggtatcattacaaatattattattagtatactattgataaaataacatatttctaaagttattaaatatagaaataaaattttatttaaaaattctcttctcggccaggagcggtggctcaggcctataatctcagcactttgggaggccgaggcgggtggatcacgaggtcaggcgatcgacaccatcctggcaaacacggtgaaaccccatctctactaaaaatacaaaaaagttagccaggcttggtggcaggcgcctgtagtcccagctactcgggagacagaggccggagaatggcgtgaacccgggaggcggagcttgcagtgagccgagatcgcgccactacactccagcctgggcgacagagcgacactccgtctcaaaaaaaaaattatcttctcattagataaatgaaatttttctctcaattggcttaatagttatggataaatgttatttattgttagaaatgagagagagtttggcataaattctattcttatttttcatttttatagaggtaggcattgctgttcaacccaattttatcaggaaggttgataaaataaaaatattgtcaattttattacccctttatcaatatattttaatcttatatcttggagcttcacatttagcttattcaatttatgtaatatgtttgtcatataatctaactggaaaaatcagtcctcattgataaaatgatcagcgaaaatcagacttactctttgtcatagaaatgccaatttcatttttcaatccaaatcatgttaagaaatgtcactctttttttcacaattttaattttcagtaaaaatgaacttttccatataaacttgtttcatcaggtaacactaaatatcagagaatgcacacacaaattttacttggccacaggatgtaaatggggaataaacttaagtaatcagaatttaccatactgatggtattatcttttttttttttctttttttgagacagagtcttgctctgtcacccaggctggagtgcaatggcacaatctcggttcactgcagcctccgcttcccaagttcaagtgattctcctgcctcagcctcctgagtagctgggattacaagcatgtgccagctcgcctggctaatttttgcatttttagtagagacagggtttcaccatgtggtccaggctggtctcgaactcctgaccttgtgatctgcccaccttggcctcccaaagtgctgaaattacaggcatgagccactgttcccggccagtattatcttatttttacagaaataaaatcaaaatgttactcatttctcttccttagaatttactcacagggtttgcataaatcctatgaatcatgccaccatcttcagccctgtggaattgccctccctcatttggctccatccccaccaccctaaatacaacgtgaagagttggagaaggaccttgattaagaagctgtaaagttgcctttacattatttcttttaaacccactagcttttctgcagacagaatgcttcatgaatttaagataatcataactcagatagagataycaaaggccatttctccatcaggttcctgtagtggttttcatgtctcaaaatcctgattcaagatgggcttgaggcttggaaactgagatactaagacagtcagaccatctcatcaaaacagactcagcataattttataactcacactgatcttggctaccaaaggattttggtagatgattaaggaggtgtcactcttaaaccatgtaaattgtaatttgagatagacacataaataggtggccataacagatgggtaaggcacagaggccacagccaaactctgctcaactgtaggattgagatcagcaagggctcctctgctcacctagtcttagacatataaaatcggcttgtgtaggtatgtgtgtatatatatatatatatatatatatacacacacatatatatatacatatatacatatatacgtatatatacatatatatacatatatacatatatatacatatacatatatacatatatatatatacgtatatatacatatatacgtatatgtacatatctacatatatacatatatgtacatatctatacatatatacatacatatatatatatatacacacactgcctcagcaatttgtgtttccaccaataatattatcagagacatcctttcatatcagtatatacagatttacttcattactttaatggctgcacagtaattcacatggtgggtatactataatttattgaaccatgtttctattaaagacatttgggttgtttacaggttttcactattataactgattttgcaaagtctscatttatgcatacatatcttcctacatgtatatttctgtaggatagatgttttgtcttggagtgaactaactgggctaaagggcatggacattttaccttctgataataaatattgccataattatcttccaaaaggattccatcaattgacattcttaccaagtgtatgcaggtagccttgatccctcacattcttataatttgggggaataaacattttttcttttattcatacaatgaacacttatacagaaattgaaatgaatggactagataactacatgcatcattttgattaaagctcaaaaatgtaacattgctgaaaaaagcaaattgcagaataatatgtatacacaatgaatacaactacataatatttaaaaacatgaaagaccgcgctatatattgtttgttaatacacataaaatttttgccaagttgacagacacaagtgatatgtcactgatgtttctatttcactaccctgattactagcaatgttgaacctcatttcatttgtctgtggccatttgtatttcttctttcatgtattctatgatatcctatatactactttaatatcctttcttttgctttccattgagttccttttttctggggtaagttacctagcttcttcttgcttagtttcctcatctgacaaatgggatgataatagtatctatttcatagttgaagattaaatgagctaattcatgtaaatatagtacttggcccatagtgagtactcaacaaatgtacttattattgtttacaggagcactttgtatgttagagctataaattctttattgattataaatgttgctggtatttaatctgctacttgtctttaactttgttattagtgtttttaatttgtatgttataaaatctgtagatcttttcctttatgtcatttgagttttgtgtttttggaaatcttttctcactgcaagttttaaaaacgtttttctacaaaatactgcatgttctcacttataagtgggagctaaacattgagtatatatggacacaaagaagggaacagcagacaccagggcctgcttgagggtggagggtgagagaagggtaaagatcaaaaaatgacctattaggtactatgcttattacctgaatgatgaaagaatctgcacaccaaacctctgcgacacgccatttacctrtacaacagacctgcacatgtgccccgaacctaaaataaaatgtttttctaaagaactgttttttctatattttctatagtacttttatagttttttgtgagcatttagatttttttatctgaaataaggatctaatcccaaatagccagatgatccagcagtatttgttaaggaattcatgcttttccaactgatttaaaatgtcatcttgcccccatatatattgaatttccatatatgtggatctatttatagattctctcctctgttttgtttacatcagtatcacactgatttaaagtaccatagatttgtggttatattgtatawctattaggcaagtactctctggtattcttatttttcaaacgtttttgatgttgttattcttacacatttactctgccagataaactttggaattagtttgttgaattctccttttaaaattataatagggttttcatattgtcctgaatttatgaattaatataagggaaattgacttgccatattgaatcttttacatctctttatccttttgctttatgaactaaatcaagggtcagcaatttatggaccatgggccaaatctagcctgccatctcttttgtatgtcctttgcaataacacaattatatataacttgacagcattttttttttttttgagacagagtctcgcyctgtcgcccaggctggagtgcaatgggaagatctcgggtcactgcaagctccgcctgccaggttcaagcgattctcctgcctcagcctcccaagtagctgggattacaggcacacaccaccatgcccagccaacttgacagcattttaaagtgtcatgcatatcactatactgccatattttatttaatctttaaattttcagtgcatttccatcatatcaaaataagaaacaagtacatctgtgatattttgggcttagttcctgttaattacctttcctcctgagtgtgggttacactttcctatttctttttatctagtaattttggattgaatcttctactttattaataaaaatattataaagactctggattctattacattcctctgaagatttttcgtgtgtgtgtgtgtgttagcaggcagttggctggattcagttccagactctgaaatctcagttcagtatttttagccttagctggatgctagaaatctgtgctgtgcataggtcaagggtcagccaggtttgagcaaggattatacacagaacttggagttccttcactattcagctgtggtaactattccctactttgtcctctagttcctaaaccagtatgatgtcaggttctactggggttttagccactccaaggcaccaatgggacctgccctcagggtaaagctataaaaagcgggacacttattcagtgtcattcccttctcccaagtgtcactttccctcccactctctagtatctgcaggtagtttgttttaatatgtatcttgtctagagtttgtggttatttttacagaaaggttgcccaatataagctatttggctattactgaaaccagaaccacttttttttttatattttctatcagtttcaaaagttccttttagtctcaatttactaagagtttttgtaatgcaattatgctgaattgtattaaatgactcttctatatctatccttccccaccctcccctgctgttctaaggaaatcattggccgcaggtgatccaatagtcttttgctctggcttctcccaccctggtggttgtctcccaagaagatagttaagaaggaaaaggaactttctgttttcaagaaattcctcaaaattagtggttgaatagctggtgctctcttttgtttacctgcttgacttattctggattttatggatttattattttgggtatagttctcaattctatcagttcaccagaatttggagggaagatgaaaaatgtttactatttgagccagaagtcagtgggcactattattattcccattacaaagatgagaaaatggaggattagagagttcatgcaaccagtttccatcaccagttaataagaggaatgccaaaaattgaatccaggtctttctggagccagagtttggttgtaaaatggggtacaaatgggaagttgataaaattagaaaagtaagctggggacataatgggcagggccttgaatgccgatatagggaattttcagtctttgatgaaacccatcatttactgaataccagaggctgagctaaaagatacaaaaatgaataagatgaaaatgaaaaagtacctgagcctaaggctcccactatctgaaacacaaacatgtaaagagacagggtaataagtgctatcacaacagcatgagctctgtacccaatttagtacgtaacagtctaagaaaggtaagatgtttctgagacagtgttgacttttctagacatctgtttgcattgctaaactctacggcaacttgtgtgtctatgttaggaaatctgaaatgaactttcttctgtgccttagaatctaagggattattttaacattgttaaagtggagagtttgtgtccagacaagcataatcaaggtcaacttttttagagataaagtatttcgagtctgggcacggattacagcatcatgcctgtaattccagtactttgggaggctgaggtgggcrgatcacctgagatcaggagttcgagatcagcctggccaacatggagaaaccgtgcctctactaaaaatacaaaaattagctgggtgtggtggcgcatgcctgtaatcccagctactcaggaggctgaggcaggagaattgcttgaatccrggaggcggaggttgcagtgagctgagatcatgccgctgcactccagcctgggcgacatagcaagastctgtctcaaaaaaaaaaatgtattttgatataattcttcacttgtatttcagttctgtgttaaaatgtctgctgtggagggaatctgcacttcggaaagcccagtcattgatcatcagggcacaaagtcctccaaatgtgtgcgccagaaagtagagggctcctccagtcacttggtgacattcactgtgcttcctctggaaattggccttcacaacatcaatttttcactggagacttggtttggaaaagaaatcttagtaaaaacattacgagtggtggtaagaaaaacatgcttcaataacttatgcttaaattattgcaaaagagagacacagaaaggggggggagagaaacaatagtgtaaatttaacgaaacattaagcattaaggaaactggatggaggttattccagattttttttgtactattcttgcaatttttctgtaagtctgaaatcgtgcttaaaaatttttaataaaacaatatttgtttcgtagaaaatataaaatactgaaaaacgacagataaataaaaatcatcaataattcccatacccagagatatctaattttaacaattggtacacgtctttttttggtatacaggtacaattggtacacaggcttttttttccccttaatacattcagaaaatgtgtcttgaaatctatgtgccagacattatgcaaggaactggagataaaacaataaataagacatggcccttgaatttaaagaacttgcagtctagaaaactttccattgtataaacaaataaacagtcccaaaaaagaagaaaagtataatttgttaagtacaatttacccacagtctgttaattgtattcacgttattaacattaatatttttatgtaattttaatatttttatataattttaatattttatataagtatgatttaccaattaaaaataatagtacttttaaaggactaagattcttgctaagggtcatatggccaattaatgacagactggatttcctggctcttcactctctgttttcagctatgaaattcacttcagtaaacatgtactgacttattttgtgcaaagcacattcccatgcatccttgcactgtggttccatgcagtctctggagcgaggctgctgggccttgaatcttggctccatcacctcctagcagtgtgacagtgttacttgatttccatgtgtgtcagtctcctcatctgtcgaatgggagtaataacagcaccaacctcatagaggtttttagaggttaaatgagttaatacatataaarcacttagaacaattatctggcttataaataacttctttttaagcatttgctctggtcaatatgcaaatagccataaaatcttattgctgcttatatccatgtaagtatttatacatagtttgccttttccaagaaaaataattttttagtttgaaaagtggtccagaaaagttgatccagggaaytcaggttatataaacttatgtttttaactgaatgttttctgcctttattttagccagaaggtgtcaaaagggaaagctattctggtgttactttggatcctaggggtatttatggtaggcaaaatgattttttattttatatgttatcttttgctttagaagttaaagtgtgtatgtaacttaaaacactatttttcagaaagtgagttgtctaaaatcagtagtatccacttctggccaggcacagtggctcatgcctgtaatcctagcactttgggaggccgaggtgggtggatcatttgaggtcaggagttcgagaccagcctggccaacatagtgaaaccctacctctactaaaaatacaaaaattagctgggcatggtggtgggcacccatagtcccagctatttgggaagctgaggcaggagaatcgcttgaacctgagaggtggaggttacagtgagctgagatcgtgccactgcactccagcctgggcgacagagcaagactgtgtcaaaaaaaaaaaaaaaaaaagtatccacttcttagatcactatctttcttgatagcattatagtacaactactataatctgaatgactgagacacaacaataataattccattaattttgaatgcaaggccttgaaatagtaacaattgcatgacttccctcatatattattcattgtctatccatcacaataataatttataatatattattattgagccaacagtccaaagaacacctaagaaaaagtcatttacataattaacatgcattatttgaaaacataataatgctaattaatcactaaacaaacccattcctcattgctcctgcttccctacttttccttcaattgagatattccaaatcttctcaaagctagaattttgcaaacatttgagtacttaatcaaggcctaaatacatatacatgtatttatgaaatttaggatgtggccagttaaccattctcttttcaactaaagaagacagattactgcagttcttattaaatgcttacaacttatcttaacgttgtatcaataatttttgttttatttcaatgatataacaatggggaaaaaatttacttacagatcatgatcactatcatcagtgtcatttcctctgggaaagcaaagaattaataccctttacactttaattcatctgagtatcatgaactgaggagtgttatttcagtagagyaataaaaagtaaaatccatctatgtacatgcgtccacatgcttacttgtttctccaattttttcttcacacagacctcctccttgcctgctcattgtgaatgatctatgggtagagatattacaagtttcaagggttttagcctcatgcaattatatcaagcctcaaaagccactgtgtccttggcttctctttctttttttttttttttcaccacagatgctgcttctgctgacattattgcaaacaattttccagagcagtcttgccttactcatcctaggtgtgaacatcaaggccacaggataggaacaatcttttatctgggaataaatctctgtagagaaaatctgggttaaaacaaaaatctgtgcctctttccaatcttctcatatgacttttttcccttaacattttaggcaacttgggtttaggcagctttcctgatttctgcagagctaaagagggaaaagataaaaattctgttcagcttatttcagatattttattaaatacttctaatatttattwttttttttttgtggggtggggggacagggtctcactctgttgcccaggctggagtgcagtggcgccatgtcagctcactgcaacctccacctcctgatttcaagcgattctcctgcctcagcctctggaatagctgggattacaagcactcaccaccatgcctggccaatttttatatttttagtagagacggggttttaccatgttggcaaggctggtctggaactccttacctcaagtgacccaccagccttggactcccaaaatgctgggactacaggcgtgagccactgtgcccggcctatttctgatatttatatattgaaatcgctatacaactatgatactttacagggttcagttaaaaaaaaatgctaaaaagtgtttggaaaaataaatggactataatgttaaaggaaatctgaaaaaatatatcaatgagggagaacaaacagtatatagtaattaaaattgtgtgacaccagcttaaaaaaagactaaacacagagactcaatgcttaagactagctctagtctttagtttctgctttctgtccctgataagcccttttctcccaactcgtctcatatctcaaatgcagagtgttaagtttctcactccctcatttcctgacacaccatcctcattggtttaggcaggcccctctcgttttattttttccttcatcccggaccccattcccattccccttcctccaartgtacccactcaaatgtgtttgctgtatacttttgaatagaaaggtaatgttgttttgtatgtatgtacctctttaatctatgtatatgtaacattgtgctatagatcctattctgtcttaagttgttacactcaaggcttagttttaaagaaatatctcggccaggcgcggtggctcacgcctgtaatcccagcactttgggaggctgaggcgggcrgatcacgaggtcaggagatcgagaccatcctggctaaaacggtgaaaccccgtctctactaaaaatacaaaaaattagccaggcgtggtggtgggcgcctgtagtcccagctactcgggaggctgaggcaggagaagggcgtgaacccgggaggcggagcttgcagtgagccaagatcacgccactgcactccagcctgggcgacagagcgagactccgtctcaaaaatatatatatatatataactctattgttataggtatacttaattcatttttcttacatagaatttcagagcatgttccctcaccattttatccatcactgtatatacaatatatttcccttgaaaaatccatgttagcatttacctggaccatatatccaggagctgggtcaaaggatatatacatatttaatgccatttagtcctgtcatattgcccttcagaatggttatacttccattagcagtgcacgagggttctcgtctctccacaacctcaccaacacttgcctctctaaaatgtggcatttttaatgggtataaagcactatctcwttattgttttaatttggattcttctggttactaatgattttaagcatttcttcatatacttgtccatttgggtttcccatctgtcaattgcctattcatatcttttgcacgtttttaaattttctatttgggttatccttttaaaatttcttcttgattttgtctctgatgtacctctttgagcaacaacaagccttcatgggtttgaaaaggaattatttattctgatgtagtcaaatccatcataatttcatcttatggttatatatttttgaggtaatctttaagaggtctttctctactcttagttcacaaagacattgctggatattttattctgttaattttatagatttgaatttaaaatgttttaatctgtctggaacctgcctttttatgtgatgtcttgatgagtcttttaccgtgatcactgatgaggaataaaattaacttctcttagttttaactttctctttaccttttccacctggtagtagagttgccaatggaattgaaatagtcaagagcaggtttcaatggagaaaatggtgaaggagcaaatctagataatctcaaggctatctgtaataagtatcatatattgagcatgaattgtatgccaggctctttgtctatattatttttatcccacaaaaatcctttgaggaaaatgttgttatctccatttaactgatgaacaaattgaggctaagaaaggttgtatcttgcccagcgtcacatatatactaagctctttttgaacttcatgctctttcactcaaagtgcaaacctcttaaatgtcttctgaattttattttgatatatcctctgcatttatcaaggattaatgaagaaagaagttttatgaggaatgttcctgcatttttaggaaagccatgtggcttgtccattaaattgcaaaatgtgactcatttttctttagcatcttccatatgccagggtctgtgctaagtgccaggactacagctggaatgagaaatgattcctgcccccagagtgctttcttagcaggacaatgggaggtggattctctttgtggtgactagtgtgggctctgcagcaaaacttctggagttcagattgcagctccacttgtattgtttctgggaccttgaacacgttactttctaagcctcaatttcctcatctataaaattaaactaatgaaaatagacctaacatagaggactgttgtgagaatccaatgcaataattcatttaaagaacttagtagcatgcttggtactctatcagtagaatgatcaatgttacctttttttggacataaaccagtgatcacagtagaaaaattatctgataccagtatgctaaaactctgttgttttgcccatagattaaaaagtatcaaaactagactgggaagggaaggtggaaagaatttcagatcatacttccctgtggagctaatgttcaatatatagttgattaagaaattacatgttagttattcttagctttcagttccaggaacaattttctgtctttgggcaagctgrcatgctatattttgctggtgaataagatttatataacctatttatttcacatcttataatgaccaggaagcttacagccaaatttaatgctttatttaataagattatacaagcctagggtttgattaaagtccttgatgatttttaactttcttttaaaattttaatagtctaattataagtcttttattttgaaatattctttggaagtagatacattataaataatctgcaaacagtcttmccctggaaactctgtataaatccarattttctaaattacaggtaccattagcagacgaaaggagttcccatacaggatacccttagatttggtccccaaaacagaaatcaaaaggattttgagtgtaaaaggtaaattaacaaatgccatttttatttctcatttcacttggtgcttcaaacaaaaatcaaatatcctcatgattattctgtttctccacttccgtgttcagtagcacacacaaatctacctttaggagtgctccacccctacccacccccactttcaaacctttaatcacttttcccactatcttcttccaacggcctgatttacatggagatgcattctcctccaatggaaggtagggactgtcattggctcaaagatgtctctaaaatgggggtccagttgcttctagacttaaagaactttccatggtcttagtggccagtcccgctccagagaaggcctatggcctgcacatggcctagcgagaacagcactgctctgctgaagtactggtcccagaagggttgtcttagtccatttatgctgccataacaaaataacaaaatttataaataatacaaatttatttctcacagttctggaggctgggaagtccaagatcaaggcatcaagagattgggtgtttggcaagggctgctctctgtttccatgaggatatatgttgctgtatcctcctgtggcagaaagtggaaaggcaaaagggcaaaaaggggtgaagaacttcctcttacctcgtctataagattattaatcccactcattagggtggagccatcataacctaatcacctctcaaaaagccccaccttctaatactatcaccttggtgattaggcttcagtgtatgaattttggagagacatatacattcaaaccatagcagggattctcctcccctcgcatacatttgcagaagtgatatttgcacaagtgactaggttttccttagtctccaggctttacaattcaataacatattaccgaatgatagaatgtcctgactacattttatctcagataaaaccctagaatcacaaaatgttagtactggaaaggatctttttgatcatgtgcaaccctgctgttggatataaaagaaagtggcatgtccaaggttgcacaktgaattatagacagtcatgtcagcactccctgttcaggctctttgctttgcttcctggaagggattggtaaatatggtttataatgtctaaagctaacaggttgaatggcaactaatttgccatgttctcttgcagcaatcagtccactgtattacattacctaccaccatattttagtgatttttaaagtcttttttttttttgtttctttcaaattcatgttcctaaccggatctttttttctcaccccgtttctgagaagcaagtcaactgcctagataaaaagggaagaaccatctctagatggttgttcttctctcttgagaacatactgttagaagttaataaaaagcaatgtgtctactttgatcttttttgtttcaggactgcttgtaggtgagatcttgtctgcagttctaagtcaggaaggcatcaatatcctaacccacctccccaaagggagtgcagaggyggagctgatgagcgttgtcccagtattctatgtttttcactacctggaaacaggaaatcattggaacatttttcattctgacccattaattgaaaagcagaaactgaagaaaaaattaaaagaaggtaaaaaaaaaaagtatttcacataaaaattgggtgattctaaacyaatatttttattaaactaatatttaagttgtgaattatagaaaactttgtaagagaattttagcaaaaaaatcatgagatggactctactatataaataaatattatttctgtagcattttggctcaacttaccaaaaygcctgaatgagargcaaggcacctgcattccaaactacagaacacttccttccttttcgaatgagatcagaatgttctacttgataattcccaattcgagcaattcatatacttcctttgagaagttcaatgctggccacagagcatatgcttgctgcccaacaccaaaggaagcttaccattctcagggcctgataaagtgttctttgagtagaaacggaggtctgttaagcaccgtgttctttttcttgtgcttcttagggatgttgagcattatgtcctacagaaatgctgactactcttacagtgtgtggaagggtggaagtgctagcacttggtaagtagaagattttgagttgcattttcatatagtggttaattaactaaagaataataaccataatggaaactccattcctccagttgctcaggctaaaagcctcgtcatccttcactcctctctttctcttaccgttcacatctgatccagcagatatggattcaaaatatatccttaatttgactacttctcaccacctccaccacactatcctgttccaagacaccttcctctcccacctggattcttacactagtctcccttagtcttctgggttcagcccttgatcctcttcagtatatactcaacacagcaactgaagtgaccctgttaaaacatatgttagatcatgccactcaaaaccatttaggagcttcccatcttacccagagtaaaaaccaaactttttattgtgatttacaaagctctgtatgatctggctccacctcatgtctcctactttatctcctatactctctttccctccaattcagccccactagccttcctcaaacacaccaggcatgcttccacctcagggcctttgcactgttttctcagtctggaatactcctccttaggtgtcagcatgactggctctcatatttccctcaggtctttaccaaatgtcaccttggggaggcctctgctatatcataatgtctaaaattgcaatccactcccctcccaacacctcatatcgtttcttttctcctcagtgtgattactaacgttcttgcttattccactattgtgtatctcccccactggaatataagctccatgcgggaagttctaagtatccctagtgcctggtacctacctggcacatagtagatgctcagtaagtatttattcaatgaaacatatcttccaaaattctgatgatttgagggaaagatagtctgaattaattaagagtccatatggcagtctattttcaaaaaataccggctgggcatggtggctcacgcctgtaatcccagcactttgggaggacaaggcgggcggatcatgaggtcaagagatcgagaccatcctggccaacatggtgaaaccccgtctctatgaaaaatacaaaaattagctgggcgtagtggcatgtgcctgtagtcccagctactcaggaggctgaggcaggagaatcacttaaacccaggaggcaagggttacagtgagccgagatcgcgctactgcactccagcccgggtgacagagtgagactctgtctcaaaaaacaaaacaaaacaaaacaaaaaaaccatcatgctatgacaaaatatttaataaaaacggtgtgccagctgctttgtaggttctatatgaaacatatttaaggagtttacaacctagaatactttaattttagatttttttcttttttcttttttcttttttttttttttgagacggagtcttgctctgttcccaggctggagtgcagtggcacgatctcggctcactgcaacctccgcctcccgggttcaagcgattctcctggctcagcctcctgagagctgggattacaggcgcgcaccaccatgcctaatttttgtatttttagtagaggtggggtttcaccatgttggccaggatggtctcgatctccggacctcgtgatccacccacctcaacctcccaaagggctgggattacaggcatgagccactgcgcctggccagttttttttctttagctattgagatctcccagaattttatctttggccctcttattttctgtaatctcccctggtacagtctcattattgcccatgatttccataacatctaggccaatggccccctaatcaatgtctcaaggcctaacttctttcctaagaagttaggaaatgtcctagatccatatttctaggtttccggaagccaaagatccttcaagcacaatatgtgccaaattcattattttcttcctcaaatacacttctgtttctttactcagtgcacaacaataccctgccctttgtcccccatggatcaagtcagaatcatcagttggtttttgattccttcctttccttttggctttacctctgatcagctaccaagttccatagattataccttaggattaggtctgaccatgtgtgggtgacacacttcaaaagacacacagggccagatacagtggctcacacctataatcctagcactttgggaggctgaagcaggaggatggcttgagcagaggagttccagaccagactgggtaacatagggagaccctgtctttaataaaacaataaaaatataaaaaaataaataaaaggctcatagacccctgcagcacaccaaccagaggataacccaggatgcaggagtgggagtgagtgtcaatgaagactggaaactgacacagcaggacctgggaaatagatgcctggagagcagaaagccccacaggaaggtacaacagcctctcagtaaacactcagagcctttcaagagtttggggcaagactgaaacatacacccaactccatgagttccttgaaagaaataatagacatagaagaaaatgtccagcacctaaataccctcaaacwtttcttgagaaatacaaagcagattttttaaagtacgaatatcattcatattagcaaaacccaaaattgatgatgatgaacattttttatattcgtcttttttttttttttaaagaacattgtggatattgaacttttctctttaactacaagcctccatcttatttctgtttctttcccccaagggcattcactatcatgagtttatgcatctttccagaacatttttaatattttatatagtatatatatacatgaaatcatatagctgtaacttaactccagtttggctgctcactgctcaaatgccaaactcaagagactaaggttggtgggaggaaaagcaggttaattcaggagccagcaacccaaggagatggcagactagagtcaggaaactatcccaaatgccctaggctggccagagggattttaaagaggaaggggcttggaaaactgtgtgcaagagttagctacgtacaggtcagcatgtcttgttctgattattatcttgagtaacgggccatctagtggtcagctagactgaaacaggtttgtagattaactgctcagtatttttcttctccaggggacatttcacatccttgatttttatctcatggctagttcctggaattcttaagtaagcactgtttaagaaagttaagcattgtaaaagaaagaatggttatttgcttccaaaatgaagtgatgggtttacagtccctttttgtatttctaaatgattataactagtatcatactatacctatcattctgtaacttacctttttcttttaatactttttagttaytttagatctagtagtataggtaaatatagctcactccttttcattgccatgcagtattttattttacaaatatatcacatagtatatattctttatctattcctatcttgatggacaaccatttccaaattttaatattacaaacaatatgataatgaacatcttcatatgtctctttgtgcacatgtgtgagagtttctctagggtatatcccaggagatagaattgctggaacataaggaatgcatatttacagtttcatcagattttgccagatttctcttcaaggtgactaaaaaattcttttctactctaaatttttagtcccagaccctactgtaaaacatgaggaactaaactagaccatattaagcacttgtagaggtagcctagggtctggaacaaaagcaaatcaaatagcctacttctttttttcctccatgtcacacttaaaatttgaatttcagggcagtctccaagggacaggtcagtgggaagaggagaacgcaaaaagctagagcgaattgtatttgctttacctttagggaagtgctgtctagactctcactccttaaggataccagggatgagacacccaagagtacsaaagagaaagagagataggagtaagagcttataaaaaccaggtgcagtggctcacacctataatcccagcactttgggaggctgaggcgggtggatcacctgaggtcaggagtttgagaccagcctggccaacatggtgaaaccctgtctctactaaaaatacaaaaattagcttggcatggtggcacgtgcctgtagtcccacctactcaggaggctgaggcaggagaatcgcttgaacctgggaggtggaagctgtagtgagccaagattgcgccattgcactccagcctgggcaacagagagagagtccgtctgaaaaaaaaaaaaaaaaaaaaaaagtaagagcttatacctattgaatacttactataatccagaactattttaagtatgttcatatatttaatctttataattgatcccaaaggatgagtccgttgtttctatttattgccattgccttttttcaaagatgtaactaaagcatctttatatatacagatgtatagataagtggagaggcagcctggcygtataactgcactcatatgcctttctagcctgctaaaagaagagagacttccaaaagccaaaatcccaagagagacccaatgtaaaatgtgggccaatctttgaaaatgtgagtgtccttgaacctgagcaatccgtagaagtatttctcatccttgagagcagtgtgggaggattaaaaagagaggagctctcaactcttaccccctaaaagtcaatagagtagaaaataaatttctgatgtttctagagaaagaattaggaaaaggcacctagttgtggaggggcaagttccgattaatatcaaaaaaaaatctttaaaataattaaatcaattagagcaaagactgagaacaacctaaatgtctacagaaagggaaatggcttaaatagctttggtgcatctgtaccaaaatactataatttaatgtataaaatcacttgtaaaagaacaaggaaactttatgtattaatatagatctctaaggcatattactaaatggaaaaaaagccaagtacaggataatgtaaacattctcccactattttggtgtggttgggatggaaaggtagatgggaaggctatatcttgtatctactatttggaagaaagcacaagaaacaatggtcatcttctgttgggaggtggagggggacagggactgctagaaggagacttttcataaaatatccctttgtgcttttggatttttttttttttaagttctctcactcaggctggatgcagtggcaggatctcagcttactgcagcctctacctcctgggctcaagcaattctcccacctcagccttccaagtagctgagactataggtgcctgccaccacatctggctaatgttttgcattttttgtagagacaatgtctcactatgacgcccaggcttcacttttggatttttgaatcatgtgagggttttacctctttaaaaaaatgcttaaaatacatttaaaaaatgaaaatgaaaaagaaacacaaattttttaagtgggggaagtgggagagcaagtcaagtggtctgagtctcagacatttgaggacctggggagtggagcctcctgggcgactgagagagtgaagagatgttatggggggatgaacccaatcctctctgatactcttcgatgggtattagtagagacttgaaattgctttttgactaagtaataatgatcattaaaatttcctgtggggtagtaagttctgtgtcaatggcagcactcaaggacaagtgagataaacactccagggacattgggaaaggggacttggggcctcagataggaatttagattccatggaatgcacaaattttacaatctagaattttgtgatttactctttcatgtctcatgttcataggtcaatgccttgactcaaaactatttattttatctctgttatctttaactttagagtgtaattcttatcatcaggaatcaatttttagcttgtgtgctagcggacaatgttgtaatcacagaagatgtgctgttcacatttgtttaccgaatgttttggaggtattccaaaaatcttcccttcctttgtaaaatgatgacttactttggaattgcatgttttaaaatgttattttcttttaaagaataaagttgtataaattaattgaaagtcaaaagggattcagcgttctaaatatttatttatttgattttgtcttaaaggttaacagcttttgctttaagagtacttggacaagtaaataaatacgtagagcagaaccaaaattcaatttgtaattctttattgtggctagttgagaattatcaattagataatggatctttcaaggaaaattcacagtatcaaccaataaaattacaggtaaggaarccaaatgcacaaattagcaatagttttatttagtttgagttttattctcatctgattatgggaggatgaagaagaagaagaaaaaaatgtaattctgcaagaaattcctttgtgaacaagcaaaatatacaaaggtctttcccataatatctgaagtgaagcgatcttcagacagttcactagagatcagagaagtgatatcttagacctctcgtttaacggggtggaggtagatgggcaagtgaaagcactcaagcgagatagacccagggcttattgagaaatgggaagcaggaagggaaagagtgggagataaggcttaaaacacagagtagaggccaggtgcggtggctcacgcctgtaattgcagcactttgggaggccaaggcrggcggatcatgaggtcaggagttcaaaaccagcctgrtcaatatggtgaaaccccgtctctactaaaaatacaaaaattagccgtgcgtggtagtgcacgcctgtagtaccagctactcagaaggctgaggccggaggatggcttgaacccgggaggcggaggttgcagtgagccaagatcaagccattgcactccagcttgggtgacagagtgagactccatctcaaacaaacaaacaaaaaacagagtagaatcaggtcatttcgccttaaagacaccayttcactccccttttaaaacattgcttctttttagggtaccttgcctgttgaagcccgagagaacagcttatatcttacagcctttactgtgattggaattagaaaggctttcgatatatgccccctggtggtaagtaagagttttctttctctcacacccatcatctatttctgtactatatactggaggggccaccaatcagaagaccttttgtttcaaaagcttcttttccttctttccaataacttgaaaataacttaaactccagaattgaaagatttcagaacaatgatagatattagagaccacctagtccaacctactcatcgrcagttgagaaagctgaggactaagtaaggtgaattcagtttcccagtgtcacasgctaataaattgtagagctgggtctaaaactgatagctgggactgggatggaagaatgatccagtgcccccagcttctctgtcttatctttgctaaatcctgctttatatgttactgttatcctatagtgaaagcattctgtatcatgcaagtactgaggatacacaacagcaaatgtgtatcctccaaatccttccaaacaacatttgcttggaaacgggagaaaagtgatgagccacctaagtaaatcaacatagaagatttccaaggttgagatggaaaatctcaagtggatttgcaaaactggaagcacaaaacaaaaccatttgttttcagtttgtttcagaagcttaacaagacaaaataatcaatgaagactagttcccaggcacctagtggccacatgggtgagagatgcatgtggagctgggagaggaggcaggcaggatgttagcagcatcgcagcaggctttctgctggcccacttgcccaacacaaccattttggtggcgtcaggactagtgatcgggactatttacccaggcattcttaggatctaaaagtactgtggcagttagggtttctttctgctacttattgttttatttatttatttttttaagtgtaactccttttgaacctgtgtgcctgttgcaactacgctgagagggaacaataaaagttgtgtctatgggccgggtgcagtggctcacgcctgtaatcccagcacttgggaggccgaggcgggcggatcacaaggtcaggagattgagaccatcctggcgaacacggtgaaaccccgtctctaccaaaaatacaaaaaaaaaaaattagccgggcgtggtggcggggcgcctgtagtcccagctactccggaggctgaggcaggagaatggcgtgaacctgggaggcggagcttgcagtgagccgagatcgcagcactgcactccagcctgggcgacagagcgagactccgtctcaaaaaaaaagaaaaaaaaagaaattgtgtctatgctcggtgccttttcttcctggaggctaggtctgayggtgtactcagaaactaaaggcacaaaacctctaaaaggaaagtgagaattcagaggcaaaaagcttaacctgatttggacaacctcattgtcccttccaagattatgctctgctccttctctcggagggatttgcttcactgagaagccatccatttccattaggtcagtcctcttttcacccccatattgcttgctccaggatagtgggatctgagggtagttcatatcaattgataggtggttgcttgacakagaaactgaagtatcttctcttgtttccagaaaatcgacacagctctaattaaagctgacaactttctgcttgaaaatacactgccagcccagagcacctttacattggccatttctgcgtatgctctttccctgggagataaaactcacccacagtttcgttcaattgtttcagctttgaagagagaagctttggttaaaggtataacttgttccatacatgtattcagtgagtgttcactaagacataaagtctgctagtctgggaagtgggtggtgacatgtgaacttgagtaagatgcaattcctgtcctcaaggaacaaaccgtcacaatacgatgtaatgtgtgccgttattcattcatttattcatgcattcattcagcaaatatttattcttttttttaagacaggttctcgctctgtcacccaggctggagtgcagtggcatgatcgtggctcactgcagcctcgatctcctgggctcaagtgatcttcccacctcagtagctgggactacaggtgcccaccactgaacccagttacttttttttatattttgcagatacgagtctcactgtgtttccccggatgatctcaaatgcctgggctcaagcactcctactgcctcagccttccaaagtgctaggatcacaggcatgagccaccacacctgtcctctatttattcctttattcaataaatatgcattgagtatcctatgtacaccctggacaccccctatatacctggcactattccagtctctgggaataaaggaataaacaaaacaggctccccaaaatccaggccatcatgaaacttaaattctaactggggagacacaaacatgataaataaataaagctttatgaatagatggtgatggctgatatgaagaaaaatagagcagggaaagaaaataaggtgagaggatgcattgtaattttagacaagctgactgggcttaagtttcactaagaggatggtgtttgagtcaagagctgaaaggaggtgaagaagcaattcctgtggctatctagaaggaagtacctggtggagaacagcacgtgcaaatgccctgaggcatgggcatgcctggtgctccaagaatggcaaggaggccagtgtgactgcagaggagtgagaagaggagtaggaagtgaggtcaggtaaggaaaaagtgagggagcaagggaaggtcatttaaggcattagagagactcttcagggcttctgtaaacagttgtgccgtggacaaagtacctaagcaatcaagtgaatcgaggctgaaatctagcctgtgctccactcccccggccacataccctagtttagggctgcttccacctagagcaaggagtgcccatgtcttatccacagcaatgtgctgtggggaccagaaggagccctagaactttaatttcagctttgagagtgaaaaggggagccactgggggattttgagcaaaggagtgcatgacctggcttatattttaccaggtttgctataaaagtatgtgtttggttttgaagaataaagatactgcttcctataggtcaagagacaaaaaatagaaagagagtagcagtgattattagcatggttgggcactttggagtcctcttctagctaaggctttataaatcttactgaggtttatgaccatctacaaaatatgatttgtgccatcattttaaaattactatattttaacatatgcctcaaaaccacttgtwcgatacttcaraaataacacaaaagaaatgtcttgggtattgtgagatatgggtcataaaatcataaaatttaagatctagaagggaacttaataatccaagagttgttccagttgggtttctttaaaatcctaaactcaactcttcattttaaatacagcaaatctgagactctgagaggaagggtcaatatcattttcaaggtcatgcaaataatgtagttatgaattataaacatacacatcaaaatttttactaaccttcaaatatgatttccaaatatgcattactttttttaaaacaaatagtttgttccaaaaaggatttgaggtttacagatttaaataacaaatataatttacagcctaatttatgaaaagtgctgcatgtacgaaattgtcttgagtgctttaaattggaaagaaataatgaaagactgaactaaggctttaggtttaatctcataatttccaggatgtaaattttcctatcaggaaaaaggttctccagtttattttttagtgtcagtaataataataataataataatcccttatatatgcatggtgctttctagtttacaaaatcttttactttagtatttcatttgagtttcactgcatggaagaaagtattatctatactataggtattaggaaattgagtcacacagaactaaaggaatttgcccaaagtgacatggtaagttagcaacaaaagaaagactagaagctgggtgcaataccagtttattgcactttcgactctactaaactgccccttcctagtacatgtgtactatgttgattttaaaatacagattgaggccgggtgcagtggcttatgcctgtaatcccagtactttggaaggccaaggtaggaggattgcttgagcccagtagtttgagaccaggctggataacataacctggcatggtggcacacccctatagtcccagccactcaggaagctgaggtgggagaatcactgagcccaagagattgaggctgcagtgagctacaatcacaccactgcactccagcctgggtgccagcaagatcctgtctcaaaacacacaaacaaaaaaaacaaaaaataggttgagtgttcctgatctgaactgcttgggaccagaagtatttcagatttcagatttttttcagattttggaatatttacatatacataatgatatatcttggggatgggactcaagtctaaacatgaaattcatttatgtttcatatatactttacacacagcttgaaagtaattttacacactattttcaataattttgtgcatgaaacaaagttttgactgcattttgattgtgacccatcacatgaggtcaggggtgaaattacccacctgtggcatcatgtcagagctcaaaaactttcagattttgggggcatttcatatttcagattttcagattagggatgctcaatgtgtaaagacaagtaataccatattaagggatctcgttttgcattggtcatcttcaggaagttcctctaacaagaaaaagtaagtagcttctagaaactggaaggccataatacacctggtagaattattatgtcaaattcacatttttaatcatattaatgaatggaatttgttgatgttcaggtaatccacccatttatcgtttttggaaagacaatcttcagcataaagacagctctgtacctaacactggtacggcacgtatggtagaaacaactgcctatgctttactcaccagtctgaacttgaaagatataaattatgttaacccagtcatcaaatggctatcagaagagcagaggtatggaggtggcttttattcaacccaggtaacatttctttgtcttgtttcatctccctgtagacatttttattttctcccccaccacactcatctggcctccatgcctttgtccaccaaatgagcatgcaatagatatgaataatgcctagaattgaaggacccctacaggttatctgcgtcaacactcttattatacagaagaggaaattagcccagggagttttactcagggaattcatggcagagccagaatcagaactcatgtctcctgactttaagcccagtacttccttcatgattctaaatcaccatgaaaggctagtaaggttattggcaattatatcatatcctatgtaataaatagtggttgccatgtagacaaaggtactgatgctccttctccacaacgaaataaataaaaagtgggagaaatactgattgttacatgttaatctatctagctatttaatgtaaactcatttgagtatgtatttttattacaactaattattatgtagtcgtataatacatgtttatattcaaagtttagatcgaatgttaatatcttccctgttgcctggatgtttagataatgatggagtgtgtatatttatatatatgtaatttagatgtagagagggccttcagtattaatttactgaccatgtaatgtgttttattttgggtacaattatagggttagcagaaaagactgccctattgattagcatttgccgccacagatataggcagagggaatggccacattgtttaacatctctgatctagtcatgtttctcagttttatagatgagaaagatgaggtccagaaagataaagtttattcatttattccttcaacaaatatttatgtacctgctaaatgcratggacattgccttagtccattgtgtgttgctgtaacagaaaaaacgacacactggataatttacaatggacagaaatttattacctcatggttctgggtcctaggaagtccaagatcaggggggctgcacctggtgaaggcattcttgttgcattattccatggtggaagggcaaagagaaggcagagtggagggttggtgggagtggagtataaactcatctttttataacaaattcacttctataataagcagcattaatccatttatgaaagtggtacgccccatgacccaaacacctcccattaggcctcacctcctaacactgccacattggggaccaagctttccaacacatgaactttgggggacacattcaaaccacagcaggcaycaagaaaaatatattacctacttgcctcacaaatcttatattgcagtggggtaggccaacaataaactataaataaaagcattacaaattgagatgaatgctagaaagggcaaaaagggaaccttaaaacagagaataacgggaaaggggagtttatggccttgttgtggagatacttaaggtcagactaaaggatgaggaagagataattgttcaaagactcagatgaattctgcaaacagtgacttgcctgaggttacatttgcagaatatatagaggacccagatctgaggccacacttccttcctgtccctgctaacagcatctttattgaggagggagagacctttcttccacctccacaatggggctcttaaccagtcttactgagtcagctggagtttcatctccagacaatgctgccctaccctctcataaaaagggcatttgtaaatagggagtacataaataaactaaacatatttttgtgccttgctgattgctgacaggacacaatcaatgccattgagggcctgacggaatattcactcctggttaaacaactccgcttgartatggacatcgatgtttyttacaagcataaaggtgccttacataattataaaatgacagacaagaatttccttgggaggccagtagaggtaaatgaagaactttstgtagtattttacaattggctragaccattgaaatcatctgttccactctttattttataaatctatctcttcactacttaaacatatattgagtgtcagctatgtcctaaacagggatgcctgctatatcctgggcactgaggattcaaaaataaaacacaaacaatcagcgtagtgcagggagattgtcatttaagcagatagtgaaaaataagagtcttgataggtacatggaagtacagaggggccctcctgatcctggctgaaagatggagggagtttgtcagatgtgtccagatgtgtgggttaaatctgaaaaaatcagaatgagttagccaagtgaagaaaaaggaagaacattccagacatagataacagcgcacagagcagtacagtgagcgtaggagggaaggcatgtctgggaggctgctggtggtcccttctggccctggtcatacatgcagactgtggccaggttggagttggcctttagggtccccagctccttgccccatgtcctttgctactgctggatttttaaaggtggtaactttgatggcttatgaaaatttcacaaagaacaagacatgttggaaaaactgggttctatattaatattagctgcccacatatagctgctgatacatatttttctaattactgtgtttgcattattttaaagtatatttaaatgtacagtaattggaaataatcctcattgttgacatccttcacaaattggtgtttgttaaaagtaaacaagcatgagaaataattttttttttttgagatggagtttcgctcttgttgcccaggctggagtgcaatggcgcaacctcggctcactgcaacctcctgggttcaagcaattctcctgcctcagcctccaaagcaggcgggattataggcgcctgccaccacacctggctcattttttgtatttttggtagatatggggtttcaccatttggccaggctggtctcaaactcctgacctctggtgatccacccaccttggcctcccaaagtgctgggattacaggtgtgagccaccatgcccagcagagaaataaaatttaatgcaaaaattgcaaactggtggcccatactgaaaaaaaagaatatggatataaacatagacatagatatatgccaacatttaaggatccagatatttcaaataaaaacctgattcccaacttcccttgataaaccaaaagacctgaaagcaaagcaccaggcattggcatggcttctacaatttactgcagtccccaccagtcacaggacgtatgcatgtgcatttatgttcatacctgctttgtgcccgggcctctgcaggcatttgtgcttgtggtccctagtttgggaatatgtctcctttccctgggatcatttagagttcaccggagattcatgttctgagtctaagctctaagaaggatctcttgaccttccagctacctgaggtagctgaaattattcttctctatagggataatgctgtaagaggcctcttgtcatcctaacaaaatttaaaccccagcccaggatgctgcttccatgtaaaacctgggctgttattatccagtgtggaattttctactccagcatttcctgaaatgtgttccatgaaagagtgttaggtggttgagtgtgcattaattaagttaaacaaattaatttaaattaagttaaacaagttctttaatccagaattcccctgttctgtaacatgtatgtgattaagtgtggtgactctgggtgtgaaaaggggcagaggcagggcacagtgcacagcatttcccaaacttatttgtcatgcatgcttttcacatgcagtatctcaagacacctgttttccaacaaatgctgctatattctatcagggagaacaagaatgttgacctactttcctacatttactaaaatttgaaggaaggattgagaaactttaacatatgcccaatccatcttgcattattgtgctaagcaaaggaaaggggaggcttggagtaaaggaagtgccaacccctcgggctcaaaattatctctcctgtactttccacaaattagggagcatttggatgacagagtttctctggagaggagaatgacttaactccgtttatgtcttcagtttcctcctagcagagtgggaagaagagcagcagcaactaaggatttggcaggcttgagtggggtgctagtggtttggggtggggtaccaggggtttctgcaaacaaaggcggtgacaagtggaaaagataaatcatcaagagatggaaaaggggtgcaaaggaggagctcagagaggaccaaagatagatgcacccgctttcaagttatgtggaggttccctgctctgggttctaatgaaaacgatctccattggcacacaggatgctgattcctgagctaggcacagaaaggaatttattcagttggcaaaaggagatgaagatccagatttaccatagccatatgtaaatgaaaatgtaaccagaagtgacctctgacatgttgcttttgttggttcactcaggagatctcagacatcttatttacatgtagaagggaaaggggaaataccagccttgtttagcacctgccatgggcataggattttcagtgtctcatccagttactctcagaagagctctgagagaggaggctggtacatgtcaacccacttttcatagctctatcctccctccctatcaaatgatgaaagaaagcatggtttgtttctctattatctttccaggtgcttctcaatgatgacctcattgtcagtacaggatttggcagtggcttggctacagtacatgtaagtatttaattgatatccaataacgagttatgtgtccatttgtactaggtaacataaaagttaggagctttgccacaaagtcacagaaatctgggcttgggtaaccatgactaaagtgggattcacttatgtaaatctttctagcaatctttgtaactatcctcacaatttttttgaaaataacaatgttggtcaggcatggtggctcacgcctttaatcccagcactttgggaggcctaggcgggcagaccacgaggtcaggagatcaagaccaccctggctaacacggtgaaaccccgtctgtactaaaaatacaaaaaattagccgggcatggtggcgtgcgcctgtattcccagctactcagaggctgaggcaggagaatcacttgaacctgggaggcagaggttgcagtgagccgagatggcacaactgcactgcagcctggcaacagagcaagactccgtctcacacacacaaaaaaatttaatccttatatgtatacattctgtatacttatagaaattatatatatttatagagatatataattttatgattatatatgtgtatacgcatatggcatatgtgtatatacatatatctgtgtacatatgtgcattgtatatatatatgttttctatcccatctcatttatccaggattttgggggatttatgtgttattcataaagacttatttcttcattttagccacttggcagttgcaattttttttctttttttttttttttttgagatggagtcttgctctgtcacccaggctagagtgcagtggtgcaatcttggctcactgcaacctccgcctcccaggttcaagcaattctcctgcctcagcctcccaagtaggtgggattacaggcacatgccactacgcctggctaatttttgtatttttagtagagacggagtttcaccatgttgaccaggctggtctcaaactcctgacctcaagtgatccgtccaccttgacctcccaatgtgctgggattatgggcgcgagccaccacgcccagctggcaggtgcaaatttttctaggctgtttaagtatkttcatgcattcttaaattgcatgttctgagcataaattaacatcctattaataattttaatcacgctcttatctttagtgcattcattccttcaaggactgttgtaagtttatatgggggaggagagattgtccacttttctgccacttctggttggtgtcaatatatctacttctggcagcacctctgcccattcatacacacctataatttgttgtttgccatgatggcgtgtggctggaagaaacccacacttcttagccttgtgctgttgtgtgtaaaattaaagtggaaaggttcaaaacaagaaccttgggaactctcctgtagagtgaggtgcccagatttgactgcatggaatttagaccaagcttctgaccggccagaagtcattttttgcttactttgggcctctcaggtttagattatggagtttgcttaaagtccagctgctggaaaaatgagtcactaatgtacaccatttgtgctggattatgaaaatgatccttcgagcatcccatctgcagcagcagtgttgccataatacctttgtcactttcccactttaaatagaatcttcttgcttacttgtccccaatgtaggtaacaactgtakttcacaaaaccagtacctctgaggaagtttgcagcttttatttgaaaatcgatactcaggatattgaaggtaaaaacagcaggatttacgctgtaattttggctaaaaataaagcatgtgtataaatagagagcttctctgattagtaaaaatgtgcttactcaaaaagtgaaatttcttaaccaaatactttagcaggttgacatccaagtaaatattacttccattttttacaatagataactctttaatatagtcggaagctaatattaaataacaatgactaagctaaatgtatttgctattgatcaataaattgttttgactatgttatttttaaagagtgtaactagttgtaaagccacattaaggtctaattccagaaccaggaatttctgttacttttgtgttagccttccaatctgggaccttgaattctcttatcaccctgttagttttccatcccttagcctttctgtattccaaggggcccagaaaataaacatttctctgcctccatctttaacttagtctctcctgtacccctttcttttttagtctctcctgtaccatcctttctttaaatgtacccctgacccttttatttaacccaaggccctcacatccctctgctggttggttctcccttcctggtccaaaagcaagtccacttgcacactccagtcctcctggtctccccattgcctccagggtcagaatgaatgttgctgcctctgccctgatattttccatctattgctcagaagcctgttcctacaggaaacttcccaactaccagcaaattaaggcatctgttcttcctccctccaacatcccccaaacatattaccaatacatatttatctttaataatttcttcattaaattataagttatttgagagcaatgaactgttaattatttaaagacttcctggtattgtcaatagccatgaatttccattagaaccactgaaagtatctaaacttccaaatcacaaatcatttttaagtgtgttcaaagatttgctcattaatgattctgttctgacaggttccaaagcagctgaaaacagtttactcttatatttgtctgtttgttttcttgtyttatgtgccagcatcccactacagaggctacggaaactctgattacaaacgcatagtagcatgtgccaggtgagcctatttccacaaaggggagcatagactccaagttctcatttttgttaacgtattgtttctttacatattttcaaattttggtatgtccagaagatacaaaattgttcaattgtttaaaaatgcagaacatatatattcttaaattkctacttaccataaaaaacagccttggttttgctcataatagttttctctgtctgttttgtcttctgattcaaacagtgtaatattaattttttctctttcagagggatagaaatgtgatttaaaaaattaggaaaaaaatataaaagattctctcaaaaacagcccctactctcttacttagaaaaatcacatttacctaacaaaatccattatcagctagattctcaactcaagctgcacattgaagtcagctggagagctcttagagctgtccaaatgtcccgggctccagaggtcattctaatggtagccagggttgagaaccamtgatgttaaaccctctcccaactaaataccgaggcctcaattggccactgtattagtttcctgttattgctaggtaacaatttattgcaaatgtaatggtttaaaccaacacagttttactatcttgcaattctagaggtgagaagtcccaaaatcaaggagctgggtagggctgtattccttctggaagctctagaatttctttgcctattccagattctagaggctacctgtgttctttggcttgtggcccctctctgtcttcaataccagtgtcacagcatcttccaatctgactgtgacctctgcttccatcatcacacctccttctctgactctcctgcttcctttcctcataaagattcttgtctttacattaggcctgcacaaataaccccctatctcaaatccttaatttaatcacatctgtaaagttctctttgccacataaggtaacatattcacaggttcaggggattaggacatggacacccttgggggccattattctgcttaccacagccaccatcctaaaacatttatgaaagtgtaggttttttgccgggtacagtggctcatactgtaatcccaacactttgggaggccaaggagagagaattgcttgagcccaggagttcaagaacagcctgggcaccatagccagaccccatctctacagcaaattttaaaaattagccagacatggtggcacacacttgtagtcccagctactcaggaggctgaggcaggaggattgcttgagcccaggaggttgaggctgcagtgagctgtgaccacgccactgcactccaacctggacgaaaaattgagaccttgtctccaaataaaaaaaaaaagaaaaagaaaagaatatgtaggtatttgaaaatatgtatatacttttggctttggtgatcacacagtgtgatcagagagtggtagagccaggactgaaacacagacttcttccctgttctttccatcgtccctcagtcctttctattgtgttctattttcttaactcttgtattgtcaataacagtgatatctgtggatggcattttgctgattttacttataatcatgcacccagtgtggataacttggaaattcaatagtgttgtgcaaaagatgagagctgagaaggaccttagggatgatatcataatcctcttgttttggaaatgaagaaactaagacccaaagagataaagtcgcctgccaaatgctcacagagttagaggcagagctaggggctcaaatccccaacctctgatgttcaatccagtatctaaaccacatcttttttttttttttttttgagatggagtttcactctgtctcccaggctggagtgcagtggcgtgatctcggctcactacaacctccacctcccaggttcaggtgattctccttcctcagcctcccgagtagctgggattacaggcacatgccaccatgcctggctaatttttttatttttagtagagatggggtttcagcatgttggccaggctggtcttgaactcctaacctcagctggtctgcccaccttagcctcccaaagtgctgggattacaagcctgagccaccacgctcagcctaaaccacctctttcaatcagtgtaatctaagaccactaatcccaaggaacagcacatagtttctccctgcctccctcccagctgtttcccagtcttctctatgtcccaagcccaatcgcttcttaggattccttcactattcagccctatttccttcctcatcagcatttcttccttccagcatttcctacttccttctgtggccagtccctgctctctgttcccgctcaaacatctttcctcattccctaatgtctttccagtaaggtcgccctttcccaggcagcttctttcccmctaaatgccattcctacccttgggcacctaccagctggggaggagcatgatcacaattacctttaaatttgtaacagttgtcaaagggaagtgtaagcaaacttctgggcagagctcgaatcagtgcctgggaccctacagggaggcatctagacttgcaataaagaagagctctctgatagggtgagacacctgtgggatagcctctaccagtaagaactccagtgaccttcaggaaatcagtttacttctccaatcctcttctataaagcaaagatattgcactaccttatctcaagttttctgccagttctaattatccacaattctgccgtacagaaaaargctgttatcaaaaattcattcatttgacttcattgtcaggaggcctaattccagattatcaayatacaaaagaaagcaaggagaaatgcaatcttgaatagtctatcctttggtttttacaaattggggacaaaatgttccagaaaggcgggtggaatatgcttttggctctgttgacactgaagttaggttgggtaaattccaaaaggaactgtgtagtacttattcatgtaggaacttctttgccttcaaatattctctctcctgattaaaaaatgccagcatgaagtttctgtgttcagagggtctctttcgtgtatttacctttttacaacctctctgttgtattcctaagaaaagaaaaaaggatttcatttccctcacaacaaaatgcctttggggaagattgctggttttggcagcaggcaaagggcttcttgaaaggaggatttctgttccaccattgaaacagtctccatggcaaccagtcatcaaggctccagcaaccttttcatagacactctccactcgggaggcccttttccatcctgctgacaaagtgtttgcatctgtgagcaagagtgctctgcttctacccatccaattagggagatgttcrgatgtcacattagagttccaagtgttttatattctgttctaaattgttaatttggtgaagaatagggttaaatttttatgagtcagagattttagaatacttttctttattgtggcaaatattacatctatgacttctaatggggactgcttttatttatttatttatttatttatttatttatttatttatttttgaggcagagtcttgctcagttgcccagactagagtgcagtggtgcgatctcagctcactgcaacctctgcctcccagcctcaagccattctcgtgcctcagcctcttaagtagctgggattacaggtgtgagctaccacagccagctaatttttgtatttttagtagagaagtggtttcaccatgttggccaggctggtctcgaactcctggcttcagctgatctgactcagcctctcaaagtgctgggatgacaggtgtgagccaccgcacccagctgggactgcattatatatgctctatgaggtgtcattgaggaaaagatatgccctgacccctcactaacttgcttagtatctcctcttccaccaacattcatacctgtaggtgagatcaattcattttaccccttatgaagctgtcttttaatttcttcctttaatcctgactgctctcccaagcttcactctcaaacatccagctgcctttcaagcatcttgaggtgaggctggaacctgaaatcaacttttacagaatcacactccgtctgtctctgccccagcctcagccccgccagcctgtctcttttatgtcttctaacatctcttaatggtagctctaagcctctgccacccaaaaccaaagcctgggaattataaagataaatttaaaacacaaacttatacttcttcacagttaattttacaaataagaaaatgagcttagaaaggggaaatgatttgtgggaatctcagaactggaataaaacccaagtttcctgattctccatttcagtattcttttctctcttacaaaacaaaaacaaaaacaaaaccctcccattgtgccctttttgcatttccgcttaaattcctactagcagaattcctactgaaaggacagtccttgaaacattttctatataaagtagctattatgggaaatatagaaaatagagaaaagcatgaaaaagaaaagagataattgcttataatctcaccatccaaagtagctactaatatttgtgggtttgtttgtttgtttgtttgcttttaaagagggattctcactctgtcgtccaggctgaagtgcagtgctgcgatctcggcgcactgcaacctccgcctcccaggttcaagcaattctcctgtagttaggattacaggtgtgtcccaccaagcccggctaattttttttgtatttttagtaaagacggagtttcaccgtgttagccaggctggtcttgaactcctgacctcaagtgatctgcctgccttggcctcccaaagtgctgggattataggcgtaagccaccgtgccttgccttagtgtattttcttccagcttttcctggacatgtttattgaatctcttttcaacatacaactgattttttccttggaatatgcttcattagaaaatgaactaacgtgagaatccaaagacctggattcttctgtagctctgcatgaattagccatgtgaccttgaaccagtgccttactctcatcctgagtttccccagctagttagcttggtgtggatgacttctgtgttccagtagagtggtctgttgagattattgatcaagtgaggaaagagaatagatgactcaaagatctcttgcaactctaaagtcagagattttaacccrtacattgtagaaaagcaaataaatggagacccaaatttaaaaattaaggtctactaaggaagagtgtcctttcttaaagactcttattcacttatttattatattttctaacctcytttttattttagctacaagcccagcagggaagaatcatcatctggatcctctcatgcrgtgatggacatctccttgcctactggaatcagtgcaaatgaagaagacttaaaagccgtatgtgttttcttttaaatcgtgttgtgaatgcttcattttcttttctgaattattttatagacaattttactttctttcatttgaatataccacttttatagaatcacccagaatatttttttttttttggaggtggattttcactcttgttgcccaggctggagtgtgatgcagtcttggctcattgcaaccgcacctctcgggttcaagtgattctcctgcctcagcctcccgagtagctgggattacaggcatgcaccaccacacctggctaatttttttgtatgtttagtagagacgaggtttctccatgtcagtcaggctggtctcgaactcctgacatcagggtgatccactggctttggcctcccaaactgctgggattacaggcgtgagccaccaggcctggccagaatattcttttcaaaacataattaacctaagttttgatttatcaaagtgaagcagaagcatacactagcatgctctgtaaaatatgagtttatatgctaatgtgttcagactttttcaagaagaggaactgctcttcaatttctttgaattacagatcacatccctgcattgtgctatctcatcaacaggtgaatgcatttaaacaaaaagataatgaaatgaaattcaagcttctctcttttcccccttagcttgtggaaggggtggatcaactattcactgattaccaaatcaaagatggacatgttattctgcaactgaattcggtaagctccacctgcaaccatttttcctttactattactattcaaaatatacaggctaaaagattataaatatcatctctccataatttccttaaatccttgaatttgttaaacagattccctccagtgatttcctttgtgtacgattccggatatttgaactctttgaagttgggtttctcagtcctgccactttcacagtgtacgaataccacagaccaggtaatcaactccatgctaacatttcttcagaagaatactttgtattctttccagaacatttagaaatccactagagtcctgtaaattttatgtattgcctctcttagggaccactcttcatgaaagtcccaatttgaacattcaaaactactgcatacaaaatattgtacataaactacttcttgacattgagcagaccgtttcacctcagtcctcagtttcttcatatttaaaataactggattatagtgcctccaacttcaatattctttgcctcaggtttatctatggtgttcacagataaatcatatctctccttttgagagaaatcaactcaatccccccagaacaacttctagcccatctatattcttgttacactttgcagatagctctattatagcagctgtcacattgcattcaattatttgtatgtctttytcatcaaccccagggtgttttcattcttgtgtccctagtatctaacgcagcgtcgggtatagaatgtgaactcaataaatatttatgaatgggtgatcccacatttgactattcagccatttttgagaatgttatgtggttggagagcttattggatcacaagacagatgactccaccttgggcagttctacttgttagaaaattcttgaagtgaaccaaaactctgacacccattcattctagttttatattctgaaatcacatagaacatacatagtccctcttccccttgagatagatatatagagatacatagatatatgcttttcttcccttgtccaccctaaacaattccaactctttcaaaagatcctcatgcaacataatttattttcctcttacttagagaagcatcaaatgttttatttctgagaaacgagtgtttcaagcacagaactaagtgaaaaaggggagatctttctgagggtagcggaacccttcccaggacagccaattcataattttacctccctgggccttagctataaaaagaagggtttaaaataagcaatctctgaggctccatgtaagacacttgccaattagtaaatgtgttgttcttcaatcaaaccacttctcttaaccacacttttgttgccacagataaacagtgtaccatgttttatagcacttccaatatcaaaattcagaaagtctgtgaaggagccgcgtgcaagtgtgtagaaggtaaactttatttaacatatttaggctgcatgcttatttaaagcagtcgttcataacctgaggttaatctgggggacactgtttggtaaactgttctttctcagaagtagaaatgctatctcagctaattgaaagctaatgattccttsagcattgtaaaactacattttcacagttcctgaacaacctgatagttcatgctgtacagaggcagggaaacaccatcgagagggttgttgaatattataggggcaacatgatgtgagattttactttcacctagtctttttatcatataagacmagaggctcagcactgaaccactagcttctgttccttttctcttatacttcccagttaatggaattckgtttattgtccagttccatttagtctttcctaaattgargaaagccttcttggccaaggaaaagatccagaactcaccaataatcaacagctggctccatgagggtctcagttagttttggttttttcaaaatcctcaatatctacacattttctaggtacttattgtgccattttatagctataaatcagtcacattatcattttgggtccttcaaaggacttctgattatactcaaaatggaaaatttccccctttcatcaagggaaccacatacatttctaaagacctgaatgtggagtagccacccagtctaacaataagtcttatgccaggggtgtccaatcttttggcttcagtgggccacattggaagaagaattgtcttgggccatacataaaatacgctaacactaacaatagctaatgagctaaaacaaaaatcacaagaaaaatttcataatattttaagaaagtttacgaatttgtgttgtgccgcattcgaagctgccctgggctgtgtgctgcccacgggccatgggttagacaagcttgtgacatgctcaagattttgttttttgtttttgtttgttttgttttctttatgtaatatttcactttatgaaagaaaagaaaatgggcaggtcttagaaatctgacatttgtaaggttatattgggttgtctctgggctcatgagaaaccgtgtttactcctggaaagagtgtctacttctttccattaaccttatttttaccaattttcacaaaatccagctgattgtgggcaaatgcaggaagaattggatctgacaatctctgcagagacaagaaaacaaacagcatgtaaaccagagattgcatatggtgagttcaaaagttcaatatagctcctttaaacatgaaattttatgaatatgtgttcagttagaaagatcaaaaactttatatagtgattatatgaatacaacattccatgtgatcccctgaaggaaaatgccatcgatttttagcattaacatgcaaagtttttattcctcagcaaagaaatgtgattttcattataaataatagaagtgacatgtatacccagccaggatactttcccacaatagagctttttcaattacaggcactaaaacatagtcaaagggaacttttgagaagccacagaggtataagatttcagttctgtactcttccaattgatagaccagaggcagaggcaaaggtgatttagggggyttggtttttaaaaaaatatcttcagggtaaaaatataaataccaaataatttttaatatattcaagattgcaatccatgtttgagacactctccatttgaaaaagcaaatctcagtgcttctagttgtccagcgcttagagctaaattagtgttcaagtacagttgtagccttgtctcagttcctgataaaattagctcctttgttatctattcagtttttgatgtttattgctggcattttttgagagagagagagcatattgtacactatctcaaatcattttttcattttgaaattggaagggtggagccgggcgcagtggctcatgcctgtaataccagcactttgggaggccgaggtgggtggatcacctgaggtcaggagtttgagaccagcctggggcaaacatggcaaaaccctgtctctactaaaaatacaaaaattagccaagcatagtggtgcgtgcctgtaattccagctactcagcagggtgaggcgggagaatcacttgaacccaggaggaggaggttgcagtgagccaagatcgtgctactgcgctccagtctgggcaacaccagcaagactctgtctcaaaaaaaaaaagaaagaaagaaagaaagaaagaaagaaatttgaagggtgttatttataaattaaaaaaataaacacagccaatttggtactttgtgtttagcaacagcttccataaacagtttctcattgcaatggaaagggttctcattcttacggaaagggtctcgtaagaacttcatgagggctgggtgcggtggctcatgcctgtagtcccagcactttgggaggctgaggcaggtggatcactttgagctcaggggttctagaccagcctgggcaacatggcaaaaccttgtctctacaaaaaatacaaaaattagctgtgcgttgatggctcatgtctgtagtcctagctacttgggaagctgaggtaggaggatcgcttgagcctgggaggtggagattgcagtaagccattgcactccagcctgagtgacagagtgagaccctgtcaaaaaaaaaatgtaacagagtattatcactatttaccagtgaagaaactgaggctcagggagattaaataatttgctcaaggtcatgcagaaagcaagtaatagaattaagatgcatcctgatctccagtattttttccatcgaagtctactgaattctcttaatagtaattcaggcaacagaataagttttatatggttaataacwtttctttctttgaatttatattgattttggaaaaaaaaaaaagctaaaaagctgcctgactcagcctaggcccactgcagtttgttaaatacatgaagacttgagaatactatattgttttaacaaacaaaagttccactaaattatttcttccctccattttagaactattttaaatctaaaatatcagaaatctattttaacacagagaataaatgcaatttgggtttattgtgttgtttcaagaaaagacttcgctggctttttctggactacaagccagaataacagaatagaaacaaaattaagtagttctctctctgtacccaggcccacatagtaagtacattgcccatgtccattataaagacttatgaatctgaaagtcagaacacttttcatgcattttaagccactaatttacatagcccctggttctgccatgatgagttcacctagctacctctcaatcagtcaatctatatctgggatagacttaaagacttgagggatatctagaatgaacaaatcttttaggtcactaatttcaaaacaaaaaatagatcaaaagcaaaaataaaataaatctctcctgaggccacatagaaagaatgggtcccttcaagctggtctttccagacctgaggtcaagcacattatgcatcaaacattgatatctgaatgaagggaaaacaggattgtaggcagctcttgttaggtagttgccaagcaagggtgagtgagaaaacagaatcatcctaaaaaccaaggattaaagccagtggaactatatgaggaagcaaagcaaggaaccaagaaagctcacatggtagacctgaatgagagataaggcctcctctgtggccatggagaagagaatgaaggggctcttcaaaagatgcccatgggcatgactccactcatcttaaaggatcagcctctgaacttaacatctaacaaaggtttatcttgtttgtttgttttatgtgcttctgttattttattaaatatgtctcttattctaatcagcctgttctataacattggccagggctaatgattctaatagattgagagattgaatcagactgaggggattggggaaggcttcttggaggaaataagaactataatagtttgccatgcttcatttctcgtgtttgacaaattctggcttctactggacatagcattaatagtattaagactgaattgtttcattgttgtttgtcttttgccagcttataaagttagcatcacatccatcactgtagaaaatgtttttgtcaagtacaaggcaacccttctggatatctacaaaactggtgagaattcattcgttcattcgttccttcattcagcaactatttagtactgactatgtgccaggcattatattaaacacagaagatacaactcaaataagacagagctcttgcctttttaaagcttatattctacttggggagaaacattttttaaagatgttcgtataaatatttctcattgaattcatttttctaaaacttcagcaaaatgtttttttcaattgcgtaattgtccaatttctttttctttacaacttttattttaggttcaggggatacgtgtgcaaatttgctacatgggtaaattgcatgttttgggggtttggtatatagatcattttgtcacccaggtaataagcatagtacccaataggtaatttttcaatcctcaccctctaccctcaagtaggctctgctgtctagtgttcccttctttgtgtccatgtgtactcactgtttagttcccacttataagtgaaaatatgtgatatttggttttctgttactgtgttaattcacttaggatagtggctttatttctgggtkctgtaacctgttccattggtctacgtgtctttttttgtatcagtaacatgttgctttggttactgtagccttgtaatatagtttgaaatcaggtagtaggaggcatctagctttgttctttttgcttagaattcctttggctattcaagttctttctttgttccatatgaatattaaaatgtttttttctaattttatgaaaaatgataggaatagcattaaatctgtaaattgctttggacagtatggccattttaacaatattaattcttcctatccatgagcgtggaatgtttttccatttgtttgtgtcatctctgatttctttgagcagtgttttgtaattctcattgtagagatcattcacctccctagttagctgtattcctaggcatttttgtgtgtgtgtggctattgtgaatgggattacatttttttttttgaaatgacgtttcactctgtcacccaggctggagcgcagtggcacgatcttggctcactgcaaactctgtttcccaggttcaagtgattctcctgcctcagcctcctgagtagctgggattacagacatgcaccaccacgcctgacttatttttgtatcttagcggagatggggtcttacatgttggccaggctggtcctgaactcctaggctcaagtgatccactcgcctcagcctcctgaaatgctgggattacgtgtgtgagccaccgtgcctggcctcatttcgattgatataaattttgcaataagtaggaccataaagctaaattgcaataatatgtttatactaaatttttttctcttttgaaattctatcaaatatttcaagtcctaaaatgcttgattttttttcttttgagacggggtctcactatgttgttcaggctggtctcaaactcctaggctcaagggatcctctctcctcagcctcccagcttgattattactaaccataccctagagtttaaaattctagtaatatttttcaattttgtatttgctttatcaacactttgataattttttttaaatttttgttattttgaaagtttcattgtatgaaacttatttgtgaagttattttatttttttcttcattgatggtcacaattttttaatttgcaggctagttgccattctaatgaaataagtgtttagaactttgatgttgccacagtccaacttttgagcaacattttcatccaatgttcatattacaagcagtaataagccattctctttttactgaaataacaaagtgcttttcattccagaaatacaaattatttgttttatttgatactgattcttgcatagtatcaaaagacattttagactgttctgaatttttcatagcatcggatggttcccaagctacaatttttttattagtatcatttcttctttgttctcctgtagatccaaagatgcattttatgatatttaaaaggaaatgttaagaaacattggcatacttcatctcctcattctgggcccatttttaacacataaattttgaatttttataaatataaaaataccacacactacttacagaagaattgtggcacagtgaccataagccatttagaatcaagggcaaactgtagtttgaggataakgataaattggtatttctccaaagcacagagtgcttagaataggtaaggatatagaagaataaaagtttagttattgttgaagcccagggtagttgcctgttctctcttctgaatatactttaaattttccatgatgagaagcttaaaaaataataaggccccacacagctacactgcttactatgacaggggctgaaatggcagatagtactggtaatgttgctcagatattgacgtaataggaatctacaccatcagggcagcctaagaaatcagcttgaactaatgggtgtacactgaaatttatatcactaatgaaagtttaccatttacacagtttctattatacactatttgccaattggttcagaagtttttcaggacttaacaattaagatgactctgccagaacttaatagttaaatatcagccctgtatatatagcgataaatcagacacagtccatgccttaagaagtttctagtctagctagaaggacagatgtgggacaaaaaattgtgacagaaattcaagtgtaaaagaggtaargaggagacagaaagatatttaaaacaaagagcatccaggaatattttactggatactgtgagaattgaaggagactttcaagataaatgaaattcaagaggccaacatggggaggaatgcattccaggtaggggaactggctacttgtgagttctttgrgaatcccaaaattactatctttgaagttttccaagtctttcacattttgtacttttccacaaagttaacagttgccaaataccaaataattttatattttactatataatgtggagattaatgttgttcaactgtagagaggttcttttaattctggttatataagagtaataataagtacttacatagttcctactatgttccaggcacttttcatgtattaactcatttaatctcacgatggttctacaaggtaggttttattatcatgcccagtcttaagatgagggtctaaggccttatacagataacataaatcattttcccagagtcacatagccaggaagcagcatgcttagagtttaacccaggcagtctggctccagagactgaagccttaaccacatggatatcacggctgtccactagccatgaacctctcaatagccacgaggaaccagaaaacttgagagtttataattgtgacattaaaacatgaatggtataaccttacttgacttgcatgtctctcaggggaagctgttgctgagaaagactctgagattaccttcattaaaaaggtaacctgtactaacgctgagctggtaaaaggaagacagtacttaattatgggtaaagaagccctccagataaaatacaatttcagtttcaggtaagtcaccaatatttttcagtcactgatcttccctccaaaactgagtataatttattcttaaatacactacgtgtttcttatggccctgctcttaaccaacaaaccattttgaactaaataatattaatgtcaagcaaagaatgatttaaaaccatcgtggcagctgaggacttagctgcctgattaaccatctgagtgtctggacctgatgatgaatctgaaagtactcaccggacctcccctaaccaccacaccagctcccttgatagttctcagactgtttgtaaagaggaaaatgtgtaaatatgtattgtattatctgcttttagaaactagtcattgaaatagatgtactttctgcctttaatatgggagccccaggcagctttacaattccttaagggtttgtgaaccctccccaggagaggccggtacagaagagtttggcggacagcctgacccctggggacctgaccacagctgggctcttataaaataaatcaggctgrgcacggtggctcacacctgtaatcccagcactatgggaggccaagacgggcagatcacaaggtcaggagatcgagaccatcgtggctaacacggtgaaaccccgtctctactaaaaatacaaaaaaaatagccgggcgtggtggcaggcacctgtagtcccagctactcgggaggctgaggcaggagaatggcgtgaacccgagaggcrgagcttgcagtgagctgagatcacgccactgcactccagcatgggcgactgagcaagactccgtctcaaaaaaaaataaagaaatcaaattcagcttttctgttttgtggccacctcacaaacactttgtttcttggtaggtacatctaccctttagattccttgacctggattgaatactggcctagagacacaacatgttcatcgtgtcaagcatttttagctaatttagatgaatttgccgaagatatctttttaaatggatgctaaaattcctgaagttcagctgcatacagtttgcacttatggactcctgttgttgaagttcgtttttttgttttcttctttttttaaacattcatagctggtcttatttgtaaagctcactttacttagaattagtggcacttgcttttattagagaatgatttcaaatgctgtaactttctgaaataacatggccttggagggcatgaagacagatactcctccaaggttattggacaccggaaacaataaattggaacacctcctcaaacctaccactcaggaatgtttgctggggccgaaagaacagtccattgaaagggagtattacaaaaacatggcctttgcttgaaagaaaataccaaggaacaggaaactgatcattaaagcctgagtttgctttcaaactgtgctaaaaagcctgttattttatgctagatcagcttcaaccacacaaagacaggcaaattgagagagatggagaaagtcagcagtagagaaccttaaccttgagcgggcttagcctcagagccctcagcgcactgagaaggtaggtgggtttgtccctgccccctccccgtccattgccctctccatacccctgaagggagaccctctactctctttccctcccttccggcacatgttcatttcccccaggaacctgctctcgccaacaattgctttactaaaagacaggccccagtgcagcaacctggtgaaaagaaactgagtggcggatcgggagacctttctccagccctaaccaggtctctctctgagcctcaatttgagctttataaaagaggatacataacagaagttaatttttaagtgacattttgcagcacttcagatcatattaaaaagctctcgcatatattctcatttaatgtctcaagcctctcacaagattcagaaattattatcattatcatccccatcttacagataagaaaattgagatttaggcctggcatggtggctcaagcctgtaatcccagcactttgggaggccaaggcgggcagatcacttgaggtcaggagttcgagaccagcctggccaacatagtgaaaccccatctctactaaaaatataaaaattagccaggctaatttagcaagcctgtaatcccaggtactcagtaggctgaggcaggaggatcacttgaacccaggaagtggacgttgcagtgagccgagatcatgccactgcattccagcctaggtgacagagtgagactccatctcaaaaaagaaaaaagaaaaagaaaagaaaattgaggttcagaaaagtaaagcagttttcccaacctagtaaggaaaagaattggaaatcaaaccccaagactctatctcagtttaaatacatctctgttccacatcactacatattgcttgttgggttgaattttctaacagtaaggcaggatatagtagaagtttcttagacacagattaaccagccccactgaactatcacaggaaacatgaagatgacctccggatgtaacggtaattaacagagactggaatgcatctccttttgaagagtctgctttttactagttaggtgaagctacacaaggccttgtagtgtgcctttgtaaataacactaagattttccacttccagggactaaggacttatttttctctaatgtcaaagctcacattgtaggcactcccttggcaaaaacaaccaatgtgtcatgttcaagatgcccacactccctgtcagcgaggggtgaggagaccttctccagagcaggcctctcggtgtctcctgtcacttccttgctgggaggagggaaccactggtgctgcttcgaaggcacaggagtctgactgccttttcctgagcactttggcaaatagggcaggccacagtggcctaattaacccacaatgcagctgtcaaatatcaaagaaggttttgtgaattagcctggcaccatttaaaatatctgccagctcctcttcagctaactcctatgcatttgaacatattttctcagtgaggcttttgtgaccctccaaaccaggctgggcccattacccaaccctgcacttctcctccaaggcacttgtgctcttgcaatgatttacttaatcagattgaattattagtttagcgtgaccacactgaaagctccacttaggtaaggtctgagtctgttctattcgccagtatctcctgtagttggcacaatgtcgggcacatcatagggactcaataagtgtttgtggattcccctacagtgtagagaatcagaagacccaagttctagtcttggctttggccctaattggcagtgatttgggacaagcctcttaatctctttgatagcctataaaataagggaattggacactctaatgtctcttttatctatagctaagaagatgttctataatcttatgatgtgaaacaggaaaaaccaaacggcatataagcatccaaatattgggcttatgtatttcattctttctttctctcttttttttttttttttttttttgagacacagttttgctcttgttgcccaggctggagtgcaatggcgcaatctcggctcactgcaacctccgcctcccgggttcaagcaattctcctgcctcagccttccaagtagctaggattacagacatgtgccaccacacccagctaattttttgtatttagtacagataggttttcgccatgttggtcaggctggtctcgaacgcctgacctcaggtgatctacctcccttggcctcccaaagtgccgggattacaggcgtgagccactatggccggcctgggcttacatattttgtctgtaagtatggagacagtgcagagaagtaagctggaagagctgccaaggctttctgtagaaggacactgggatttgggtaggtgggaggtacagggaaggcctttctggttaaggggcaacgcttaaggcaggtttccccaggggtaagcaagatgttcttaggtgatacgatgcacattgttcactttagtggctatatgtttattttaacatgtattttaaaaaagtaattagcacatcaaagccatgatgtaacattttcttccaaaataaatctattttccaagaagtaagtctatttaagaaaaagtattgagtaaataaaagtaagtttattcttagggcaaaaatcatgcagttggcatgcaaatgattgacgtttaagatactctgtcttaagaaaacacgtggaggtctgtgagccaaggttgaggcaagcagccttgctccatatttctcagtgagaaattctggaccaaagtcatgtttagtctttctttccagaccctatgatgctgatgtattcagcaacacccaacaaacatgtattgattggtgactgcaggctaggcccaattctaggtgcttggtaccaagatccctgccattgtggaacatagattccaactgggagagatatgtaataaaaaataaagagaataattaagcaattagtcttggatctcagaaagtgataagagcaatgggaaaaagaaaaagcagactaaaggagactggtaatggtcaggggaggggttgcagttctaaatagggtggccaggtcagggtgggcttcaatgagaaggtgaaatttgagcaaagacttgaaggatgtgaaagagtgagccacatagctagccaaggggagagtgttcctggcactcttggtacatagtgtccggcctaaggcaggagcatgctggtgtgtcacaggaaaagcaaggaagcaggggtggcaggtgcagattatgaagccaatggaagaggctttggctttacttggaaggaaacaggagccattgcaaggctttgaaaagaagagtgacatggtctgtcttgcctttttaaaggactactgtaactgctgttgaaaataaggcaagggtaaagagaacggataggaggctactgtaataaactaggtgagggatgatggtgcctcagaccagagtggtagcagtggaggtattgaaaagtggttgaattctggatatactttaaaagtaaatgatacagtttggatatttgtcccccaaaatcacatgttgaaatgtgatccccagtgttggaagtgaggcgaggtggaagatgtttgggccatgggagtggatccctcgtgaatggcttggtgccctccccatggtaatgagagttcttactctgtgagttaccacgagatctgattgtttataaagagcctggcacctccttctagctggttgcttcctctctcaccatgtgccacttaggctcttttttcccttctaccatgactgtaagcttcctgaggcctcaccagaagcagatgctggcaccatgcttcccgtatagcctgcagaaccgtgcgccaaacaaatctcttttctttataaattatgcagcctcaggtattcctttatagcaatacaaaagggactaatacagtaggcttaattgaagggactaatattgtaggtttaactgaattccctgatagagtggaaataagtgtgagagaaagaaaggagtcaaggatgatgccaagacttttggcctgaacaactggaaagatggagttgcctgagattaggaaggctgcagatggagcaggttgtggggagttaggaatctgttcagttttggatgtgttgaattttagaagaaatctattaaacatccaagtgaaggagcctggaaggcaattggtcatatagttatctagttcaggagagagctctgggctgaaaaacataaatctgagaatcatcagcatactaaaaccattagactagttaagatcactaaggatgtgaatacagacagaggagtggaaaaaaagaagaccaaggatagacattttgagcattccaagatgaagttattagagaaaagagatagaggatccattgaattaggagaaaaaacaagagatgaggtcccctcaagccaaacaaaagaaagaggttctgggaggaagagtgttgaactgtatcaaatgcttcagagagaagtaagatgaagacttggctgttgggtttagcattggtgactttgacagggcaggttgggtggagtagtgggaagaatagcctgaatagagtgatttaagagtagataggaggagaggatttggagacagggagtatggacaactcattcaaggagcaaagaaatggattgaggggagtagagtgaaggaaagtttaagacggaagaaataacacatttgtgttctaaagggaatgactcagtaaagagtaaataattgacgatgcaggagagagaaaggagaactactagagtaatgtccttgaagaggtaagagtggataggatctggagcacaagtggaggacttggctttaaataagaacatgactagctcacctatgccaggggtcagcaaacttctgtaaagagccatgcattaaaataactgtaatattttaggctttgtgggccataattctcataagtctctattgcaactgctcaactctctcattgtagcacaaatgcagccatagataatgcagaaaagaatgggcatggactaggcaggctggatttagcccttgggcagcagcataccgatccctgatccatgacccatggttgtaggcagagaagctgagcacatgcagcagacgctggcaaggggtagatgtggtgagagtctgtggaagtccctttctcagagaagtaggatgaagatcatcacctgagatggaggatagggaggagcaattggaggtgtgacgggaggaaagaagggtgagacagttatctaaaagagagggaggctgaaccaactaaggacttgtaatatatttgcttcttcgtattaagggtccacttgaagtttctagtcatgaatttaaagtgggactgatcagcatgggttgtgggattttctccagccacatacacatccttttcagaatctaatgaaagctatagacttatcaattccctccaatcaagacaaccaggaatacctggaactgaacaagtttcagtttattgagtctttgcaacaagggagaacacacaccatggggaccataaggcttctcggtgagagtgcattagaaaagccttattataggatttgtacttgtgatagagtatttgggaggagcctcaaagaaatggaactttactctggattggatgctttcaggaagcaggggcaatcctatgacccagtatcttatttcttttctagctgggaggaaaagtagcagcacttactcactttagccaggaaaagggtgtgtgtggtcatttttgtggtttggacaatgttcttgtttttatatcctgctcaaacatgattatagagtagtcgtttttagtatggatccattttgtctgatgttg

SEQ ID NO: 6871 - DNA, 93011 bp, Homo sapiens
  misc_feature (1)...(93011): n = A,T,C or G, or insertion/deletion polymorphism (see Tables 1-2)
tatgattgctataaagtcagctttgttctctatttctagaaccatcatgtattggaatgaggagcatctcaattcacaggtctattatttcttgggggtgggtgtcagagggcatatggcattagaagcagctctgtgtacaactgaaaacagtgtcgaagctatttaggatctgggaagtgtacaagttaattacccccaccctcaaaaaagaaaaaagaggaggactttaacaaactttgaaagtgatcatgagggcaggacgcggtggctcatgcctgtaatcccagcgctttgggaggctgaggcaggtggatcacctgaggtcaggagatcgagaccatcctggccaacacggtgaaaccccatctctactaaaaatacaaaaattagccaggtgtggtggtgggcgcctgtagtcccagctactcaggaggctgaggcaggagaatcgcttgaacctgggaggcagaggttgcagtgagctaagacggcgccattgcacattgcaatccagcctgagcaacaagcgcgaaactgtctcaaaaaaaaaaaaaaaagaaaaaagaaagtaatatataataactaaaagtgaaagcataagggggaagcagaacgttagatgccgctctcctggaggtaatcacaggggccattgagtggggtgattattgtgggaggaagcctgcaggtgaaccgggtggttattgttaactggtgtttggactgaggaagatgggtggagccaggagaggagatgaggctacctggaagtgggggcggggacgggggaggacacaaggcctttactgaaaaaacatcaggtccttctggcggagttttagctgctgcctcagcactttagtcatctctgtagttgagcaattctcctaacgtgtcacaatgtgtttacatatcgttgtcttcaacacactgtgagcaggctcccttttataaattgtcattatcttctgtatagctaccccagggtatatggtaggcattcaagaaaggtttgttaaaggagagttacgattccagtctactttacagtgtacacgttaactaaattgtttggtgaacctgtaaacttttctctttttttttttttttgggggggggatggagtttcactcttgtcgcccaggctggagtgcagtggcgtgatctcggcttactgaaacccccacctcccaagttcaagtgattctcctgcctcagtctcccaagtagctgggactacaggcgcctgctaccatgccagctaatttttttgtatttttagtagagacggggtttcaccatgttagtcagggtggtctcgaactcctgatctcagttgatccatccgcctcggcctcccaaagttttgggattacaggcgtgagccaccgtacccggctgaacttgtaaacttttcagtgttagttttctttgctcccagttgatgatactttataaccatattgcagatatatacatatatatatatacacacacacagatatgtttcttaagatctccacattcttgagaaaatatgactaaaaggcatttagtttatctcattaaggtcttctgaccaacttatttcttattttttgagacagtgtctctctctgtcacctaggctgcagtatagtggtgcagtcatagcttactgcagcctcaaattcctgggctcaagcaatcctctcccctcagtcctcgagtagctgggactacaggcacatgctaccatgcccaggtaattttattttattattagtttttgtagagacagaatctcactatgttgtccaggctggactcaaatccctaggctcaagcaatcctcctgtctagcctcccaaagtgctgggattacaagcatgagcccctgcacctagctgaccaacctatttcagagaccttatatattgtaatatacactgaaaagttgaaaaaaattgtccattgcacaaacaataactaaatttaaaaagaaaaatatatgcacaagcctgtcttttcatgaagtcatttttttgcatactttccagtttttattttttttataattttatcactgtcatcatcatacattagatgtaatttgtgtttttttgttgataattatagcattatcattctccttgttgtatagacttccttattacaattttaaatgatggtctgctatgccaattatgttgatttactgtaatttaatagcccagcccaccatcattggacattggtggtttccatcattcattattagatacaggcatatagtgaagtgctgcctcatacctagtcatccactgtaatctaacctccagtcgtatctttccattgaaaagctctggccaagataagcagtggtcctccacttaatgaacatcatcagttcttaccttaattgacctcctcgaaattccatgttgttggcctctccctctttcctgaagtttgttctttccttggctttttggacactctcctccagaagcgttttctttcctttctggcagctcctctttggtctctgttctggcaactcaagtctgccccctaaatattggcattcccagagatgagtcctgtccttagtcctctcttggcttaatctacatcacgtctctgaatgtgggattgtcccctcccaagacttcaacttttatgatacattgatgatacccaaatcactcccaaatctctctcctcaaatactcatcagtgcctagcacataggagacacttgatacatatttgttaaattactgaacatcttcacctggatgacccatagcacttgaaaatcagtctgtaactaaactcatcatctttcttcaagctcctcccaagatctgctcccactcctgtgttctgttttgataaaagccaccgtcatctcctttaagtaagccagaaacctgagagtcagcgtaggctcacttcccgctcgcgtctccccatatctagtcaggcagtcatccagcctgctgatctacttccttagtttctctagaatctggctcccttttgtctaacactgcctaacttcatagccacgtcatctctcacctgcattcccacaaaaatgcatttttggccggtcttgtcattcttactaacattctcctcccccaccaacccctgtcccccaccaactgtcaaatccatctttatacttgcctgggcaacttcaccttctggcacctcaagagtaagcctgctgtctcttccttccttacttctctctgtgttatttattccccttacctggaaggcttttttccttctttgtgtcttaaaaactcattccgacctctcctttagaatgtataagcaaccccatctctggaaagccttccctaagtctctcctgctagaccactctgagcctgccaggaatctcagtgcttacacagtttatcattacttgttgattgtctactgcaatagactgagtttcctaaggcaggatcctgagtattttatcaaggggttgacagaggtgttcagtaagtacctgttgagtagaagaattttttttttttttttttttttttgagacggaatctcgctctgtcaccaggctggagtgcagtggtgcaatctcgtctcactgtaacctccgcctcttgggttcaagcgattctcctgcctcagcctcctgaacagctgggactacaggcgtgcgccaccacgcccagctaatttttgttatttttagtagagacggggtctcaccatgttggccaggatggtcttgatttcttgacctcgcgatctgtccgcctcgacctcccaaagtgctgggattacaggcatgagccaccgcgccctgcggagtagaagttctttggataaacacattctaggagtggggtcaaaatgtgcaaacccacacgtgaagaagatgactaataaattgtttctccaaagagttgtattgatttacactgccaccagcaaaaaagctaatatatcaactgaaccgtgtttctaacaaccatttactgaatgcttatcatctgtcaggtgttgtgccagaagaatggagtttgtctataaatatttcatcatttcgagtagtgcagtccaacagaactttctgcattgatggaaatattctatatttgcactgtccaatagggtagctattagccacatgtggcttctgagcccttgaaatgagacaagtgtgactgaagaactgaatttgtcatttcctctaattttagttaatttacatgtaaatgtaaacacttactggtggcaagtggtcatcttattgaacagtgccgctctagagagaaaaaaggaaatcagtcagtagatgtaactgccacattctggattattttttaaatgttagtggctctaagcccacatcattaaggtgtggccacctttcaagtgctatcatttttattagtcagcaccacctaatttgggaaatattttatctttttttccttttttttgattaaaacaatttttaaaaaatagagatggggtctcactatgttgcccagactggtctcaaactcgtgggctcaagtgattctcctgccttgccttcccaaagtgctgggattacaggcatgagccaccgtgcctggccagatttgggaaacattttataaataggtgcttagatcaggagagcaatgccttacatcaggaatacaaccaaaatgtctaagtccggagactcgaggcaaagtgggaaacgttactcacagtgctttttatccagaggygtggacttagttactccaaaggagtccagaagcataacacttctggagaggcatctactggacttgtttttccacgaaacttctagacttgttttgatcaggcaggaagtgaagcaacttttcagggagagagcccagcatctgcatctcctctgggacagaccacaccttttaccttctacttgtgagcctaggacgagttttgctttccaattaagggaagagcagggcaggcaaaactattctcttacaagatggttttttaagatttcaaacccaaggttatatttttaatcggtacctgtttggattctccaaattaatttatatgctcttaaaataaagacacttaacgtcactgcacaattctttgcacatggaggacttcgaaaggaataagcacactgaattgcattagatgaatcctgtcagataagcacttgtgacctactggcaaccttttataagctgatgatgggagaggagtttcaatctctttattggagttgttggaaatgtgccaaagagataacctggaatatattgtcctgaaaagtcctgttttaatatttaatacgaacatcttataaccctcggaattcgggtaggcagttgttgggctgagaaatgtggggtacaaggccgtgtatgtgttggttagccgggcaggcctctagacaggacctaaaactttgaggttttcccagttcgactcttcgtaggagaactgaagctgcctgtgtgaggccctgcgaacctcgccaaaaagtcttcctacaggatgcccccgcgacctcaccggggaaacaccgcggacagtcgggccagcagcgcccggagctcactccaggtctccaaacttgcagcacttcccagagcgcgcgcgctcggagcgggacctgcttgctccagtgcacgccgcggagcgaaccatcgggctggcgggggtggaggggtgcaggcgtgggggctgcgggccgctcgggccttgggcttctcctgccgccgccgccgcctcccgcccccggccaggagtcgcgcgtgacgcggttcgccgcaggagcctcgaaggcgcggcgccggcgagcccttccccggcaggcgcgtgggtggtagcggccaatttgacagtttcccgggccgggcggccagcgcggaggcgccacgctcgggtcgggggcgggctgacgccgccgccgccgcgggaggagggacaaaggggtgggtccccgcgggtcggcaccccggcggttgggctgcgggtcagagcactgtccggtggtgcccaggaggagtaggagcaggagcagaagcagaagcggggtccggagctgcgcgcctacgcgggacctgtgtccgaaatgccggtgcgaggagaccgcgggtttccaccccggcgggagctgtcaggttggctccgcgtaagtgcctccttgtgccgcgcggttgggaggagggtcgtgagcgtgagcgtgggagcgctgggggctctgctcgcgtgctgctctgaagttgttccccgatgcgccgtaggaagctgggattctcccatccggacgtgggacgcaggggaggggtaggtttcaccgtccgggctgatgactcgtggcctccggggctcctggaacctttactctgaagtcacttgggctggagattaaggcgcgagtaggggacactgtcttgaacccggtgtcctggatttctgctggcttggaggcatctcgtgtctgttgtgtcgcttgcatgtctttgtgttttccttctctatttcaaaccacactcggtattgatgcaaagttacaggcttgtgtacgtgagagaaactgaaaactcatcacagagcagaatcccttttccctttcaatcagctgcgtctgtaatagaagtaaaagttgtttttttttttttttttccagtagggaatggggatgraggtttggaaggacccacaaaagaggagtgtgatgaatgctttgtattctagtactagcctacctgtcaccagttctttttatgtcttcatttgtcaagtttctgcttttacacggtagtttaagttataaataatcagggatttctaccacagggttttaacattcttgaaatgtggacaaacttgggagtgagtgctcccgcgcttagtaatggaatacagcctcccacctctatttcagcttcagttcttaggctaggctgcttttctggcagctgtctggcctgagtaatgatggttgtggtttccctgaagttcccagcggagagtcatcccatgatagaaactgccttgcgcttctcactcacgctctcagcccggggaatcccagcggggaggagggagggaggtcgttttcttcagctccccagrtggtctgtgctgggtgtgctgacggtccttttgggaaaacaggtccacctttgccagcgtaattcagaaagagatgtaattttctgagagcacacacctgggcaggagatcgcttgaagtgagaaattcgtagtggtaaatgtatttgtagcaaagtaccactgcatatcctgcttgagaggatgaaatttgattatttagtaagttttcatgaacaactccacttcagtgtggggattacgcagatgagcaagagcgtggctctgtcacacagtcccgttgggaaagcctgcaactcattaagaatccgatgagtgccatttagaaatgtggacagggtactggagcttcctcattgtggggagatggcagaagcggaggtgctttactaaagcaccggtggcttttgaggtgtttcttgtgtttttttcagaactacttctgcagtggggccactttatttcttttcagagctacttatgcagattgatgaaggggaactttcccctctgaaatgctgctgtaactttttcagtaccatccagatattataatactgaatgagcccctactcctgccagtcactgtgggggatacaaagatgaacragattcaatttctgcatttaggggtctagtggacctgaaactgttagactttactctgcaatmctgtgtcgggattcctgagactgagggagggaatgtatgatgccgatgcacactctgcaatacagaaatttagcaaagagtgggattggtcctatatgcattcccttcaggggattcttgctgggaataaagggcatttgaacagttacctcacccgagcaagccactatagaaaatggggccagtaatgcgcccacctcaccgggctgagtgaggtctgaatgaaatgacagagagtacaaggcatgtggtggatgctacgtaaatggtggtagctagtaataggaacaaaacgggtgctgaaaactcttaagtgttgggtcctgggttgataagggaggtgagatctaaagatacaagtaggaggtgccaggtaggtgtccaggaaaaaactgaaagagttgttgttcacactctgttaaaaggccttgaaggccataacgaagctttgggtggggggaagtcagaaatccctcatgtattaaatgacttgactttccctacaaaagaagygaaccagtttcccagtaaacatcccaccccataactatttttgaggcattcataggcttaagaccartgaatttttacatcacccccgggggaattgcatttgcaatgacttctgcctacatttaacttttgatctagttctttgtacactgacaaaagttcacagccaaccatttctcttcaggacaagtgtgagaactttctgcatactgctgaaggcaagggagattttgagtttagcaaggttttctctccttaagaaggttatctttttacgagacacaagttattgaaactaggcggggccactttagtcctgtgtacaataatatgtgtagtaatataaatagtaatttaaaaagtcatgcagacttggttggggagaggcatgaagtttgggtgtggtgggggcggggtgaagcggtagaagggttcgcaatcactgctgaaactttcaacatattctaccaacaatatgagccaccagggaattccttgcctcatctctagaacgaatcccattaagcagttgtggctacagatgaatttatctaggttgagagctgattcccaataacatgcctcattgatttgactctaagcagtaatcaggggcccaacagttgttggaccaaccagccttgattttccagagaaggtgatttggtatatggtagtgtctgagggtgagattgccccagatgggagtggagggaagcagaacagttttctctggtgttttactgagtttttgtcttgatcctaaatccaagggttagggtcagaaacacagactcagaggttagatttaacacccatttagtgggttaaacacatcaatggttatgtgaactttgttaaggtttaaaaagctatttagggcctgtttctccctcataggaatttttgcaatcagcctttttagtagatgcccatatagaaagtgaatttgggagggtctaaggtggtattactattaaactttttgaaaaggctgtgtgatagcaatggaaaaaaaaattcaggcatggaaatccaatatgcagtattgcagtagctagttttaattttatttttgtttttttggttttttttttggarwtggagtcttgctctgttgcccaggctgaagtgtggtggtgcggtcttggctcactgcaacctctgcctcccgggttcaagcggttctcttgcttcagccttcaaagtagctgggattacagaagtgagccaccgtgcccggccactagttttaattttggatggtacctaggaaagcagttgagctagtatgctgcatacattgtagtgtgagaggcagagttccgagttggagagtgtctgcttccactttttccatttgattaggaaaagcacttcttagaactgggtgactgacagctagagccccagaagacctgcacaagctggggcaatggctacccataacagtgacggctccattctgttttttaaagggattggtgtctctatcatccagctggccattaaacaaccaaagcttcatcatcctagataacctgtgagctctcagaggagacagagtaaggactatcatacccccaaaatacctaatcatttaataaagcattttctctaccttttatgctatcccaaaacagtgctttccaaagtctggtatacagacagacttacaggtggtgcagagagatacatattctatttttcaattatgatgcatgaatattatatgttaggaataaaaacagaaaaccagctaccacatccatttatttcatggctagattgcttagaatgaggcaaaaataaatattaagtaaagcagtgagtttgctttaagaaaaattatcaactctgggaatgagtaatatgaggctaaggcaaaaatggtaaagctagcccttgacatctgaggtgtgcataatactgcttaaaatatgagtgtggtgcttacttatagagagcctggtataccttgaccacgccttcaagaaagtcaaacacagaatggcccagaatagccaggaaagttgaatttgatggactttctgtcttaagcgtgtgcatcctgctcttatccactcagatctcttagatgtggttgcagacagtgtatttgtagagctagctgtttgttttaacgtctggcccaattctcattcctttctctgcttccacaagccattctgcagtttttaaaggtctgttggtatgatatttttgatatgatagagtgataggggaggaagtattttgrcactgatgaaggacatcactgtattatcaagtgactcttgctcatgattcattgccgaagaatgtggacagccaaacagcctcacctgtaaatgcatttaatttctcaaagtctttcagaagaatgccaactggatgagtttttttttcttatttttttttttaatatgaagcttgtattggtctgtaaaataggctttaacaaggattttcgtaggaacaggaagccttgaggtagaaaacaagtatccctgctttgacctagagagatgcatgctcayggcaggcgaatgaatcaaggagaagagaaaatactgtttcagtagactctctagtgatgtgtgtgttcacaccatttatgagaaatcctaagctttcaattagtaacttgtactttagtcatttaaaatcagcacagatgtttgtttagtgcctctgccagatggttaaagttaaatcaggttttttaacctgaaaaacgtaatgtagctttccttaaccatttacacaccattgtatattgcagaccatagtcagatacattttgttataatgaatgtttattttaccttttagctcaattagaatatcagtggttatggtttctattttgttttcctacagttactgtatgggggtgcagtaacagcggtggtggtgaaagtaagttacttttttctttttctttctttttttttttttttgagacggagtctccctctgtcgcccaggctggaatgcagtggtgcgatctcggctcactgcaagctccacctcccgggttcacgccattcagcctccccagtagctgggactacaggcgcccgccaccacgcccggctaattttttgtatttttagtagagacggggtttcaccatgttagccaggatggtcttgatctcctgacctcgtgatccacccgcctcggcctcccaaagtgctgggattagaggtgtgagccaccgcgcccggctgaaagtgaatctcttaatggatcttccatgaatcaaatatttgtgttttagtaagttaggctgaccaaaagatttcgaatcatacctttaatcatggcaaggatcttatgtcacattcttgagtacacatgttcactaaattttacctatatgtgtatgtgaacatggacttcagaattaattagtgtggtaattattatttctattgtagactttaatcagccatattaaatatatgcattatgttcacagagaaaacatggtatcatctttggaaactttacrgtatgctctatattatagataccctatataactatggtactaaacacacgagttagtgacaagtcaggcatttggagggaatgtttgtaacccattgtgggagagagttattagaatagttattcttactggtaggtaacagttatggctgtaatgaatagaatgtgactaaaatccagttatgcctttgccatcgtattaaaagctttggtggagacgtgagaacattgcagatactttggattttgtcacttgagttgaaggtaaacagagaaaacagtactttctagtcatcagtaggaattaactcttccaggacatgtagcttcaaggaccttctaggttcttctgagggggaaataatgttccacttggggccatttttttccatttgttgagagtcatttgttttcagagtattaaaggaagtgttccgagttctaggttgtgtttctttgatgcctactaaagctgagcacacctgagaccctgggtggagctctacaatgggaayaggagtaagtaatgtaggcttcgagagacaatcattctgctctcagtccttggaagactgttcctaggtatatatggcaaagcagatgaaattatttgagggaattaattagcaaaactaaacatttctgtttttgaaaggaatgaatcatttggaaggaacttcctggtgagctcagttttagcagcctggtttctgcgttacccttctgcagtctggctgaatcaattgtgttcttgcctgtgattggtgaggatgcacatgctagtatttattctagcccttatcacttcccatcagccctgagcccctccctggtctgagtcatcttggtaaccccagaagctaacagagcaccaacacatccactaaacgttggactgacttgatttggggcaggcttgttgtataagctagtaggaataagagactaattgagaaattaggacagtggattcctgacatttatatagtgagtagatgatcgtttgttagaattgcgaatttcatccagagaattttgtccaaaaaaaattatagaatttcatctagaccatttttgtaatggcatggaagcagcattagctgcaccactgattagctgggtggcttttgctgtcttgtgactctagtttgcaatttctttttttttttttttttttttttttgaggkggagtctagccctatcgctgaggctggagtgcaatggcccgatctcagctcactgcaacgtctgcctcctaggttcaagcgattctcctgcctcagcctcccaagtagctgggattacaggcacacgccaccacaccctgctaattttttgtatctttggtagagacggggcttcaccatgttggccaggctggtctcgaactcctgagctcgtgatccgcctgccttggcctcccgaagtgctgggattataggcatgagccacctcgcctggcctagttctcagtttctttatcagaaaatgagtagttacagttgatcatctcaaagtcttttgtgcttaagattctgaaggttttgaagtttgagtataaagcctagagaacattctaaattatttccattggttcttctcatcttaaaatgtttttgtgctccttaaactacgtttgtgtttgcttgcttgctttcttttttttttagagatccagtggattatctctgaaaagcattttttaaaaagacagagtccaagagtggctggtagttgttttgctcataaagtgatggaaagatctattattcagttgcagcttaaattatgtaccagcaccacgtgtgctggattctcttccttactttgcagcttaagccagcaactgcaaccatcttgcagagcttcttgagaatccttcttcctcttcctcttcctctccacccccatggacttctccccgggcctcattgcctgtgacatacgcttggaaggaggggcaggcctgcagctgggagccctttctgatttgttcttcacaaatgtgttgaagatgagcctactggtcactgctgcaaaaaaccacattgttcactggtgtaaaatcactgctgtcatctgagtttcagcataacttcaggcatgttggagtttttcaacgtcacctcaggcagagcactttgccttccttgggctggtctgtttagtgtctgggtgagttttaagagaggagagacattgtggcatcttagacactcactgaaattttccagaaatggagctggaaacatttgtgcgtttccttctggtgttattgttaaagcctaaaaacaagggcaagtggcaacacattgaaatgaagaagccccaagtttgcaacacattgaaaggaagaggccccaagttcgttttgagcctaaattgaattttaatcaaaggtctgagagaaatatttagtctacttatactatttaagtgcacagtttggcagatgactttgggcagtgaaggatctggaagaggcaggaaaggtagactcaatctgccagacttagagctaaaaaaatttgcctggtatgtttccatgaagaaaattttcctgtagaagcagtggcaygacctctgttacaagtctgcttattgataatgaagctttttctgtgttatcaatttcgttgaatttatatgtatgtatatacatatacacacacacaaatctcaagtagagagcttgatgaatttctttttttttttttttttgagatggagtttcactcttgttgcccaggctgaagtgcagtggtgccatctcggctcaccacaacctgtgccctccaggttcaagcaattctccggcctcagcctcccgagtagttgggactacaggtgcgcaccaccatgcccggctaattttgtattttttttttttttagtagagacaaggtttcttcatgttggtcaggctgatctcgaactcctgatctcgggtgatccacctgcctcagcctcccaaagtgctggaattacaggcgtgagccattgtgcctggccagggaattttatttattgtggtaaagtacacataacattaagtgtaccattttaaccattttaaagtataaaattcaatggcatttaatacactcacagtattttgtaaacaccatcactctctagttccagaggtaggtgaatttttacatgaatgtattcacctgcatgattaccacctagattaaaaactagaattttccatcactctggaaggttctctcttgccacttttccaatgattaccacacctacctaaaagagaacttctcttctgacttctctcaccgtggaacacttttgcttgaacttgggagaggacccatatataaataaaatcaacattttatgtctgtcatctttcactcaacctaacctctgtgaaattcatccgtatttgttgcgtgagattcagtagttcttttttgccactgagtcgtattccatttatatgcatctgtcacatttggcttatctcttctgttgataggtatttgggttattttcagtgtttttgctattatgaataaagctgccatgaaaagcacctacacattgccttgtggacatgtacacccatttctcttgtgtgaattcctaggaccataggttagggattttttaaaaaacttattttagattaaaaaaaatattttttgagacagtctcactctgtcacccaggctggagtgcagtggcatgatctcagctcattgcgacctgtgcctcccaggttcaagtgattctcctgcttcagcctcccaagtagctgggattacaggcatgcgccactacacctagctaatttttgtatttttagtagagacaggtttctcttcaactcctgagttcaagcagtctgcccaccttggcctcccaaaatgctgggattataaatgcgagccaccacgcccagccaggttacagatgtttaactttgattctttacctctgaagtcarataaacctgggtgtgaattcttttgtcctgccacttgcttgcttgactttgagcaatttacctttttctcatgttcagttttctcagttgtaaaataggcctaccctatcagtcatggttcagtcaagaagacatgtcattctagctatttcaaggagaaggggattcaatacagagtattagttgccttcagracaaagaaaaggcgagatgcgcaaaaaatggaagcccaccgctggctttctgatttgccgcaaaaaaagttagaaagctgctgccacccagagaagactcagaaggtcttgcttgaccttccaccttctcagcatctccagccttgaggctggtgaaagggcagggaatctggacatgctgtaaagctcatgtctgaggaatccaacttttgcctgctactgctgctgtctgtaggaagaagaaaaacaaatggcttctgctttccttcatccttccaaatctcaaacacgtgtacctcgctggtagaaccctgttggcaagagagatgggggatctctggtagaaacagaaactcagtgccagcaaagaagaaatggcatagatgccacctggggttgctttgaggtgctcagtaaatggcagtggttataatttattattttcatcattcctcaagaactgctgctgcagttcagactgatttctctctctctctcttctttttttttttttttttttgagacgggctagctctgtcacccaggctggagtgcagtggtgccgtcacagctcactgcagcctcgacttccctggctcaagtgatcctctcacctcagcctccgattagctgtaaccacgggcatgcgccaccatacctggctaatttttaaatattttgtagagatgaggtctgtctatgttgcccaggtgggccttgaactcctgggctcaggcgatcctcctacctcggcctcccgaagtgctaggattataggcgtgagtcaccacgcttgggcagcagactgatttcttttttttttttttttgagacagagtcttgctstgttgcccaggctggaatgcagtggtgcaatctcagcttactgcgacctctgcctcccggattcaagcaattctcctgcctcagcctcccgagtagctgggattacaggtgggtgccaccacacccggctaatttttgtatttttagtagaggcagggtttcaccatgttggccaggctggtctcgaactcctgacctcaggtgatctgcctgccttggcctcccaaagtgctgggattataggcgtgagccaccgtgtccgacccagactgatttctgtaacggatgttcattcttttcactttatagtcacatggatgccactgtaagagctccgtgtcacataaggtgttgtttttctggaagsgccttccagattctgtatctattgctctgtgattctaggtacttttctaaaggtataagcttgagaaattagttttcaagtctgtaagttaatgtagagctgaaaggtgacttaattctaagagttgctgctttaatgtataattttatggaacctaatgagtgttttctttttaaagtcatyccactttattattaataaaataaaaggtaatatataaatctggctgatagatggggttacttttttccctgtctttagcttcctttgtgttctgataaatgagatggaagatttttatcatattttgtacctcaaatctctcgcggagggaacactgtagtctaccaaaacagctggcagaagtgtctgtcctattataagtttattttatgaaacatgagctataatgtagtccttttttttttttttttctttttttggagrcggagtctcggtygcgcctggctaattttttgtattttttagtagagatggggtttcaccgtgttagccaggatggcctcgatctcctgacctcatgatccgcctgccttggcctcccaaagtgctgggattacaggtgtgagccgccgcgcccggccaatgtagtggttttaagacatttaaaaatcttgaaccaatgttggcaacagcctgtctgtaatgatgtcacatgtggaaagaaccgagtttttcttaactttagaatgtgaattttttcctccttcaaatactttttcctataacccagacctattttactttccagggaccctactaktactgccctaaggtaatttgctagaaatggagtggtcaagatgtattgattaacgttttaggcatacttctgtagtactacttccgaaggctccttgcagagaaatttgaagtgataaggaaggcaaatattcgaartggaaagataagtataaccagtgactatttcagccactggtttagcagttcaagtgagctggctgtttgtaaagcttgcttagtaaatgaatrtgctagaaatatattgacagaatttggttttatctctttttctccagacttttagtcggccagggctaacaatggatgtccaaacagtttacagtggctgatacacaatgcacaaagggcttcactgtttggagactggaaaatagagccagaggggagcttcttatgggcattgacctaattcactccttttggcaaaaatgcttggttttaaatcaatgtatgtatttctgacccaaatatctataaatatttcagctagtagtgttacagctggaggaagggacccgtggtgttgcttygtgtattttgatttgacaatattctttagaaataaattgtcaagtgaactaatattacacaaaagttagggaaagttaagagaggcagctgaaattccatcagtttcctccttagtccctggaacctccccacaatcaggaatttgttagtcacctggtttttaaagataaatttctctgtgggcgtttctgctgagaaatgtggggaaacaggactgggctaaaaataaaattagttcaggcattgctaaacttctaagtatcatgtttgtgatgtacttttccaggaaacataaattggcaatatttttgctcctttttactaccacagaaagaatatttgcagtcagcatgcacggcctgaaagaatctctctcgcctattaatagaacagaaggaacatacacatgtctatgtgggggaaaaacatctcatttggcttagtagtaagctccaaataacaattgcattgttgttctgaattgtctttgagtgtgattggatgattaaatatamatgttgacctgattggattatatcacagcaatgaactgtcctgaaaaaacagctgtaacataccactccagactrttaccagacttagtcggctggctttatatttgtsttgtcaaaactgggatgctgtcatttctgtttctctgtctctttcgtctgttccaatttgagatatactgactatgttagtgtagtctgctacatggatagtcctttatctttcagcaacataagcaacataagctttttgactgagacgagcgtaatcaaaaggaatgctgggaaacagtgaactgtaaaaaatgtcctcaattagatacaggcttcagtgcatgggtttatcctttcagaagatcggtgtgttttcagtgagggtctaaacccactggcctggattccacctcttgttggatgggtggtcagttttaacattagggggtgttgattgtgagctcttgagagcagggctggttctttgcattcytaggtaggcatgatgtagagtagttgctcagtaaataggggaaggtgaaaggaagagaagggagaaggtgagtctcaaaagactggaatgtgataagcacacgtttatcacactgggkgtgtattctctcccytttcttagagtattccttgcctcctgaaaaaagcactttgcaggaaatatggagatcttctgaacctgtggctttgtgttattggactgagaagtccaaaatgtgcattagcggagcttatagaactgctctgagaatgtgttcttgagttctacaaatattatggggtgcgttgggggctggctcactccagctcagttcccatgtgttaagkggaacttctgatctgttgaatgcctaaccatgacggagcccaggagacaaagtaaggtgtggtttgttttgctgtaagaccacgtttggttagcttttctctagcaaagctggggaaggagatcacagggctgatgtggtggtaggcccttggtgtagatctcactgacttttcccagtcaactaggagtaaatgttaaccctattttataggtgggaaacggaggctcagaaacattaagtaaattgcccagtgtcacacggcttgtgtgacagggaggggatttgagccaaggtccatttgaygaatttgaaacctgtagattctgtcaattccaccagtctctgctttttagaatcacagtggcaagaaaataggagaagctcaaggccctgtgttgattattaggagtttaaacatcatcgctgaaagtgcatagaaatatttgtattcctagagaatcttaagtaaaagtaacatatcaatgttgtcaagagatgtcttcattcatcagagacctctgtgtgttcattactgtatgagaccccaaagactctaagttgcctctaagacacagccttacagggaggtattaagygattatgtatacagctagctaaaaccacaactttattatagaaatattaagaatatgtcttatcatgtgagagtattctttcttcaagtccatagcctccagttagaaatggctgtgttgtcccatcaaccccttcactcaaaaactatcattaatatcaggaaaaacttatggttacaaactcctgggttatagaattggaaggaaaaacttagatatgctgtgtttgggagcttgccttgaggattggaattccattgcaagttaccttggggtcaaagtacatcccctaaaacatcaaatacctccaagaggttttaggctatcagacagccacactttaatgtggagtagactagtcagctttcttctactatctaactgacaccatacacattgttaaagagataattttgattgggratgaagatagggaattttgaagccagaacattctggtgatggagcagatactgccgagatgttggcctcgggacagcctggaggaggaggacactgataaacagagcaaccagcccaaggggtggaaagacctaggaagtctccacatacaaattttgcttctttcctgtttctccactgaaccctgggaagggtgcttatttctctcctcactgtctttccccaggacccagaattgataggttagttgagtttctgtgggyagtctaaggttgtgttactatttaaaatgttagtaacattttcagattcactgagattcttgctgagtgtggtggcatatgcctgtggtcccaactacttggagactgaggcaggcaggaggatcgcttgagcccaggagttggaggctacagtgagttctgattgtcctgygaataggaatagccactgcagtccagcctgagcaccacagtggagactccacttttttttttttttaagtttaaaaaagttaaaaaaaaaaaaagacaaagaaaaaggaaagttgatttttggttctaactcagttgtgacaaacggtggatatatggttctgaccacattctaaattggacttgatggtgggcaagggaaacttccaatgcctatcccctcactttaaaaaaacttctcctgggccaggcacggtggctcatgcctgtaatcccagcactttgggaggccgaggtggacggatcatgaggtcaggagatcgagatcatcctggctaacacggtgaaaccccgtctgtactaaaaatacaaaaagaaattagccgggtatggtggtggacgcctgtagtcccagctacttgggaggctgaggcaggagaatggcatgaacctgggaggtggagtttgcagtgagccaagatggcgccactgcactccagcctgggcaacagagcgagactctgtctcaaaaaacaaacaaacaaacaaacttctcctgtagcagtttgctttgagttgtgggtgccacctccctcactgtctttttctgagggtacataaataaattgcatcctagcttgagatcaggagcmatggtttttagttctctgtgtccaacacaattcttctacacagtgtcttgcccaatacatgtgttggtaatactgacaaacatagttaatcttcttctttgaagattatctgaagcaagattttgaccttaggtcagcttcccctgaagtatgtgattggaaactgaacgagttcagattttagtttaggtaaaaatataaccagagaagttgctaccaagcatagttgactttgagctgacctaacttttggattatgtactcactaagaacttacctcttattarttaaacaaatacaaggaaataaataacccaataaaaacactcaaaacaagtttatccccaaatagtgtacttgatgctaaggacagacctaaagtttgttgaggatagaaatgaaaaatgaggcaaaagaaaccaggaattgagatgtgtgtgtgcctgtaccagcacccgtgtgagccccttgcaggtaaygacccatggtccctgcacaycagtcttctgttactaagttttgcataaattgagtctggtggttggcaagctacatatagccagctgcgtgtttgttgttttttctgcctgctagctaagaactgttcttgcattttaaatggttatgtaagtatctatatgatctccgtgattttgcctcttgtagtggcaagcctaaaatattyattgtcaggccctttgagaaaatgtttcctggctcctgcctcagacctcctggaagcagggtgttggcttgatttgtctcctgttctgcaatctgggaatagtagatcaggatgctgacttgtgggaagatgctggctgcatgagatgcccctgtctgcagtcactcatagcttggaaaagcaaaaaggaaaaagggttggatctgagcactgacagacaggtttgcttctggtttcaatgtagtaaggtgacctgataacaagggccacttgagaagttgcaaatgcagatttyctccgtgttaggtggtgaccwataaaagcatattttgtttttaggatgtagaaaggctataaaactgcaatgtctttgtatcatcaaacatttctgtgtttctgatgtttcagatgttcctatttctctggattgcaggatttcaactttgcaacatgtactgttgtgtttctgagttgttgactatttcagttccaaacagttcgttatttcctgtcagaggaaacttcagagtaacartaaagtgctggtgtggcttcaaaggcttggagaaatgaaaagcagtggagaaattttgtgaggttcctttggcttagaaggttcagaaaggctttgagcgaatgaatgtatgtatcagtcactgttactccaggtccgttagctgtttccagacctttctgtgtcctaaaaacaaacatcattttgagggtggggactgtgtcctatgttgacaggtctttgttttcaaagtctgatgtacaatagagactaaacgttcaatgactgaatgcagttcatttttwaaawtttttttttttttgagacagagtctcactctgttgcccaggctggagtgcagtggcatgatctcagctcattgcaacctccacctcccaggttcaagcgattttcctgcctcagtctcctgactacctgggattataggcacgtaccaccacgcctggctaatttttgtatatttagtagagacagggttttgccttgttagccaggctggtctcgaactcctaacctcaggtgatccacctgcctctgtctcccaaagtgctgggattacaggcgtgagccaccatgcccagccgtatgttttaaatcttatattaagcttataccactgttgattgccgttgctacagtggggcttatattaatattagaaacacccctcatttgagtggtactttacagtttatagcaacctctacataaagctgggcatggtggcacatgcctgtaattccagctgcttgggagactgaggcaggaggattgctccagcccagaagtttaagaccagcatgggcaacatagcaagaacttgtatcaaaaaaagaaaaaaaaaactttcatgttaaattctcacttgatcctcaccaagaaccctgtgaggtgagtgttattcactggatgcttagagaacctagagatcatacagctggctagtgcgtaccaggaacttgaactacttataaactggagcagtcggagaaagcttggtgtgtttgacattgtctgtctcttggtctccaggccccaagaggaagcaaaagcctaattcatcttggcaaatgctgtagaagttcttgcttggattttctttcgctagacagtttttggtggtggtttgttgctctccttcagataaacatttcttgatagtgcagtttcttccttcaatatgttcttattctggtgtgtacatccgtttctcagaatgtttagtaaacatttctgttgcataccctaatgccagtttcttacctactcctcagtagcgtgctgcagcagtggctttgggacctggtgtagacattatgggttgctttattcattcctcacagtgacaaggggatcttgattggtgctaagtccttggatggttcccttggcctcagtgactctgagagagccatcactgcaggtgtgatcagtgccagggtcttcctttcttccttctctctcacttttttttttttttttttgagatgtggtctcactctgtcacccaggctagtgtccagtggcacagtctcagctcacttgagcctcctgggctcaagctgtcctctcacctcaatctcctgagtagctggcactacaggcgtgcgccaccacacctggctaatttttgtatttttagtagagacagggtttcaccatgttgcccaggctggtcttgaactcttgagctcagacgattcacccaccttggcctcccaaagtgctgggattacaggcatgagccaccgtgcctggcttttattgtaatttttaaagtctatttctaatttcatctaaattatgttttgaaattttcaattcgtagggaaccggcagtctctccctttttatttctgcatgactgcaccacctagtggataatacatctgttaccaggcagtggcctttgatgatttcctatagctacaaattctacaaaaaggaaaattgggtgcctttttatgctttgaaatcacatataatttctgccagtaatttttgtttctaggcaagtacggactttttgagaggagcttaataacgtttaattcagaattaaaaaaaaaaacgtcagcccatacctgaagtttcccgtgtcaccaatggactaaggatgcagactgtcagtttcactcagtttatgtgataatggcatacaagatagaataatgaggtctttttctaagtttagaaacaaggctatttcaaacacctgaactttttttttttttttataacttgcttgaatttcatctgctgtgttttattaagtcaaaagaattaggaaggcttgttgatttttgcatggctttggctccacatttgatacaggaaacctcacctttcccctccctgtctcttgtctttgctgccccctgcctggatggagtatgttccagtatgatggagcaattgtttctttttgtctgttgatttccattaggtgcagtgggcattggtcattgtgctaagtataccatgcaagaacacattcagttattacgtttatggtattttaaatatgtaacatacttatgcagttgaaaccataaattgtaagatttttagtcttgtccatagattaacggtttaaaataaaattattgtgtctcttactgacagctggttaaatcagtattttcaaagtatcaatttactaagttttgtcatgtgcctctataaggaattcacagtcttcctctgcgctcccacagcctttttatttttccttcccaggaaaaattttagagacaccaaaaggattcttaaagtataaaaatgaatttcactgtttttgaaaataagtactatttttttcttaatacctggcattctgctcatggttgcagcactgtaaattgctgaaagttataggtcattacacatgaagaggcttaaaaatgccgtttgatctatagttaactacaaaatatggagggggagctatatgcacacagtgtctgccatagcattagttatactagcaaaaaaaaggaaatggcttaaatgactgctagggatatggttaattatatagtaaatattgctatttacaaatttaaattaactaaaattaaacattgcattcttcagttgcagtagccacatttcacatgttcagtagccacatgtggctagtggttactgtgttggacagcacagctatagaacatcgtcaccatggtagaaacttctgttggagagtactgctagacaggtgcttctcaaacattattttccccgtcacctccctgatgggaggtgcttctcaaacgttaatgtgcatattaatcacataggggctctagttagaatgcatatttktatcagtaggtccaagttagggcttgagattctgtatttttaacaggctcccaggggttggctacrtaatacccaaagggtggggttcttgcctttattctccaattctaataggaaaggcatgtgtttgaagytcaggactccgtatgtaggctcactggctttatgggattaaccaggctcattgctaggtggtactaatgtgtccctcttttctgtgggaaccatcatctgatggtgccccaggtctgggagggaacgattgaccttgtrtgtttcctatggggccaaccttgatggtgacatttagctgagcagctctaataattgttttttcaacctgcctttttgacaaagccgtttatgattatctttatcttggtgcctattatgggggtggtggtttgtatgtatgtttgtttttttaaagtgaagctatgttttagtgttatataagtttagtcaggtttaaaattatagggtacacagggctgtgcctgtgttgccaaattagcaccttccttttggcttattaatggcttctttgyaattacaaataagaatgatctgtttatagcttagcttagtgtatcagaactaggaacatagaggtcttaaatgtaactatcagctgatttttttttttttggtctcatatcttatgaaaattggactcatgcaaatttgcattcaaattgtgaccaggcacctgttagctgtggggccttgccatgggcaagttccttgagatctcaggccttctatttttgtatgtgaaaaaagcaggagtagggttagggtatagggtttttggaggattaataggcaatagccataaaatacttagcacggtgtctggcatattgttaatgtccaatcagtgatgatgtgtttcaggcccccccttttccatggtgttcacaaaggcgtaggcattagggagcttgtgcatatataccaaagctgactgttcaaacagccagaaataaaatccgactcgactccctttctgcaccctcttcttaccaactcactgcagaagacttattgggctgtgttgactggacccaggccagtggtgtggaaatagctatcatgcttgtgaagatgttctgagttgtcagagtgattgaatccatgattggtctggtgcccaagcaccaacaatcatgtttttgtttgtgtgtttgttttttaagagacagggcctcactctgtcacccaggctagagtgcagtggtgccatcatagctcactgcagtctcaaactcctgggttcaagcagtgctctctccacagcctcccaatgtgctgggattacaggcatgagacactgagcccagctgggatttcttttggtgtgaaggccagtgatcagtcactagtaggttttggaaggyacaataggtgtatagtggagaggcaaggttcttcagtggaaaggatataagctttctagtcacaccagcctgagttagaatctgtcctctgccacttttwacttgtatgacctcaaycaacttactttacttctgacttcagtgtccwttctgtaaaatgagtctattaataatgatattgataatagctaaaattgagcatgtactatgtgccaggcattaccttgatttctctacatgcactgtctgattaaattctcacaacaaccttagagaggtgggtcttgttactgctactgcctctgctttacagatggaggaaactgaggcaaggagaaattaagtaactcgcccaaggtaaagggtggagcatggatttgaatccacactttctgactacagactctacgatgtgatcttttttttwaaaacagctttattgagatataattcatataccatacaataaaagtrtgcaaccagtggcttttagtactgtatattcacagagttgtgtggccatcaccacaattcattttagaacattttcttcaccccaaaaggaaactgcatacccattagcagtcactcctcatttcccccaaactcccatagtcttagggaaccagtaatctttcagcctctgtggatttgcccctccttgacatttcacataaatttgtcattttatgtcacataatttgtcattttatgtctgatttcttttgcttgttttatatatatatgtgtgtgtgtgtgtgtgtacacacacacacacacacacacacacacacatgttttctggaggcagagtctcactctgtcgcccaggttggagtgcagtggcacaatctgggttcactgcaacctccgcctccccagttcaagtgattatcctgcttcaccctccccagcagctgggattacaagtgccaccacacctggctaattttttgtgtttttagtagagatggggttttaccaggctggtcttgaactcctgaactcaagtgatccacctgcctcgacctcccacagtgctgagattacaggcgtgagccatcgtgcttggccctgcttatattatttttaaggatcatccatgttgtagcatgtgtagatactttggtccaccttattgttgagtaacagttcattgtatggatataccacatttcgtttatccagtcatcagttgatggacatttgggctgtttccacttgtttgctattttaaataatactgttatgaacatttgtatacaagttgttgtgtacacatgtattttcaattttcttgagttctgtgatgtacttgttggttttgtttttctttttttctaccatgtgttcgtaatgctcttctgagaggaagaaaacagactttcttacttgggagtggtcagcttatttgctgctacaatattaatgatggaaaacccttatcaagagtgcttatcctgtgatgggtactgagcaatgctctccagaagcattactttattcagttctcagaattctaatagggtagggatcttgacctcattttgcagataggcaaccaagtcttaccaagtgaactgttccagatcacagagcttggagagtgtgtagggggactgagcttagacccaggtgtgtgtgacggcctccagaactcctgccactgtgttatgtggacaccattgtctacctcccactggaaggtttaccagcctggattttacagagtgctttcatggggtttgcctggtttcaccctgtgaaatgggtgatgatgccatcgtttgatgaagcagcagtggaattgagtgagcgcccaagctcatgggtgaattgaggcgcagtcttggatggaggtctgtttttggagtttaaatttattgctgtttgcatttcaacacaactgctttgaaagctacaggttgcctcaggcaccctgtcatcctttcccaattctttttttttttttttttttggagactgagtttcactctgtcacccaggctggagtgcagtgacackatctcagctcagtgcagcctctgcatcccaggttcaagcgattctcytgcctcagcctccagagtagctgggactacaggcatgtgccactacacccagcgaatttttktattttcagtagagatggggtttcaccatgttggccaggctggtcttgatctcctgacctcaggtcatctgcccgccttggcctcccaaggtgctgggattacaggcgtgagccaccatgcccggccacctttctcaattctttattatctatttaaatgcacgctaaaaaatttaccttaggtaaataaaggagaatgtggttaaaaaacacaactcagtaaacctggcactcttcagtagtaggtctgggatctagttgtgttgattctggtgacctatcacaaacccctctctaagcttattgctttttgctgttaaacttggtcataagcaagctgygtccattgtgaagtgtgtgctgtgagcacatcgcatacactagatttaatcatccactgccggcactcagtgcattgtgaagggagggtaaggagctggtgaaatcacatgtgaaactgaaatacttgtggaataaacgatgaaagggttttgtttgtaaaacaaacgctacagaaagtattgttggatgcggtggcaactagtttattgctaccaagaggggtttaagtttgaatagaccacaggtaagtgccctgaagccaaaaggacttggtttataatgttaaaaattattcgtttttggaagaacaagagttgaactcattttctgccttctctgggaaaaagcatttcctgttttgttattagacagctgtttcaaagttttgtccagtaagcagaattttgactaaattcttcacaatagttaaaaccaatttcctgggggcaggtggggaactataaaagtcctcttttcatctggaggtaggtttacctaccagcctaggccagctagctgtttctttacactatccctttctaaggatttgagttcgtttgtaaaatgacatagcagacacaacataataccagagggggctgaacgtggtggctcacatctgtaatcccagcactttgggaagccaaggcaggaagagtctcaggagttcgagaccagcctgggcaacatagcgagaccttgtctctactaaaattaaaaaaaattagccaggtgtggtggcatgtgcctttaagtcccagctactccggggctgaggcaggaggaccgcttgagcccaggaggttgaggctgcagtgagccctgattgtgccactgcactccagcctgggcgacagaacaagatcctgtctcagacatacacacacacacacgcatgcacgtacgcacgcaccagagggaaacatcatgcagaaaaccattggcccatttattggatggtgtcctcccgaagtttcacatctgctgtttggagctactgagaacctggctgatttcatttagtgctccctctgtcttactttgtctttccttcctttctttcctttctccctcctttccttctttccagctatccagtaacatgtattaaggactcagcatgtggaaagcacgcatgacattgttcatggagacgagggtctggagtcaggcagcagctcggatcccatctctgacagtggtgggctgtgtacactctctggcctcagcttccctatttgtaaaatggggatggtggtgctaactcacagggttgtgggcattcagggaaaawttgtatatttagtactgggtgtggtgccctgccaaatgttaatgacttccttcctctccagttttcacacttaccttgtctcccatttctgaggtgaatatgcattttaaggctcccaagccatagattaagctgttttgacatgtctgtccctgctgagaacgtgaaatcctgtgtgtgttattaaacagtttactgcccggccgcactgagtactcgcaatgtcttgaacacccttgcaggttacccctcctggctctgaacgggtgttccctctatgcagaacgcccacccacctgaccagttagtcatccttcagcatggagctgtgggagagggagcctccctgtggttgggacatacctccctccaccccaggcctctcatcctcagttaacaacccgcctgtgccatcaattacactgttttgtggttttttacacctttttttctagacacaggatctcactgtattgccaaggctggagtgtggtggcatgatcatagctcactgtagcctccaactcctgtgctcaagtgatcctcctgcctcagtgtcctgagcagctaggactataggcacatgccactgcacctggctagattttaacatttttctttttgtagagataggatcttgctttgttgcctagcccagtcttgaactcctgggctcaactgatgctcccacttcagcctcttaaagtgctgggattataggcttgagccaccatgggggctggcctcgcttcacattttatgtagttgctataaccccaccactcaccctgctccagcccatgtcaccttttctctttcctaaatgtactaagcttgtttcccaccccagggcctttgcatttgctgttcccgcagcaatctggagagctgttcagattttcctaggattaattcttcccagtctgccatcccatggcacttattactacctgagatgatgatatatattgactcttgtctgctttctctgctaaaatcctccctgtgaggaaacgagtttggcacatatcccctggcagcatctgacatggcataagtactcagggagtatatgtcgaatgaatgagcctcttggtsggctcttgtacttgcactgaattgtaattgcttgtttacacatcccacctccccactgggctgtgtgacttcctttgcatcataacttggggtgatttgtctttctgtccacagggccaggtgcatggttgcttttgggtctgtaagtatggaagctaggaatctttgagaaggcacatccttaaacccataagctcttctcatggaggtagctgtccamcacaaaatgtccttctgatgccattggtagaacaagtactggttggagcaggctgcagttgttcttacgttctgatggccatcctctactgtcccctcccccttttctttgtcaggtctttgccctgtgctgttctttggaccctgaacaaacccttctccccaccccgctaatcctgtcctttccttcagacctcatctcggtgtccctggctcatggaaaccctccctggccaacctgccttgatcagatgctggctcctgcaaagctycctgagggcagtgctttatttgttttgctcttcatttgttcctcagagcacattgcacttggtcgacatttgttgaatgaatgagtaaagaattagtgatggcatatttacatacccatgttcatggcagcgtttttcactatagycaagaggtgaaagtaacccaagtgtctgttgacagatgagtggataaacaaaatatgtcatatacatacaatggaatattattcagccttagaaagggaggaacttctgacatacgccgccaccacgtagacgaaccttgaggacattatgctatgtgaagtaagccartcacaggaagacaaatcttgtgtgagtccacttatatgatgtgtctaatgtagtcaaattcatagaatcacaaaacagaatggtggttgccaggagctgaggggagagggaaatggggagttgtttgataggcatgagtttcagttttgcaagatgaagagttcttgagttcagtatattctgaagtgtgaatatactactgtcttagtcaattcctactcctgtaactgggaagtttataaaaaacagaaatttatttgcccacagttttggctgggaagttgaagatcaaggcaacagcagatttggcatctggtgagggcagctctctccttccaagatggtgtcttgttgctgtatccttacatgacagaagaggtggaaagcaagggggtttagctcagtccctccagcccttttgtaagagcacaaatcccattcatgaggttggagccctcttaatcacctcctaaaagctcctccccttaacacttactgtattgggtcttaggttccagcacatgagttttggtgggacacatacattcaaaccttagcaggtgctacactgtataccctagaaaaatgagaggttaggagtgccgaccctcacacagtcaaaaatccatgtataacttttgactcccccaaaacttaactaatagcttgctgtttaccagaaaacttaccataacataaacagtcaatgaacgcattttatatgctatatgtattatatactgttttgtcacagtaaagtaagctagggaagagaaaatacatttattactcactaagtggaagtggatagtcctaaaggacttcatcctgattgtcttcatgttgagtaggctgaggaagatgacggtttggtcctgctgtgcccaggcggcagaggcggaagaggtggaggaggtgaaggggaggcaggggaggcaggcacactctgtataacttttattgaaaaaaacccatggataagtggaccagggcagttcaaaccttgctgttcaagggccaactgtacttagaaatggttaagataataaattttaggttatatattcttcagcacaattaaaaaaaagaattagtgctgctagaaactatgacctctggaaatcactgtagaagaatctggaattcttaaattctaggacacctctgacttctgggtagtatgcatgaacttaagggaaagaagtatttatttcctcatgaggataagctcaggtgttttccttaggactgtcagagtgaaggagtgggctggcctgaaccctccccgagttgcctgggttctcaggctcctctgcacctggagctagtgagccagccccctggctggtgtgtacagagcctgcacatgtctgcatagcctaggttgaggtttggacacttgcttagattccaaggtcctcctttgtacccatttatttatataataaataatttattattatttttttgagacggagttcactcttgttgcctaggctggagtgcaatggtgggatcttggctcactgcaggagaagtgattctcctgcctcagtctcctgggtagctggggttacaggcacccgccaacatgcccggattttttgtgtgtgtttttagtagagacgaggtttcaacatgttggccaggctggtcttgaactcctggcctcaggtgatcctcccacctcagcctcccaaagtgctgggattataggcatgagccacggtgcccagcctggattttttttttttttttttttttttgagacagggtctcgctctatggcccaggctggaatgcagtggcccgatctcaggtcactgcaacctccgcctcctgggctcaggtgatcctcctacctcagcctcccaagtatctgggactacaggtgtgcacaaccatgcccagctaatttttctatttttagtagagatggggtttcaccatgttggccaggctggtcttgaacttctggctcaagcgatctgcccatctcagcctcccaaagtgctaggattacaggcgtgagtgactgcgcctggcaaagtgtaggatttgaaacataaacttgtattcatttttgatctcatttaactgtcataacatgaagaactcaactcttagggaaggacacacatttcccagtgcctgtccagcaccagcacgagtgctttgtagagattgcctcatttcttgccgacattgcccttctgaagtgtagatggttttatcgccactgtataaagaagggtatagtgtatccaacgccccacagctaagtgacaggacaaggatctcactccagatcttgtgactttaaaaatcactttcttggctctgcttctccttgtttcctagatggtggccatctcatggtccagatttatatacatctcagcctcaaatcaaatggcacactttacatttgcaygctgtttggccaagcccattggcatataacatacactatggtagcaagaattggccagaggctccccaagaccagacttctgaattcctaaccccagctcccaagccccaggcatcccataaaatctttgctagatgttcagaaacctaaaatttgcttctccacccctcccttctccccaagtggtaaagacaaagaacagacggcagggctctttgttattcttttatctgctaagtttacaaaaaggttagacagtggaactttgctgagcaagcattctgtccctgagttgtctctgagcagcaccaaatgagtcttatcttccccttgttatctccaaggacgtaaaacattttcttttcatgctttttaatttctgtgtaacattagccattcagttgacctgaaacattgctagtttatttctagctggcgtgtgtgtgtktgtatcagagggtctatactgtataaatacttctctaaatattcttttccataatgttgctctaaagtgtctcatttactcaattctgtcaacttagatgctgaatcattttatgtgcttaaaagaaatatctactcggatgctctagttccctggcaagggagagagagggagagaaagaaagctgttgaagtggtgcaaatccaaactgctttcttttttgctcataagtagtgcttttcaaagcgtttggcatccctgccatatggatgtgtcactgtgtgagatgacaacaggatttgctggaaatgtgggccactattgtatccgccttacgtaaccacrtggagtgatggaaatgggtgagcagcccggaatgtaggcggtggcctggcccatgcatctccagagaccatgaagactgctcaagccctacataggatgtggatccaggctgttaaaaagttgaggagatggaaaggccrtgtgagtccctctgcaagctctccccttgttttccccaacctttcttcatgggaaggggagggaagcaaaaccattctcacagtgagtcctttatcctcagattgatttgtgcttctggcatctttcagcaacaaattgtgagattgtaggttgtagtcactggtgggtttttaaaaatacttgtattaattttagcagatctatgtgaaactgatagcctcttactggatctgtggatcaaaggctgctgttttccatgtgctargaatctgtaatggttttgcttcctgggtagagcttaacatactggcttttgtgtttgttcatgtttgagaatttcttgttttgggataaaactttttgctttcttacactgcagaaatctatattcttattatgtctaggcttctaacttagaagaaaaagtgttyttcacatgttcttttttcctcttacagtttgaacatgtgtgagtgtttactttgatggcttgagacttttatgaagcatgtcccttaygtggacagcttkcgattaatctttggttttagctttgacctccatcactgggcagcagcagtctgtggatayagaatctaaaagccgcctgttcagggggactttgggcagtgaacacttcggtatctgttttggggttggcttttaacatgtttctacattctttatgtaaaatatataggatttttacctatctggccaagatttttcaaaggaaaaaagctttataaaaagattwaaaaaaaacacaataagtaactatttgccttagttcctttctcttcttttgtcacacaaaaaccttactgttaatgcattaagttttttgtttatggtagaaaagttagctcacttttaactttccatgaggtcttaagaatgacctgttagatataaagggggttgtcatgaacactacttacgtgaaaagtaaaagtgataaggaaagatgatgaaagcacattgaagatcctcctaatggatagaatgttgacacttggattaaaaaggtgacttggcgttttctgcatacacctccccccacaactccccagacctaacctgcgtccccactctgcccaccgcacctgccttgctttaccctctttgcccctttcaaattactggtaccatccttcaactcgccctccttccagttgaaattattatcccctcttcactttgcaaaattctaactgcattgaaaaatttgctgttaartatactcgtacctcttgggtattagatccttcaccaggagtcagtattcattttggtgttcacccactcatctccctattttttwtttatttatttatttatttaattttttwatttctttttgagacggagtcttgctctgttgcccaggctggagtgcagtggcgygatttcggctcactgcaagctccacctcccgggttcgagccattctcctgcctcagcctcccgagtagctgggactacaggtgcctgccaccacacctggctaattttttgtatttttagtagagatggggtttaaccatgttagtcagtatggtcttgatctcctgacctcgtgatccacccgcctcggcctcccaaagtgctgggattacaggcgcgagccatcgcgcccggcctcatctccctattttttaaacttatgaaatgtttggtaccataaaagaattaaatatctaaatcatggagcataataattaaacaaatgccatgagcccattacacatatctgcagaccatcaccaagacaaaacacgaaggaaatttgtgtacctcccaccatactctgcctcctgcccaggtcacctcatcctgaatgttatgtttttcatttccttgctttttctttatatttccactgcatgcgtgcgtacacacacacacgcccctaaacaatagattaattttgttggcaattttttactatagtgaaaaaygcataccaaaatttactgtctgtaccatttgtraatgtacagttcagtagtgttaagtatattcaagttgttgtaaaacattgttttttgagctatataaaaatggtatcacactctacaaatccttctggggtgtttttttgctcaactttatgtttgagatgcatcccttttgtggtggtctatgtgactggtttgttcgtcttcattgcagtaaaacattgtattttaataatgtatcaatttgtccatcctgcccttgagagatactgggatattttccaagttttggctgttgggaacattgctgctgtgaatactctatacatgtgtccttgtgcatttagtcacacggttctccyggtgcctctgcccaggtagaggaatcactgggtcgtggaatgtgcatacctttaattctgatatmtgcgtgctctttctatgggcctgcctgtaaagctccccctggtgctaagcagctacctgctgtcattcagagagaggtcagatattgctagcaagtctgatctgcgcatagccaagcacaaggtggtgggtgggaccagagcccggtggcctagtttgaatgtcaggaccacagctctcagctaagctgctgcaccctggcagcctgtgcccagggatgttcctagagctgatgttctgaggaataaggatgattatgtggggtgctctgtgtttctgaaaaattatataaatgaggcaggaaagacackcagtagtttgctctttgggtacacttgtagttagttggtaagctgcccaagggctttggcgattttattcactgatgtctctgaagtgccacaaaccacttgcttggcagaaggtggatgcttaataaatgtttttgcataaatgaacaaatgagtgcacagtgaagagttttctgtgagaccttcccaaaaagtcacagttctgtaggctaaatatacatagttatggtgtatttttaatgttcaacagagctactaaaatttatttttgctctagttcccttcctttacaattaagattttctctttatcacttggcttagcagagcatatattctttgaatattatgttaagtagctaatagttaattttattacccgttaaccataggtaagaagaagcctcgcaatctgattggtttcaggcaccaggcaagttaatagcaaggtctgattggtggtggtagtggtaggagattaatcgtctctctgacaaatttaatttaaattacgcttgcaggcatcacaggacacttaaagatggtagcatcccattattgaagggctgtgaatttcaaaagccagattcattctacttgagccacatttaaaaaataaaattttgcaggaactcatttatttggctaaatgataaacaaatttaaatccaaaactttgaagagtttatagttttaaattccaaaatagaaatgtattttaaaagtaatgtactcataaaaatattctctataatagcacagctccttgggatattcaacatttttttggtatgtagcattgcccaatcctggggatgattgtcatagtcccagttagttttttttcctgataattttaaagtaagttttgtggggaggatgtcatgtaattttttttcccccttaattcatggggctataactatatccaaagaagagttggcaaatatatttattttaccacaacttctagattaattcactttgttgaaatttgacagctttaaggtacaagaaggcattgagaagatgagcttggagaagtgggcatgctcataaggtcatttctgggtggtagtggcttagttttactaaggccacatctaaaactgaagttggcaaggagttagtaaggtgttctatggaaatggaaaagggcaaccaattctgacttactgcaggagttcagttgagtgtctgctttctttttcttttctttctttattttttttgagacagagtctcactctggagtgcagtggcgcagtctcagctcattgcaacctccacctcccaggttcaagtgattctcttgcttcagcctcccaagtagctgggactacagatatgcgccaccacgcccggctaattttttgtgtttttggtagagatagggtttcaccatgttggccaggctggtcttgaactcctggccccaagtgatccacctgccttggcctcccaaagtgttgggattataggcgtgaaccatcacgcccgacccggtttctgctttctgtttccatttaagaaaactttttggccgggcgtagtggctcacacctgtaatcccagcgctttgggaggccgaggtgggcggatcatctaaggttgggagtttgagaccagcctgaccagcatggtgaaaccctgtctctactaaaaatacaaaaattagctgggtgtggtggcgcatgcctgtaatcccaactactcgggaggctgaggcaggagaatcgctagaacccaggaggcggaggttgcagtgagcccagatcgtgccattgcactccagcctgggctggagcaaaactccatctcaaaaaaaaaaaacaaaaaaactttttaacaaatatgtacaacttcattaaaatmttggaaaatttattgtgcttccacatattggaaaatgctgttttagacacatgcagaattccagagaggtatggctatagagcacatctagaaagtcagaccatgagcacctgagtttttagttcacccacctcacgtatgctatcaaagaagcagagagccacgaatttgatacaaactttctttaagaaaatttgtaggctgggcacggtgtctcacacctgtaatcccggcattttgggaggctaaggcaggcggaccatttgaggtcaggagtttgagatgagcctggccaacatggtgaaaccgtgtctctaccaaaaatacaaaaaaatgagctgggtgtggtggcgcacaactgtaatcccagctactcgggaggctgaggtatgcgaatcacttgaacccaggaggcagaggttgcagtgaacctagatcacacccctgcattccagcctgggtgacagagtgagaccccgtccccccccccccccccamaaaaaaaaaaaaagtagcagcagtcagtgcttcagttatattaattgaatgatgaatgaatagtgtatccatctctagatgtattaaaaagaaaaaactttgagtgcctactctgtgtgccagacactgttgtagcagataatgggacaaagatgagtaggatacaaaaatttcacctgaaaattcacttttattttttaaaattgaagaacagtcgtcacagtgaacagactttaagtaattggggagttttacataatttagataataatcttttggaatgtttacatatttccttgtgttgatgggccttcatttaatctaaatcttgcacttttgggctgcttgcgtccctggcaccccaggccccattcaccacccagtcccaggattgctggtagcacagatctcttcttctggcctttttcaggtattttgagttcttttttttttttttttttttcttattaaatatacagatggggtctcactatgttgctcaggttggtcgtaaactcctgcactcaactgatcaccccgcctcagcctcctgagtagctgggactatggcatgtgccaccatgcctggctaactttaaaaattttttgtagagatggggtctcactatgttgcacaggctgsccttgaactcctaggctcaagcgatcctctcgcttcagcctgagtgctggaaatacrgacgtgagccactgcacccagccctcttctaatttcttaaaacataaacacatagtccgggtggcttggtggctcatgcctgtaatcccagcactttgggaggccgaggcaggtggatcacraggtcaggagtttgagaccagcctgatcaacatggtgaagccccatctctactaaaatacaaaaattagccgggcgtggtagtgcgcacctgtaatcctagctaccyargagactgagtcaggagaatcgcttgaacctgggaggcggaggttgcagtgagtgaagatcacgccactgtactccagcctgggcgacagaacgagactccgtctcaaacaaaacaaaacaaaacaaaaaaccaacatatacacatattatagatactccatttttgtctgtggctggtatttcaaatatttaaagtctttgattcttcagtttatgtttcttttacctctcactcatggtgatgtgcatgtttaaattgtgggctcatttccttggatacatactatctggggaatctttgagggctgtgtttgagtgtgatctctggagaggattcgcatctgcctctgtgtacttggtggtatggccagtgcagagccccagtaggcatgagtgtttggcagggtgtggtcacgtctgtaatatgaacgcccaaacctgtgtgaatacaggtctgttgatagaaattctccagggttttatttttagttatttccactctacccatagccaaggatgagacagtcactgcatctccatctgtgtgctggtatttttttcccctaatagatccacccagacctgatctccyaccctgtttggatccccagcctcctctaaatgcctgcttcagtgctggcttatctctgtggttctgagtgttcttggcatttctagctttctcacaggcagcctgcatttaatggattattatttttaaaatgataccaccagttgtagttttttctggatacctactttggaatattgtcagagatggaagtcccagtggtctatttatgaagacattcatctttcatactcagtgatacagatggagaaaaagccgaaagatcccgcagatcacccaattgggcataccctatgataaggctaaggatatttttagacataaacatgcagaaaacttgcctacgaggtcacctttgacaggaagagggggagaatgattttaaaaaaagaatctatttgaaactagatatttttaaaggggttttatgatgataatgttttggaatagtgataataaaaggactcagcacttaacattccattctttttagggtctgtctctcactatgtatttcacttacctttcaagtattgtttctagtttcatttcattgaaggagagtgtgtttgaaaataggtagcataatgaacagatattaactcttttttggtatagaaagtgtgagctggactttatgtcgaggcattttgaatgataattttatttctagcattgaaaaggttgtggttttcatcagattggttttgttcttttaaaacaggccccaggcatggaagagctgatatgggaacagtacactgtgaccctacaaaaggtgagttctgcacatttcatatattctacagtcatgttcttgattttacggatcatggatcttatttattttcacctacacacagttttggcttttttttycccttgaggtacataatgtattatagatactaactggcaataattgctatgttaacaaagatttgcatgctattgtattttttgattaaggactgtttagtatggaacattttagaggttatttagtgtatactcttatctccagctagaacaggttatgaaagagagaaaagaaagggaagaatgaaaatgacctgtactgtttaaggatgtggagggagctttttacaacttctgtaattttaattatgacatattatacataccttatgtattaaggtataatacataaggtataataccttatgtattaaggtataattttaattatgacatattatacatacataactcttaaaaagtgtagcatccaagagactgtaagtcatttgtgtgaggctgagctggagaactgcactcgtggttctgcatttttttttttttttttttttttttgagacggaattgcactcttgtygcccaggctggagtacggtggtgcaatttcggctcagcgcaacctccgcctcccgggttcaagcaattttcctgcctcagcctcccaagtagctgggattacaggcgcctatcaccamgcccggctaattttgtatttttaatagagacggggtttctccatgttggtcaggctggtctcgaactcctgacctcaggtgatccacccaccttggcccgcaaagtgctgggttgcaggcgtgagccaccgtgcccagacggttccgcatttttattccgtcaagctgccttccggtcatcatcactgtgattttcctggtttttctgcagggtttcttcttctggctctgaattcctccaaggtctgacatctcctagagggaccataagttcctcataggaagagttttcctttgaccctcagaactgtgagcttcaagctttgtcttctatgaaaattaaagacattcccgaatttaatgtttrttgaattaatccaggtagaaaaaaatgtctctgggccagtgcccaggtacccagacttccagatcagtaatcacaatttcctcatttgaggggttttgtctgcttaggtcttatttttcaactttcctcgtctttctgactctcctctgccctttccctgagcatttcatgcattccttgagttgtggacccaaaattggcagaggtcagagatttttttaggcttggcatagaggatggagctgcctctgtctaaaaccaggtgccggctggtggtgctgccaaattcaaagccatgtgattaatagacaacacccccaacctgttttgagtttgtaattgtgtataatcagtcagcatagtgggcctcacgtgggaaactttccttggaaaggaagattttcttttagtctcggagtaaatttttatataatcgaacccagatttaagaatatacagtcaaatatactcatattatctggatgaaactgggcttagatacatatatatatttttgaaatggagtctcattcagttgcccaggctggagtgtaattgcatgatctcagctcactgcaaccttcacctcctaggttcaagtgattttcctgctccagcctcctaagtagctgggattacaggggtgtgccaccacacctggctaatttttgtatttttagtagagatggggttttgccatgttggccaggctgatctcgaactcctggactcaagcaattcacccgccttggcctcccgaagtgctgggattacaggtgtgagccaccgcacctggcccagacttagctttttaaaacacaaatgaattaggattatgtattatctatgctcaccattgtgcattgctagactgatcatggatgtaataaatcttatttccgatcttccatgcatgaagaaaagggtttagtgctttgcttttcatgagatctcaacacatattttacattcaaattttatctttaaaatccagttacgggccgggcgcagtagctcacgcctgtaatccccacactttgggaggcagagacaggtggatcacaaggtcaggagatcgagaccatcctggccaacatggtgaaaccctccctgtctctctactaaaaatacaaaaattagctgggtgtggtggcacatgcctgtagtcccagctactcaggaggctgaggcaggagaatcacttgaacctaggaggcaggggttgcagtgagccagcaccactgcactccagcctggcaacagagcaagactccatctcaaaaaaaaaaaaaacaaacaaatccatttacttctttttcactgtatgttgaaatgaaactaccaacacatctactttgaagttaaaggtatactttaaaaatataattttaggcagacataagaaagaacgaaatatgtcctttgcagcaacacgaatgtacctggaggccattatcctaagcaaattaatgctgaaacagaaaaccaaatactgcatgttctcacttagaagtgggagctaaacattgggtacacacagacacaaggacaggaacagtaaacactgggaattccaaaagtacggagggagggagaggagcaaagtttgaaaaactacttcttgggtactgtgttcggtacttgagtgacaggatcattagaagcccaaacctcagcatcagacaatacmcatatataacaaacctgcacatgtactcctgaatcwaaaataaaaataaaattaaaaaggattggctagcactgggaagagcagtcttttcccgcccagctagaaagttgtggtkttttttttttgttttttagagacttctccatttgcccaatttaaagtgcaaaagctgccttggcttgttgaagccttgacctcacaggctcaggtgattctcccacctcagcctcccaagtatctgggactatggatgtgcaycaccatgaccagctatttttttctatttctagtaaagacagggttttgccatgttgtccaggctggtcttgagctgctggactcaagcaatctgcctgcattggcctcccaaagtgctgggattatagacatgagccatgagcctaggcagaaggtttttttttttttaatatgtcaaaacatcacaatatacagaagaattaaaaatatttacagtacaggccaggcacaatggctgtctgttgtaatcccagtgctttgggaggttgagacaggaggctcatttgagcccagaaatttgaggctgtagtgagtagtgatcacaccgctgcactccagcctagcaacagatcaaaactctgtctcttaaaaaacaaatacaataaggaaatctgaaaattaaaaaatacagttttagtacaggttcagtttttactgaagttgttccagctcgggccagcatgatgcaaagaggtacaactggtgcttcaaacagtacgtccctatttggactgaagacattgtttcctatcccggccagcttctagtgataactccagtctgcactatcaatmttttccagcctctacaggctgtttctttcagataaggaatttccctttataaacctgtcagctgacaatgactatgctttgttttgtttctcatttgtttctgtaagcccatctgttcctgaacagtctctggtkattgatttgacctttattttattgagtgcttgtaataaatcctgaaagccacttattgaaggatttttaatatttctcctctctgatgtacaggattccaaaagaggatttggaattgcagtgtccggaggcagagacaacccccactttgaaaatggagaaacgtcaattgtcatttctgatgtgctcccgggtgggcctgctgatgggctgctccagtgagtgtcctccctcgcyccgcagcccctaccagccctactggttggccctagacggggtattttggttggtgtccactttatttaaaaaaaagaaaaaaataacaaacttttatataatatttgaaaagtcttcaagctggaatggaagccataacacaccatgtttgaataatgcccaaaccttgggaacaccccagctttggagcgaggagggcagttgtttccgtaagaagatagttccaaacatccctcctaggtttaggaatcatttctgaacatggagttttaaattggcatgcttctcaaccccgatgcttaaccaacactgtttatgtttgttttaatttatattctttaagaatttaatgaggagactttggtttattgattatcttatttgtaagagtgatgtggaagttgggacaatttactataggaaaaccacaagttttccaactgccagctttctgacctgaagaagtaacaccattttattttaatttttaataaattttttcttttctttttttyttttttttcagacagagtcttgctctgtcacccagtctggattgcagtggtgcgatctcagctcactgcaaccatcaccttccgagttcaagcaattctcttctgcctcagccacctgagtagctgggattacaggtgcctgccaccactcccagctaatttttgtatttttagtagagacgggttttcgccatgttggctaggctggtgtcaaactcctgacctgaagtgatctgcccacctcggcctcccaaagtgctgggattacaggcatgagccaccatacccagctggtaacaccattttacatgatacatgcctgattcccacaggataacttctcaggacgaagtctaaagttaactgtatggctgcattggataaatagctcaaaagtttaggttttgttggtgtttaaagcctctgtgaactaagcacagtggctcacgcctataatcctgcactttgggaggctgaggtggcaggaacgcttgaggccaggtgttcaagatcagcctgggcaacctagtgagaccctgttgggatggcatgtacctactcgggtcccagctacttgggaggctaaggtgagagaatcctttgagctcgggaagttgaggttgcggtgagctatcatcagtcacactactgcagtccttcctgggtgagagagggaaaccatgcctcttaaaaaataaaattatagttaagaaagtctctatagttttatcaaagttagtagtctttcatatggagaaatgcaaaattttaaagtaatatttgggatgaactggaacaataggattctgtgatctcaaaatttcttaagaatccaaggcaagcccttttcctgcacaaaagcacaaatggatatacacctacttggaaggagtgtttttagacttttctgaagcccaccgtgcacctcaggcaataggggactgatagagaaattccttttgtgtccagacctcaccgtcatcaagtacctcctggtgtgatgctgtggtttggggagatcaggcctctctcttcccagatgatttccatttagacactcagaattgagctgtatggcccccagttcctttctttggaagatctcaggccaagttgactgggccttgggcgccactagacactgagccctttagaaagcctttcaggtctatttgctgcttctatttgttcctaaataaataatttacaatgaatagatgggagtttttcatgacccatttttatttcttgtttacagagaaaatgacagagtggtcatggtcaatggcacccccatggaggatgtgcttcattcgtttgcagttcagcagctcagaaaaagtgggaaggtcgctgctattgtaagtactggktttgctttcagcttgccttaatagcattttggttttttgcccagaagaaaattaccccttgcttttaagcatttgacagaattacataacctagggaccgctgttcttggatcctcagtacttttggaggggtgtgaagatatgtgtaagttatcttcctacttttccttgtgtcttctcctgaggccagtgattctctgatctgagttagtttgccttaggaaccaagttaggcaattattccctaagagaattagctagattcagaatactggtaaaatagtattaatttagaaaaaaactttcagctcaaaaactcacttgtaaaggcccaagcaaggtatattatatcttcatagactaagagtttcattagaagactgtctataatcttcattcatctattccttcattcattcactggctgagaatcaactgtgagctggatgccattaggccctggggccaatctgtgttgcaagatgtgttcactccagtggggcaggtagacacacacagtgagaatggtaataaagtgtgcttaggggcaatgctagtaggcatatacccacatatatggttgtgtgtgtgtgtgtgtattttttttttttttttgagacagagttttgctcttgttgcccaggctggagtgcaatggcacgatcttggctgaccacaatctccgcctcctgggttcaagcgattctcctgcctcagcctcccgagtagctgggattacaggcatgcaccaccacacctgtctaattttgtatttttagtagagacggggtttcaccatgttggtcaggctggtcccgaactcccaacttcaggtgatccgccagccttggcctcccaaagtgctgggattacaggcgtgagccacctcacccggccacatatatggtatttaatgtttttcaactttatattatgaagattttcaaagaaaaaggaaagttgaaagatcagtgtaataaacatttatcttctaaaatattactattctgccatctttacttggtctctgtatgtatataaacactcatgtctttctgggcaaccwtgcgaaggaaagttacagacatgacagttcatttctacttacttcacatgcatttcctatgaatgaggacattcatctatataatactattatccgatctaagaaaagtaataattttacagtattatctaaaatccagtccatatctcaagatgtctttttcatttttagagatgggatcttgttgtgtttcccagrctgatcttgatctcctgggttcaagcgatccttccacctcagcctcccmaggtgctgggattacaggtgtgagccaccatacgcagctctcaaaatgtctttgatatatgttttcttccctatccaggatccaaagttcactcattgcatttaatcattatctctttagttccttttaatctagaagggttcctctttccccttgcccctctacccsaccccccactttaaaaatggcattgggccaggttcagtggttcacgccagcactttgggagatggaggcaggcagatcacctgaggtcaggagttcgagaccagcctggccaacatggtgaaaccccgtctctactaaaaatacaaaaattagccaggcatggtggtgtgcgcctgtaatcccagctatcgggagggtgaggcacgagaatcgcttgaacctgggaggcggaggttgcagtgagctgagtacagtccagcctgggcaacagagcgagactttgtcttaataataaatwaaataaataaataaataaggcattgacttttcttccttaaaattttaaaaatttatgcataatgcatagttatagggtatgtgtgattaatttaatacattaatatgatttgtaaaattcagatgagattgggcacgttcaggatggtatggctgtagacatgatttgtaaaattcaaatcagtgtatttggaatatccatcaccttaaataattgtcttttctttatggtagaaacgttcagattattttcttccagctattttggaatgtacagtagattcctgtaagctgtagtcaccctaccgatctaacattaggtcttatttcttctatcagaccatatatttgtacccatcaatcaacttctctttatccgcctttgcccccttggcagctatgtatagaatgtcacactttctggatttttgttttttgagttttataacttagtgatttgggcctctgagacttttcaaacttgagtagaagcagattttggagatactattttattattaccttaattcaaggccctgtactcagagcttcacggtcattgtcctattctaaccctgtgagatttttattgtccgtttccggatgaggaacctgaaccttagtgagtcggcagggatacggttttcctgaaaccagaaccagggctcttaaccactgccttctccacattcagttgtgattgtcctgcgtccacactgagtttgttttgacaacaggtggtcaagaggccccggaaggtccaggtggccgcacttcaggccagccctcccctggatcaggatgaccgggcttttgaggtgatggacgagtttgatggcagaagtttccggagtggctacagcgagaggagccggctgaacagccatggggggcgcagccgcagctgggaggacagcccggaaagggggcgtccccatgagcgggcccggagccgggagcgggacctcagccgggaccggagccgtggccggagcctggagcggggcctggaccaagaccatgcgcgcacccgagaccgcagccgtggccggagcctggagcggggcctggaccacgactttgggccatcccgggaccgggaccgtgaccgcagccgcggccggagcattgaccaggactacgagcgagcctatcaccgggcctacgacccagactacgagcgggcctacagcccggagtacaggcgcggggcccgccacgatgcccgctctcggggaccccgaagccgcagccgcgagcacccgcactcacggagccccagccccgagcctagggggcggccggggcccatcggggtcctcctgatgaaaagcagagcgaacgaaggtaggcatgcttgatgtgggaagaaaagcactgttgtgatatgaataacctttgttttcttaatttttttttttcccccgaaagtgttgctctgtcatccaggctggagggaagtggcgtgatctcggctcactgcaacctccacctcccgggttcaagtgattctcctgcctcagcctcctgagtagctgggtctacaggcacccgccaccacgcccagctaattttatgtttttagtggagacaggtttcaacatgttggccaggctggacttgaactcctgacttgaggtgatccgtccacctgaatctctcacagtgctgggattacaggcatgagccaccacgcctggccaggaatagctactttttttttttttttttttgagacggagtcttgagtcttgttctgttgcccaggctggagtgcagtggcgtaatctgggctcactgcaacctccgcctcccaggttcaagcagttttcctgcctcagcctccctagtagctgggatcacaggcgtgcaccaccatgcctggctgatttttttatttttagtagagacggggtttcaccgtgttggccaggctggtcttgaacttctgacctcaggtgatctgcccactgcagcctcccaaagtgctgggattataggcatgagccactgcacctggccagctaacttttttttttttttgagacagagtctcactgtgtcaccctggctggagagtgcagtggcatgatctcggctcactgcaacctctgcctcctgggttcaagtgattctcctgcctcagtctccgaagtaggtgggattataggtgcctgccaccacgcccggctaatttttgtattttcagtagagacaggttggccaggctggtctcaaactcctgacctcaggtgatctgcccaccttggcctcccaaagtgctgggattacaggtgtgagccaccgcatctggccgagctatctcttaattgcacttaaccagcattgtacccagcattgacctaaatgcctaacaccaattcgttcgtttaatcctcagaactacctcatgagggaggactcttgtttctccattttatagacaaggaaactgaggcacaaaaggttcattgatatacacaaagttgtgtcatcattggaagagccaggcttcagaattttggctttaaactaggagaccagtggttctcaaagcagtgcatcacctgggcaccccttagaaatgcagactctcaggcccaacccagtcccaccagctcagaaaccatggggtggagccgggtgcagtggctcacacctgtaatcccagcactatgggaggccgaggtgggcggatgacttgaggtcaggagttggagaccagcctggccaacatgatgaaaccccatctctactaaaaatgcaaaaattaggtgggcgtggtggtgggtgcctgtaatccccacttctctggaggctgaggcaggagaatagcttgaaccccaaggggcagaggttgcagtagcagagatcatgtcactgcactccagcctgggtgacagagcgagactctgtcttgaaaaaaaaaaaaaaaaaaaaaaagaaaccatggggtgggccctcagagtctctatgttaataagctctcctagtggccttgctgcatctcaagtggaaaaccacagtggaggacagtactccgcctaatcattgttgagtttctgctctatgcaagggctatgttgaatattcttttacgtagtcctcacaagaaccttgtgtgttaggaggcttcgtttckgttttgttttgttttgttttgttttgttttgagacggagtctcgctctttcgcccagggtggagtgcagtggcgcgatctcggctcactgcaggctccatctcccgggttcacaccattctcctgcctcagcctcccaagtagctgggactgtaggcgcccgccaccacacccggctaattttttgtgttttaagtagagacggggtttcaccgtgttagccaggatggtctcgatctcctgacctcatgatcygcccacctcagcctcccgaagtgctgggattacaggcgtgagcccccatgcttggccaatgagtgcattttttaagaggattgaggaattgttgaaaaatgccagagagatgttatcactcaagcttgtctcactcagccttctgttctgggctgtgaggctgtttgaccactaggggctcgccatccatgaaagtagctttgcccttcccttattccattcttgactatcagcttcctaaaggactagggcatgggccacaacacttctaatctttgtggtaagatctggctgacaagtttaccgtaaatcatttaaaacttattttaaaattgacttcatacctttcctgaattgtggaaagttactttgttttgtaattataagatttttagtttgaacaataataaaaaattttgtgcctgttttaaaacctgctctgttgtggtagtttcctaaaatgtgaacagttattcttaaaataatgtatttttacaagtttattaagtaaaaccagaakagtcttaagtagcattgaaagtatttaaaaatatgcataacttagtaattacaatgtttttgtttttgatagcaattcagagtccataaactcccaaagctatgctggttttagttgaatgctttattaattactttgcctgacttctttaccccttttcttcacccactgaattcctttcaatgccaagcttcatataatctaaaatgctagattttttgcagtgccttcctgtagacagcctcattgtcagcagaacatgcctattaaggtgtgctgaattgtttttttttctccccaacattttatttgaaaagtgttaatttggccaggcgcagtggctcacacctgtaatcctagcactttgggaggccgaggcgggtggatcacctgaggtcaggagttcgagactagcctggcctacatggtgaaaccctgtctctactaaaatacaacaattagctgggcatggtggtgggcacctgtaatcccagctacttgagaggctgaggcaggagaatcacttgaacctgggaggcagaggttgcagtgagctgagatcatgcccctgcactccagcctgggtgacaaagcaagattctgtctcaaaaaaagaaagaaaaagaaaatgttaattttatagcaaataaacatataaccttcatctagttttaccagttgttaacattttgccacactttctttttcctcctcctttttttttctttccttctactccatcacccttcctgttacctctctcagtgggttttttggtactatttaagtaagttgcaggcaactcaccattacccataaatatttcagaggtatcttccaaagataagaacattctcctacatcagtcaccgtaataccattataacacttaagaagattaacattaatatccctttcatatattatagttcattttcagattgctccaaatgatgtaactcattcttcccccaccctccactggatcagggacctatggtagttcatgcattgcatttggtttttatgtaacttttaatctggaacagtttctctaccttttttgttttttatggcattgacttttttgaagagttcaggccagtcatcttacagaatttcccatatacaaaattaactttttaatacatattttaaaatagtcctataaaccagactaagttttttgaacaaattgataacatacgtgtatgtttatgtgtttgtctcctagagtatggtctccggcttgggagtcagatcttcgtaaaggaaatgacccgaacgggtctggcaactaaagatggcaaccttcacgaaggagacataattctcaaggtgggtagatgggggcagagaacggtagtgtgcatactgccgttcatcgcctgcatgtccacattcagcaccmacacagtgagacttagatccagtgagagtcagtggtaagacagaggtggcaagagcagcataatgagacgatttttatcagwaaaaccagacaytgagggtcgtaacagtttaatgtcagtttagaaaacaaaaamaaaaaaactccatgaatattttcttctttcctgtttaaagtttagatccctattccctaaactaaggaaagatgagaaggaaagttggtgatatatgaatgctgaatatttaataggtcttgtaaacctctccagtcaggaaacacgttccagtagtaaaccaaaccgttgtcttgagcttggaagttaaataaattagcagagtaacttacacctgtatttgggatccaggcatgcaggattatatttaatttaaacgacaattcatttttattgagtcatcctaaagccaatatctgtttgaatatctgagcaaagcctttacatttttagaaggggaaaatatgaattttctactgtgaataattttattgcatttaacattaccattttttataaacacagatcaatgggactgtaactgagaacatgtctttaacggatgctcgaaaattgatagaaaagtcaagaggaaaactacagctrgtggtgttgagagacagccagcagaccctcatcaacatcccgtcattaaatgacagtgactcagaaatagaaggtaaaggaagaggaggctgtgagcttagctggaagtaaggaaggctgttgcttccccattcttctatttagtgtagctatccagctggaagttaaatttctaaggaaagaccccttgaaaccttaatctccaaaggtcactggttggttgttatttgcttattaaagtgcctattgaaattaggtttccaatacaaaattctggtgcatttgcgaactctcagagaactattaattaggcaattgaaagcaaaacttgtcagtaaaaaaatgtgtgtttgagtggttcaaagaactaaccatatcatttatatatttgctaattgcttattgtttttttttgagacagagtttccctctgttgcccaagctggagtgcagtggtacaatcttggctcactgcaacctctgcctcccaggttcaagtgatccttctgcctcagcctcctgagtagctgggattatgggcgcctgccaccacacctggctaatttttgtatttttagtagagacggggtttcaccatgttggccaggctggtcttgaactcctgacctcgtgatctgcccgtcttgtcctcccaaagtgctgggattacaggcgtgagccaccaggcccagccttaattgctcattctttaaaagtggctattaatatctctaatagagaagacaatttggaggatagctaaaacaagtagatgctcaaaaagaatcaaaatggctaatattgtggcattcattaattagcagtctgcatcacctcttcccttttaaagagctatattcattatytgaatatgaattatacataggataacattttaaccttgtaaaaattgccaataaaaatagttaatcacagtatattctactgaaccatctactgttgcttttatgcagagaagtttagaaaatattaagttacgaagttgtaaagcagacttttgttgattttttttttaaaggaatttctttgtaaaaccttaaaacttaattcactttccagtgtatcagaagttgttgatgactgttacgggtgcagtgcaggaaaacaaaaggagcatgagaaataatgccagcatgttagggggtttgcrgtttatttccttgctactcagtatgtggtcctcatcccccaacccctgaccccaatagcatctgcataatcaggtaactggatagaattgcagaatctcagtctcccctcaactgccccacaacaactgcatcctaacaagatttgtatgcaccttaaagtttgagaagcattgggctgcttgggaagaattagtgtatacatctatgatccaataatagaattttgactcttctgtagcagctttgatggaaaatgagacaaaagagaaatacacaattctaaatttgccttcccctttattaattaatgcctttcccttaaaacgagcaagtttttctccaggggaggactattagactaatagcacatttcctgcctacctcgtttccatttcccgtgtttcctacccagagaatagtgcaatttctctgggtaggagaatattttaaatattttatttaaaagtcttttcttatttttgaaactagatatttcagaaatagagtcaaaccgatcattttctccagaggagagacgtcatcagtattctgattatgattatcattcctcaagtgagaagctgaaggaaaggccaaggtaagatgacatgaatattctcttgtacatgtcattgtgaatgtacacacatatgtatttatgaaactgttatctcttgagacatttacgtatgacatgtgattcagttccagagaggacacgccgagcagattgtcyaggatgggtgcgacacccactccctttaagtccacaggggatattgcaggcacagttgtcccagagaccaacaaggaacccagataccaagaggamcccccaggtgagccattaagaccactcagtttcaacagttgtgttcagaagtgtgtgctcacacagccataacaaagagtgaaatcatgtcctttgcagccacgtggatgcagctggaggccattatcctaagctaattaacatggtaacagaaaaccacacagcacatgttctgacttttaagtgggagctaaacattgggtacaaatggacatagaggtggcagtaacagaaactggggacaactagaggggaaactactaaaggaggagatggaaagggttgaaaaactattaggtatcatgctcacaccttggtgacaggatcagttgtaccccaaacctcagcatcatgcagtatatgcatgtaacagacttggacgtgcacccactgaacctaaaataaaagttgaaattatacacatatatgtaaatacatagatatgtatacatatatgtatgcatgtgtgtatatatgtatamagatatgtatgtacatgtatatgtgtatgtatagataagtgtgtacttaattccagagggtggctgaaagggaagaaggaaataaaaaattatatatggaagaggccttcctttctctcttttgacgttgacaaaatataaaataatagccttgtctaaatgccattagaattggtcacactttgtcatatttgatgagttgaggtcattgttttctcccatccttgatcctgacctcttcccccaacccttccccaccaccctacaattatcatcataattttatattcataaatatttaaggggaaacagtatcattattgtatgttttttaagttgttaaaaattctatgttcttgtgcatgtgattgtacaccttgcattttagaggttcattttttatctcttgtattttgagaaaccattggcacctgctaatacttcagagttaaacggcactttagagacttctttttgtttgtggtgacatatgtggcatagacttacattttttgtggattttgtgatttttctatttagaaacgcactcttgttagtccagattgataacagtagatgtttcttaacctacagctcctcaaccaaaagcagccccgaraacttttcttcgtcctagtcctgaagatgaagcaatatatgggtatgtatttccgtctctctttgttttcccttcttccttacagctctgtctctgtaactgaaatccagaagagtggtggtttttgcctagatggtgattttgtacactgtcagccacctgtaaccaatccccattggtagtgcttatgagaaagaggaatgatttgtgggaacagcaaaatgcggaagtgggtgaactttgtgatgttaatgttgtctgtttacctacctatctagctacctttccagagtgttactctgaatatttgcgtttgtcagataaattcactcccaaataggtgaagtatttattgctaaactacggtgccctgtggtgactgcactgatgtgatggtcccagtgtcagtccgtgtgggggagggaggaggagtgctgctgcgctctgcacttgataatcagaacccctagttcagcagggttcaagggcagcagcctcctggattaggattctgcttctttgtacccagactgtgtctttatttgacaagaatgcagtgcaagcgggccttcctttggaagaattttagccctaactctgccctttatttgctttctcatcttgaaagagttgctgtaaagattctataattctatgtcttcaccagtaaccagggacctactgatactcatctcatggtcccaagaaagataaaattgtaggatatatgagatagatgagaaaaatgagagggctttgtaaactataaatcactctgtagctagaagaaattaaatctctcatttgctaatgttgttctcccttttaaaaaatatctcccatctttcctttctgaaacggaacctattgyagccctaataccaaaatggtaaggttcaagaagggagacagcgtgggcctccggttggctggtggcaatgatgtcgggatatttgttgctggcattcaagaagggacctcggcggagcaggagggccttcaagaaggagaccagattctgaaggtaagaacagcccagctctgtttctagaagttacttgtaaggagtgcacttttctgggtgttctttctgtaagggaagacaaaatggttcagctggtgaaatagagcagctgcaagtttgttgatgcccagcattgaagtctctgtattcctcaaatgcgtcctgtcttctcagtcttggracccagaactcatccatgtatctgtgagaactgatagtgtttctgcccttgccaagattttattagtctgattaatgtgaaaatattgagactctaagtaagcacttacaggaaagatttttcaaaaagatttttctgatttttgcttttttcactgtgttccccctgcctgccatctttcttaaggcagtgtcctgaaattgaacaaaggtgagtggttggcatcagactgggtgattggaatttcgtcccagcctctgattagttctgtgaccctggttcaccctgagactcaggtttctgtatctgtttaatggggatgagaatacctgcctcgcagggactgtgggaagattagaccaggtaacacttacaaggcacctagcagagttccctggcacagaataggaaggtgagtgtccattcttttttcttattggaagataacaaatagctgctactcaatgttatttacatctaaaattgtccaagaaagggaattcctggttaatcaaatattgatacttttaaaattactatgtgtttgtataatctgttaaggaattaaaaaataactcaacttgacatttgtgtatgtgtgtgtgtgtgtgtagcattctttgttgacttcggaataaatttcaagaacatcaagtatctccttacaataaaaatatagagtactagggaactgttttttttgtttttttttgtttttgacagtctcgctctgtcacccaggctggagtgcagtggtgctatctcagatcaccgcaacctccgcctcctgggttcaagcaattcttagtcctcagcctccccagtagctgggattacaggtgaactcttaatttttgtctttttagtagagacagggtttcatcatgttgcccaggctggtctcgagctcctgagctcaagcaatccacatgccttggcctcccaaagtgctgggattacaggcgtgagccactgcgcccggctgggaactgtcttcattggaatttcttcctgcttctgcaaacttgcagttcatatatatgaggttttttttttcttgttaatgttagtaaaaaatccatatgtagtaaactaaggggtctggtaggggcttctaggctccaaggagaggggagaaaaaagttctagaattctcaaggaagcaagcagcagcaaagtacaaaagcaggtggcccccttccttcttggccccgttgcagtatttcagatttcatttctggagcagatgaagggcaaaccttgatcatgagctttgcaaaagcttttcagtgaaattctagaccctccttggccctggtcaggatctagaagactatgtacctgcacgaacctcatgttgccttatgatcctaggaaataccactcaccaaatgttactgatgaaaacccatctgagtgccagctcataccagtttactctttgcatatatgcygatgaaggaaaaaggcattttttctaactattgtgaggccataggatgatagmtagaaatgtggagcttttgctcattaaggttcaatgataaaatattttcgtatgttcaggggctgggagattttctaaatttccgtgaagaaaagtagtgaattcacctagaggcttggcagtcagacctctctgtaagttgttgttagatggggagagtcgctttggtggataaaaagtcatggtatcagcatttatacttaaggtgttttgtttcttgttatcaccctggcaacacggaaggaactctgggaactggcttcttttgctgtcatcccatatggaggtcaggcaataggtggtcctcatttcttgggtgcgaataaattttctgttgactacaaaagaagctttcmgttctagaaaggggtgaaaaagattgagtttgcctacgagggcggagaagctgctgcacaatactaagctgtggctgatacaggatcctcttcaggctcacagcagacacggctagaccctgtagactactaaatagctaatcaaagaggatatttattggaaaggactgttcaatgtaaccttcaagtagaaaagtgctgccctagccttttttcactttaatttgtttcaatgctccttttcatggccaaattgaatatataaagtgagccttatacacatgctaatcactttattctgttgtggggtttttaagtgtggctctttgttttgcaaaggtgacagcctaatgtgtggaatgaagacgtgagccagatatgtatattccttatcaataatggagatatatgtgcttttgctcattcctgcttggctgaactacctctttgcttgttatttatctgatagagttgtcatttctctttcagaaacttttatgggatggaaaagagaaaaaagacttctaagtttggttattaaccatgtagatttttaaaatataactaccatgtgtgctttaattttgaccattatagtttttggctatcgaagactgtgatcgagactgatctaaggttaatctcttgtggccagagagatggactgaaggactcccaaggtcctcccacagccttgtggccctgtcttatttaagtaaacaaatacaagcatgtatagtacatgtgaaaatatacatatggctatatgtagatacagatgtagataaacaaatggcacaagaaaggataccaaaatgggatgattcctaattgggggacagagaggtacaaatgacagtaccttaaatactaaatactgtttcaaaggaaaaattaactcaattgctttagcacatcactttattttaaaagcaccaaattagttttagtctaatgccgactttcacttaatcataaattttggccttaattaaggcccacccaactaaggataagtttcttctttaataaagcattactcttgtgattaaaaggattctgtaattgtcaatgactgaagaaaatatttcataggaattttatatctttatttctacaaaatattattaacatatcaggtactttaatatggtttttgcattttacttatttataattctgttttaaaataggctgaaagatacagaactatgggccaggcgtggtggctcacgcatgtaatcccagcactttgggaggcctaggtgggcggatcacctgaggtcaagagttcgagaccagcctggccaacatggtgaaaccttgtctctactgaaaatacaaaaaaaattagctgggtgtggtggcacatgcctgtagtcgcagctactcagggaggctgaggcaaaagaattgcttgaacccaggaggcggaggttgcagtgagccaagatcgcgccattgcactccagcctgggcgacagagggagactacatctcaaaaaaaaaaaccacatagcactatgatttcaaaatgtcttgttctttgtgctacatttcaattttacttgctttgtaactgtaaggctgatgctctttaatttgatacatacctttcaattttataaacacatgttaaacacttttaggtgatagaagctataggagaagggtagaattggtcagagtctttatttgcacacttttatttgaaccagtttaaaattagtgtaaatgctgggccagcatgctcagttgtcacagaccccaacactccccatgcttcatacttgtgtattaccttcttggccacctctgtgagagactcacagaagggagatggatagaaacaaccacaagaaattctattgtgatctggtgacagatccttgcttcaatggcttaacctctaaggtgcggttggcagtatggggaggcaggaaggtatagtgtgcaggcccatagcaaggtgctgggcgsgaggacttgaatagtgacattaaggactcatttgcatcttggctttgctctggacaggccctgatgaaaacaaacaaaagggtcagtggcatcttactataaacttctctgttttttctttctttctttctttctttctttcttttttttttttttctttttstgtttttccttcctaataggtgaacacacaggatttcagaggattagtgcgggaggatgccgttctctacctgttagaaatccctaaaggtgaaatggtgaccattttagctcagagccgagccgatggtgagcaaatttggtcatttagtttagttggggtgggggtggggagtgggaaggatgagagaggtgtcttggtaccasaataggcaaatctgggtattaaaaaattgagatggatctcaacacctagtccttgggccctaggtgtgtgaagaaaatgtgagtgccgtttaactttccataaaaatgttttctatgcatgcactgaaataattttactagttgtgtcaatttggaataaaactgccttcctgaacagtgatgcagccttatgttctgcctggagttattagtgagtttacatacgacatgtgcaaaggccatggctgctggctggtgcgcctgttacccctgtccagtctgacaagttgtttcacctttccaggccttgttcccatctgttaagtgggtgttgagagtgtcctccttgtctgcttcagagcttgattggcaactgtgttaatgttctccagagaaacagaatgataggagatattggaatcaataggaaagaaagagatttattataaagaattggctcacataattatggagactggcaagtgccaagatctgcagtgaaaatgggcaagatagagactcaggagagccagtgatttagttctagtctcagtctgaaggcctgagaaccaggagagccaatggtgtagttccagtaccaagtcagggaaaagagctgatgtcgccttttgaaggccatcaggcaggaagagtagtttcctcctaattttttatttatttatttatttatttatttatttattattatttttttgagacggagtctggctttgtcgctgaggctggagtgcagtggagcaatcttggctcactgcaagctctgcctcccaggttcaccccattctcctgcctcagcctcccgagtagctgggactacaggcgcccaccaccacgcccggctaattttttgtatttttagtagagacggggtttcactgtgttagccaggatggtctcgatctcctgaccttgtgatccacccaccttggcctcccaaagtgctgggattataggcatgagccaccacgcccagcctagtttcctcttaattgagaaggggtctgattgtcattctcttcaggccctcaactgattggatgaggcccactcgcattggggagggcgatcttctttgctcagtctacccatttatacgtgactgtcattcaaaaacaccctcagagaaaggcatagaataaagtctgaccaaatacctggttatttcatggcccagtcaagttgaaataaaattaaccattgcagcaagccgtgaagctggttatttgtccttgttcctgttggagctgtgactcccataggacttgtgcactgaatggaaggaaggtaaagrggagatcagagataggagaagctgtgttgagtgtctagtactgtaacttgtactaagctgaatgcaacaaacgaygcttttgtctttcagtgtatagagacatcctggcttgtggcagaggggattcgttttttataagaagccactttgaatgtgagaaggaaactccacagagcctggccttcaccagaggggaggtcttccgagtggtagacacactgtatgayggcaagctgggcaactggctggctgtgaggattgggaacgagttggagaaaggcttaatccccaacaagagcaggtaacagagatcgcattctcacataccccttttaatccttccccctgcagaaarctagagaccgccccccttcccccgtaaaaggaaaccccacatgatgagttcattacttgtcaycatctatttcttgtttatggagagtggcctgaactgtaaatagccaccagccagtttattgtgagtaaatttagcatcatgtggttggttgctgaatgtggctgtttgaacaacttcctaaggagcatccactgccttgtaccgtatacaagagatatactgaatggccgtagcacaccagcacacctcttagagacaaggtacccttgtccggtgcccagtctccatccttggagaggtttatgcaccccagtgaacacttggtgtttggctgacagtgcaggaacctagaaaagaggcctgtatttgagcaggagttccaggtgtgtgtactgtgtacctgcatatcagaatgggccaaatttcacatgtttattgctgagccacttctgggagatttcacagagacccagcctttttctgctcccatttggaagtgaaggtccccacatttcccaccctctgaaacttcttcattgtcaagcggaatcttctctgagctcagaagtaaaattgactggatttgattaatgaaatgcatgttagctgcgttttctggctttagagatttacttcccgtggtttcttctcagagctgaacaaatrgccagtgttcaaaatgcccagagagacaacgctggggaccgggcagatttctggagaatgcgtggccagaggtctggggtgaagaagaacctgaggaaaagtcgggaagacctcacagctgttgtgyctgtcagcaccaagttcccagcttatgagagggttttgctgcgagaaggtgaggaagtcacatggggcctggaaatgaactgactgggctctgagcctgttcacctttattttcagactgtatggtcaagttctaacttatgtatgtcagttatgccaaaggcagtttatagagttgaaatcaaattctaacaaggagcrtgatttataaaaagctgtttcagttcctaaattgaggcttatttctgcaacttaaaaaatgttttaataccactgttcaagagtttcggtatattggctgggcactgtaccttatgcctataatcgtagcactttgggaggccaaggtgggaggatcacttgagctcagaagttcaagactagcctgggcaatatagtaagacctcatctctgcaaaaaataaaaaaagtttccatatattatcaatgggaaagtttgtgtttaaaaatggtgaggagctaggcagtgtagtcccagctactcaggaggnttgagcctaggagtttgagtttagtctgggcaacatagtgagatcttgtctcttaaaaaaaaatctaggttagcatgtggttgaatgaaaagaaaaaaattgttttaaatggtgaggatagtgaaggcatattcttcagaacagagccaagctgaattggggagaaaccacagtttctttcgtttagttatgttatcaaaagcccatacaatacttttactgcttatcataacagctaggcaagtrtgtatgctttaatggcctttcttgtcatttcagctggtttcaagagacctgtggtcttattcggccccatagctgatatagcaatggaaaaattggctaatgagttacctgactggtttcaaactgctagtaagtctgtcagtgtttttttttcccccaaatttttattttgaaaaatttctaacagaggagttggaagaatcatgaacacccacgtacccttcacctggaatcaccagttgctgacattttgtcacgcattttctctcacccactgcctgcaccatagacacacatacacacacacatacacatactctttgaaaaatttctgcagaatcatttataacactttatccctgaatacttgtgtgaatctcctaagaacaaggactttctcccacataactgcaataccattatcacagccaagaaaggtaacattgatgtggtgtgattttgtatatagtccattttccacgttttcttaattgtcctagttatgtgcttcatagctttttttwaaattcagaatacaaccaaggaccattcatgacatttgatttttatgtctttttgtgatttttatgtctttccagtcccctcttttttctaaataactttgttacactgatattttgaagaatccaagctagttgtctcctagaatgcttcctgttggactggcctaaccgtttcttcatgattagatttccactaagcaggttatgtgggtccttcccactgaatcttgttaggagacacttaatgtcaggtgtgccatcattgcttgatgctaggtgggagtatttggttgtcactgttttctaaacaattatttagcttcctgtttttgcttttgcagaaacggaaccaaaagatgcaggatctgagaaatccactggagtggtccggttaaataccgtgaggcaaattattgaacaggtgagaaaattcatccacagaccgtgttttcagaaagaattagattatggtttgctgcagtcacttttaggatagtatctgtacttttaatcattaaatgttaataataaaaaattggccgggcacagtggcttacacctgtaatcccaacactttgagaggctgaggcgggtggatcacctgaggtcaggagttcgagaccagcctggccaacatggtgaaaccctgtctctactaaaaatataaaaaattagccgggcacagtggcaggtacctgtagtcccagccactcaggaggctgaggcaggagaatcgcttgaactcaggaggcggagtttgcagtgagcggagattgcaccattgcactccagcctgggcgacgagtgaaactccatctcaaaaaaatatatatataatgtaaatgcaaaccgtttcactgtgtggaaaccagtcactgttggcagtgagcggagattgcaccattgcactccagcctgggcgacaagagtgaaactccatctcaaaaawatatatatataatgtaaatgcaaaccatttcactgtgtggaaaccagtcactgttactgttctctggcagtaacatactgtttttttttccagagttcccagcattataccaaataatgtgttaattcattttatcagaagttctaacacattggtaatattgaagtgggcattaggtagaaggaaatgtgttctgcttcttgatttaaatttacaagataggtggctcatgcctgtaatcccagcactttgggaggcagaggcgggcggatcacctgaagtcaggagtttgggaccagcctggccaacatggtgaaaccctgtctctactaaaaatacaaaaattagctggccatggtggtggcgggcacctgtaatcccagctactcaggaggctgagacaggataattgcttgaacccgggaggcggaggtcgcagtgagccaagtttgtgccactgcactccagcctgggcaacagagcaagaatctatcccaaataagtaaacaaacaaacaaacaagatatatctcatasagcctttacttattaaaacaaagtatttgatgctatattactttatatatccatttctctaacttttccccttttgtaaacaggataagcatgcactactggatgtgactccgaaagctgtggacctgttgaattacacccagtggttcccaattgtgatttttttcaacccagactccagacaaggtgtcaamaccatgagacaaaggttaratccaacgtccaacaawagttctcgaaagttatttgatcamgccaacaagcttaaaaaaacgtgtgcacacctttttacaggtaagtgaaatgtaaatgtagtccctttgctaaaaaatgagaaataaagaattgaagartagaagaaataattaattaatctgaatggagaatttgaaattgtgttcatgactccttgaaaaatagttaatcctataaaatgggatattaggccaatggcatttatatattgaactttgtaattttgtctatttgaaaatgaccatraagatccatgatgtggtaataattagctattttgatgaagttcatattttcctgtgagactataaggctagtgattgagccaggccraacacctatgtctctctagagattgtgtcattgttctctactcaccatcaatacatgcattaacttacaaagcgaaaggaacttggtttcattatttaaaaatattcctgtccagcatggtggataacacttgtaatcctcccactttgggaggccaaggcaggaggatcacttgagcccaggggttggagaccagcctgagcaacatggtgagatcctgtctctactaaaaggcctagcatggtggtgcatgcctatggctgaggttggaggatcgcttgagccaggaattcaaagctgcagtgagctgtgatggcactgctgcactcctgcctggtgactgagtgagaccctgtctcttcaaagaaaaaaaaaaaaatctagaaacttggacactctgaatattggatgatttaaagatttattatttctctttgttaggtgtgataataatattgtgatttttttaaaaacaaagttctttkaggaatgcatactaaataaaatatttatggttgacctaatataatgttgagaatttgcctaaatagtctgcagtgaggggagtagatgggattatagacaggacaagactggccaagacttggtagttgttagttgttgaactggttgatatgtacatcggagttcattaaactgctatctgtacttttgtacatatttaaagatttacctaatagaatatatttttaagtccatgaaatgaagagccattgctattactcatgaaagtaaaatggtctaagaacatgacatattttagtaacaatatatgcactgtctatataaatgattaattctgtgcatatgagattattaagagttttaaagggttacataaattttgtggtcatgcagggcattattttgttggggcaacacgaggagactgcaaggatatgatatccttaggatgaggatagctcattgagttcattgcccatcatcatccacccatgtcattttagtgtatctctgatactggagaggaaggggtgaatgattgtgttcacattagatgcttgttttagtgtaacttggtttttcttgttaaagagaggtgcactacttgccactgtggccaaatggagagagtttaaccaaatgcagaggaggaagtggtccatcataaactagatttctgtgaatgtagtcttacgtactcatactcttggtatatttatgaatatcctttctgtcctttttactactagtattataattattatgattattactattatagcaacagtaaagagtggtacagccttccatgtgtgctgtcttattaggccataagaaaggccagcacttttgcataatcacaattctgatgtatgactgagcccagactraactatagcgtccctaactgtccaatattgtacatatgttacagcacagacatattctaatcccaaaaggggtcacgtaatgcagcccttccttttgacagattaaaaaactgaagccaaagtgattataaatgaarttaaaactatccccactttattttcccccctgcttttgtctgagtacactaaatagcgagcgtcttccctcagagagttaaatttgggattcacgtgaggatgtaggaaatcgggaagggaattacagtgcattgtagaggaagaactaggctgaaggcggctggacgaggagagcagggcagaagaaggcagccagtgactgtggggctctcccttgatctaacctgagtccgcatcatttgctcttgggagcacaggccacggtagctggctgagtgtgagtaagaatctagaggggtccatgtgtgtagaaggggttagcaacacctctgttagctccatagatggatttcaagatccttgaaggcagagcctgaacatttcccagcgttgtgtgcctgaggccagcatcaggactagcacatgggcaaggcataaatgtttgtaacttacattagaactgcccctggcacaccaagccatttcttgcctaaactcatcaggaagttgaaagttttagaataactcaagtcagagattggaatggaagcacacactgtaagcattgagtttcatctaaaacattgaagtgatcttatctcaccagaaattgccaatctcttatgtagaattgtacagtcttcaggatagatggtgcagggtgtgcagcaactttgaccagcaagctccaattttctagcaagtggtcttttacagtactcttccagacttcaaagtttgactccctacagctgtgtggatgactgcactaataattgcttttattccccatctcaccctcgtccctcttagcttgaccaggttttgacttgaggctgtgtgccatgtccagaaacactagtctttacatttgagcagtagaatcttcaggcagaattagtattttatagtttttgtttgtttttgagacatagtctccctctgtcgcccaagctagagtgcagtggcacgatctcggttcactgcaacctctgcttcctgggctcaaggcaccttccctcctcagcctccccagtagctgggactacaggcacacaccaccatgcctgggtaatttttgtattttttctggcaacagggtttacccatgttgcccaagctggtctcaaacccctgggctcaagcaatctgcccgtgttggcctcctaaaatgctgggattacaggcatgagccaccgtgcctggcctattttgtaggcttttaaaatgattttaagtgtatggcatttttgtgagttagtagttgagaataatagagtgctttgatgaacacagtaatttgaagtcaagctttatgttgcattagtctctttaggctcaatatccttttgttttcctttttgcaaagtaataagaaagctcctcttcctcacgagtatttaattatgacaatatgaaaatagttctccttacaagtcttacagtacttctcagttaaacaagagaagctttattctgagatttgcccaaaggcaagttgacttgtcataataagtttaagtgttaggtttgcctcccctactaccaatttttaaaaattttctataaaatacatttgcatatcacaaatttttatttttaaaaaacaaactttgaattacatgttttcttggaatcttcaaagyactcagtgcatggttcgaagatcatttaagttgacttatggatttagagacccaagtggggctacccttttatgctaattatagaattttaattcctgatttctcaaaggattatatagactagctagttgaccacagaaaagagaaggaagatgctgggccccctagctggatacctttgctgttgcatgcccatttagagggggtctagcgtgccactgttaaccgagccacgtgaaaagctttattgagttttgacttagataccatataatccacccattgaaagtatatagttcagctgggcatggtggctcacgcctgtaaatcccagcacattgggaggccaaggtgggcaggtcacttgagctcargagtttgagaccagcctgggcaacatgatgaaaccctgtctctaytaaaaataaaaaaattagctgggygtggtggtgggtgccggtagtcccagctacttgggaggctgaggtgggaggatcacttaagcccgggagctggaggttgcagtgagccgagattgcactacagcactccagcctgggcgacaatgagaccctgtctcaggaaaaaaaaaaaaaaaaaaaaaaagtatgcaattcagtgggctttagtatattcagagttgtacagctgtcatcacaaccaatcaatcttagaacatttttatcatccccaaaagataccccatacccattagcagtcattccccatttctccctttccctaaaccctctagtcttagatgttaccttttgctgtcgctcttggtgcttccaaacctccttggctggggagggggaggtagcactgaccatacatgtcagggctgggcacacgtgccctcagaacctcagtattcccaactaaggcagtggctgagtcagcatcctttcagtatttcactttcttgagctcaaaagatagagtaagtctatccaaggggatataggcataacccagaggttaggagcaacagataattaactactattgctctaaggcaaagaatctgagaagcggaatgagagaatccaataataagctaaaggtacttaattcagcagagtcaagggaaggcagcttcatgtctgtgcacctgcctgttaaaaagaggtcaagtgcatgagttggatgttacttttatatgcagcttaggaagttagctactgtgaagctctcaatttttattcataaacttgactgttaatgtgaattcagtaagagcttttgtgattttctttattttatcaaggggcaagaacatatttcctgcatctcacaaaatgccgttttaactttaggttttctttatgatgaatgcagaccatacttatctcagacagctgcaacataaagytttaaaagactgcttaacattttgtatatatttagtgtaaatcactcattttgtctctggggtacaaaatctcacttctatttttaagtatcatattttagctatgagatgagcacagtaatctttgcagagtaccataataggaatasagaagtccgtggaatcaaagttaattttcttcgggttgtctaatggatcagtttatttcagtgctgtaaataattaataaccaaggaaattgtaagctcattcaggattttctaaggtcactgttagaacttcttaaacagaagaaagctatgttacttggaggaaaacctgaagcatcattgcttacaaaatttgcttaatggttctttttggctttagaagtgatagtrcaataagaggccatggcaatgtagtttaaaagaaatcctaatttacctgcagtctgataattttaggggtacaatttgttattttggactaacttgcttgtctaatttatctccattaggtccataatacatattgctgaagaaatgacatatgttgtactttgttggtattttatatctgtgctctaaatttctgtttttagatgggccatgtagtgtggtggctgagaccataggctctgaaagcagttttctgagcttgcatccaagcttcacacttgcttggtgtgtggccttgggctagttaatttcactactttaccttggtttctcatctataagatgggcatcatagcaayacctaccttgcaaagtttgtgtagtcgtgaaatgagctaatccaggtaaggtacttggaaagtaactggttgatgcatagtaagtgctattatgtaagatatactttgttctgagtagaaaatgtatattctttgaatacacactggttgggtttgtttaatctatatgtatattctaaaatgtgtaagtctatcaaagtgatatacagtcagctctccatgtctgtggtttccacattcatgaattcaactagccgtgtataggaaatatttgaggggtaaaatggatggttacatctaaacgtgcagggtttttttcttgtcattattccctaaacaatatagtataacaacgatttgcgtagcrtttacattgtattaggaattataagtaatccagagatgatttaaagtatataagaggatgtacataagtcatatgcaaatactgtgtcattttgtatcagatactcggcatctgtggattttggtatccaagtggggggtgtcccggaaccaatcctctacagataccaagggacaactttatgtttaagtgttacttttagtattttattggaggtagccaatacagtatattagtgtatactaattagtgtatacacctcagcctcccagagtgctgagattacaggcatgagccaccacacctggccgaaaacacatgttcttaaaaacatttttaaaagttagcctttctgaaaataaacattctaaaaatctatttttagctttatcacatccacctataatgtgaactcaaacagctacatgattagtagttttaattgcattcattaaaagggttttaatattcaaagatgtgcaaacatcttcttgcgtctgccatagtcttaaatatcacagaaatgagtgtaaattatgtcaaatagcatccttaataaacatgcctctggaaattaatgcagacctttttgtttatatttctatagctacaatcaacctaaattcagccaatgatagctggtttggcagcttaaaggacactattcagcatcagcaaggagaagcggtttgggtctctgaaggaaaggtatgtggcatagatatgctgctatgaggtgagagtccctgttctgaaacttttctcaagagggcagtgaatgtagtcaagccatgcccatttgaagtgatgctcacatgtgtgctaatcaagtttgaaatttcrtaaattctctgaccaagtaataaaaatgaagggacttttaaaagaagagcagaatgtgacatgtgcagccctacattcacttccctttcacttttaatgtagtaactagtgttatattccaagtacactaatcagagcttacaagatctcatgctgagctccacagcttactaaggacgtgggaaacttagagtgcagatgagaggtgaggttgagcaacttggagaatacggctaaacattaataaaaagaaaagctaatggagttagaattacttagaaaataagrttggttgagaatgtgccatcgttctgggagtttgaatgggtgatatgagaacgttagggaatttgtctaggcctctagaattggatcrcttctccctcggggagatagctcacacacagctgtgctgcagggaggagagagggagattctattacctgtggccgcttttattttagaagcttttggtgttagtatcctgttcaccagctgaactgaggtagttttgtgagacttgacagtgactattttgttgcagaattgactaagttttgctctttgagaactagatgtgtagtcaaagtatctggcatctatggagtgcttccagtttggaagggggatgcaagcttccctggggaggacaggttgaacaggacatagcttctgcctttgagggtctgagaatcttgtagaggcatggatgtgagtgtagcacaaggcagcgtgcaatgtgttgatattactaggagagtggtaccaggagaacaggctgcagaggagctggattcagaagaaaagcaagacagwctgagaaagtgtggcttagccrcggtatggaggatggatggtagcacagataggctgcagggcccctaatttgagttcctgcacaaaaacgaccataatatcaacattgtaccaaagccaagtgatctcagggagaaaaataaaagatgccttccctggcgagcacatcaaggtttcagtcgcttggctgtgtccttgggaattttcttgagtccccactcccaggagccacatcagaccycactgaccgtccaacacaaattcctctagatggaagggatggatgatgaccccgaagaccgcatgtcctacttaacygccatgggcgcrgactatctgagttgcgacagccgcctcatcagtgactttgaagacacggacggtgaaggaggcgcctacactgacaatgagcyggatgagccagccgaggagccgctggtgtcgtccatcacccgctcctcggagccggtgcagcacgaggaggtgaggcgaggcaggccacgggcaggaacaggagagcctggtgttttccttgcactctcgtggacagctgtgtgttcagggtgctgtggaaggcattcctaagggttggagcagatgacttccagggagtctctcgctttgagtccacgctggcatggttgcagtctgtgggaaagtggggcaggcaggtggacttcagaagagcttgaggggtcagcactccgcacacccatgccctcaggtgcgatggataaacagaatggctttaggtgccgtctgtccaaattaccagcggaaccttccttcccatgcagtattgttgtatgtacttgtaacctttgattaggtttctctctgtactcttagatgtccttgcttttcttccccatcctgcctttaacctttctaatcttgccaaagctcttgagtgtttccccatcagtttccttctctcttatatttcagttttttaattgagttcatgatcaaaccttcatytgatcacatcacatgtactgtgcatccactgtgattagatagcttatgggatccttgaaatcacattgacaggcactgtaaagtcacagccaagttagcaattattagttgcacctcagagaatgttggaataatgatctttgaagatgggattgttcatatatttggataattattgctgtggatttctctctagcattttagctcattccagtaaatgatttttttctttatgaaatagaactaccaaaaaaaaaaaaaaaaaaaagttcaacaacaacaaactgaagggggagaaaaatacaccattaccacagcaacaaattagtttatgctagacaacttgtaaagaataaattaacttccaaatgcctatagacatggatattagtgacacaagagattttagacttttggagggttcttaaaaaattgtgctttaaaggaagagactctacattggatgcagccagtttttaaaaatgtgtctgaagcatttggtgatggtttctgcctgttcagtaaagaagcaccggctcagaacctcaacttctggacttactcaagtttgcagaactcctccaaagcagtcgagtgctctgttctctctgcttggatgttcttgttgtgaatgaacctttatgtcttgtagagcataaggaaacccagcccagagccacgagctcagatgaggagggctgctagcagcgatcaacttagggacaatagcccgcccccagcattcaagccagagccgcccaaggtacgtggctgggaagcccaggatgggaaggaagaggaagcagatgcctctgaagcctcctggacggccagggaggagcatgcacactgagatggtgtttaattacggttctgactcactgtgttctctattagagcctatcttttggcctgttgggtgaactcccaaattagggaagggcaaaaaggaaggaaaggcaatattaggagagcatatgattttaggactgttagtgtttatttaatttactcttcttgttaaaaaaagattgtaaagaaaaagattgaaaaatactgtactgtatacccagaatcaccaatcgcagaacgtgtttttcttttgctgtccagctaaagttttctgcccagtctgatttagatgcaccagataattcttactggtgatgtgctaaagagaataatcatcaccactgcttacaatgcctctcattaagagagctgcttatttgtttaataaatcattatccagagcagaatcaatataaagacacaagggcttatatcaaaagattatttacctttagtcagaatcagagctgtgactctatgtttttccttataccagaataaaacctatttaactcaataatttattatttattattactattttttgagacagagtctcactctgttgcccaggctggagtgcagtggtgcaatctcggctcactgcaacctccacctcctgggttcaagtgattctcctgcctcagcctcccgagtagctgggacttagaggtgtgcaccactatattcagctaatttttgtatttttagtagagatggggtttcgacatgttggccaggctggtctcgaactcctggcctcaggtgatccacccacttcggcctcccacagtgctgggattacaggcgtgagccactgcgcccagcctaactcaataatttagatgagaagaaagccataattgattgtgtgagccatcagaagtagtaaatrtgataggtactaagtaataataagtgacctcataaaatacatcagcgaaaatttgcaagccgggcaagactggaagtgtgaaggaaaagtggctgttagcgtgaagcagtgctctcctcgctccccaccccagtctcattcctcagctggacatgggtctcacctgggccggctcatgtaccctcagtgcagcagtgacctcagaagcccactcttcgagtcccaaagcctgaattgttctgagatcttctccaagatgctgatctcctctagaacaaaattattccaggtctgatcttacctccagcaatcacagccctcccagcactttccctattcctttttggcttcctgacattcctaatagactagtataggaagggaggtagggctcaggaagcctggccagtggctgtttgccctgctgtattacattccttgtcagaatggtatttgtggaccacctttggaaactgatcaggaaatggagtgtattaaatcactaatatagatttgaaaataaacttaaaagcccagggtgaaaacrtgtcattgctctccgcaggccaaaacccagaacaaagaagaatcctatgacttctccaaatcctatgaatataagtcaaacccctctgccgttgctggtaatgaaactcctggggcatctaccaaaggttatcctcctcctgttgcagcaaaacctacctttgggcggtctatactgaagccctccactcccatccctcctcaagagggtgaggaggtgggagagagcagtgaggagcaagataatgctcccaaatcagtcctgggcaaagtcaaaatatttgagaagatggatcacaaggccaggttacagagaatgcaggagctccaggaagcacagaatgcaagggtaattgtttttaaactacacatcatcaataagagttttaaataagtttgatttcaacataacagcgaacagcccctttgctgctgctgcagatgtggcagggatgcactgcaccaaaggcaggtgctgtgtatgtcacttcagattgccagctcccagcaygtcccttgttcttccaaagaagaaaacttgacaatataggggaagaagattctgctctttatacacagaactttgtatagagttctggaatgaggaagtgtgaggagggaatcagtgcctctcggaagtcgttttaattagaatgtgatttttttttcttaaacgtgtcttcattggctcccagatttgccgtagaaaccaagcaaactgggtgctaaaacagaaaggcccatagattgtactttttgagctgtttgaatttgtataccatatgcacatagaacttttcaaacaaagaagaatttaactaaaggtctgtggagtatatttgcccagtagatgtgggagttttctttcaggtctagcacaacagcagcagtacatctgagcatttttcttttcttgtcgtaaaatatacataacataaaatttaccatttcaaccacttttttcttttatttattttgttttgttttgttttgttttgagacagggtctccctctgtcacccmggctggagtgtagcagtgtgatcacagctcgcagcagcctccacctctcaggctcaggagatactcccacctcagcctcctgaatagctgtaaccacaggcacatgccactgcacccagctaatttttcgtattttttgaagagacaaggttttgtcatgttgctaggctggtctcgaactcctgggctcaagcaatgcaccctcctcagcctcccaaagtgctaggattacaatcatgagtcactgcacccagcctcaaccattttaaaacgttcggttcagcggcattaagtaccttcacattgctgttcagccatcaccaccatccatccccaaaacttttttatccttcccacgtgaaactccgtacccataaaatactaactcaccactctcctctccccgcagtccctggcacccactcctttactttctgttttttgtgaattggacagtgtaggaacctcctataagtagaatcatacactatttgtctttttgtgattggcttatttcccttagcatgatgtcctcaaggttcatccaggttgtagcatgtgtcagagtttcattccttttaaatagttttcctgtctgacgtgtaccgcacataaccatggaaatgaggaggccgcttctgtgtttcctcttcttgaaatgggatgggaaaataagtaggatatggggaaagggtgggaccagcaggaaaccagcaagcagagtgcccagtggttcattctttcactcttattcttttcttttttaattaccacagatcgaaattgcccagaagcaycctgatatctatgcagttccaatcaaaacgcacaagccagaccctggcacgccccagcacacgaggtaagggctgcctagtgggtacaggtctaaggcggggacttctcaaggactgggacttgaagaaaraatttcctttacccaaatttcagagtaacaggaggattttttccccacagattgactgtttgccttactcattccatcaaatttaattgtaaagattacagagtcaaaacttaagcatagtttgcttgtgtgctaaaactctgacaaagtgtaatcattgatgtttccagccagtacatttgacacattggagcctggttatgttacattgcacatggttagcacatgagcagaattcctacggcttagacctgttttgtcttgtttgctgactctcagccaaacttcttaattcctttgcatcatccagcaaagtcagaccgcttgtgctgccctggggtctaaagggaccgtgacaagcaaatgagcagtcttggtaaatgccacacaaacagtaggaatgttcacagtgtcttcctgttgaagttttatactggattgcttcctgcttccgagaatagaaaaaaaaaagtcacattttcttgtggccattcttttgttttttttggagacagagtgactgtcgcccaggctgaagtgcactggtgcaatctcagctcactgcaacctccgtctctcaggttcaagcgattctcgtgcctcagcctcccgggtagctgggattacaggtgtgtgccaccatatccagctagtttttgtatttttaatagagacagggtttcaccgtgttggccaggctggtctcaaactcctgacctccgcccgcctcggcctcccaaagtgctaggattacaggtgtgaaccactgtacccagcctcttgtggccattctgactggaagctgaagtctagttttccagtgatagaaaactggaaacaaatttcttctttaccagctgagtggtaacacagtcaaccaggttgcctctggcaacaaagagttcttggttatgatggactgaaactggcagagacctcgctgctgggtgagactagccagggagcttaggggtaaggagggcaccccctgtccaacagggagattcttaggtcagggagcacctggctggcttcctcactcaccgccgaagtgggcattggatttgacctattacgaacctggagcaggaccagggatgccctggttgctctgcagaatgtggctcagaggtaagtgatctgytygggatacccagtcactgtgctcagagccatgcctccccgggcagccggaggacatggatgtgctctggaatgtctttaacaccctttttttgttagttccagaccccctgagccacagaaagctccttccagaccttatcaggataccagaggaagttatggcagtgatgccgaggaggaggagtaccgccagcagctgtcagaacactccaagcgcggttactatggccagtctgcccgataccgggacacagaattatagatgtctgagcacggactctcccaggcctgcctgcatggcatcagactagccactcctgccaggccgccgggatggttcttctccagttagaatgcaccatggagacgtggtgggactccagctcgtgtgtcctcatggagaacccaggggacagctggtgcaaattcagaactgagggctctrtttgtgggactgggttagaggagtctgtggctttttgttcagaattaagcagaacactgcagtcagatcctgttacttgcttcagtggaccgaaatctgtattctgtttgcgtacttgtaatatgtatattaagaagcaataactatttttcctcattaatagctgccttcaaggactgtttcagtgtgagtcagaatgtgaaaaakgaataaaaaatactgttgggctcaaactaaattcaaagaagtactttattgcaactcttttaagtgccttggatgagaagtgtcttaaattttcttcctttgaagctttaggcagagccataatggactaaaacattttgactaagtttttataccagcttaatagctgtagttttccctgcactgtgtcatcttttcaaggcatttgtctttgtaatattttccataawtttggactgtctatatcataactatacttgatagtttggctataagtgytcaatagcttgaagcccaagaagttggtatcgaaatttgttgtttgtttaaacccaagtrctgcacaaaagcagatacttgaggaaaacactatttccaaaagcacatgtattgacaacagttttataatttaataaaaaggaatacattgcaatccgtaattttctttgtggtggatttgtatgctacttcctatttttaaatgcaacttttatttcagttactaatcatagaagtgattactaacctccttgtcgaacattggaaaatggaaacgtgaaaaagaaaattatacccataatcccatccctcagataattttggtgtattttctccaattacgtatttgtggatgtctgtgtgtatgatacttgagggtgtactgtgtttgtagttctatttcctattttttctgtttatcattctatcactaacatttctcaagtggttacaactgtgcagcaaggtatttaaagcgtggtgtacacatcatcattaacaaccacagagcaatatatcccatggctgcttcataagtgaacaattctgttgttggctgttcggattatttccagttgtttgccttttttttttttttttttttttttaaacatgaaatgcacctctttgtatgtaatccagttttgtatatcattgatcagcatttcagtatttttctgcaggcaagttctcagaagtagaattactgagtaaaagaataggaacatttttaaggcccttgatgtttactgccaaatagcttcctagaaaagttgcatcaatttacacccccacatccactcttcctcttcctcttcttcctcctcctcctcctcttctttcttttcctttcctttcttttcctttctttcctcctcccttcccccctccctcccccccttccttccttctttccttccttcctccctccctcccttctctctctctctttctttctctctttccctttttttttttttttgacagggtcttgctttgctgcccccaggctggtcctgttcttgaactcctttagcaatcctcccacctcagcttcccaaagtgctgggattacaggcgtgagccactatgcccaaacaccacttacattcttgaagtactaaaataaatttagaatttaagcaagacagattaggaatttcggcttgtattaataaaaagaacaatgaatttggaaaaggagaaaagagtcttggttccattaagggtcttttatgatatgaattgacacaaaggagttaggcttgtgttttagtggtggcagaaatttggcttactggtaactgagttatactataaaggtgcccttgcttatgtctcttccaatatgggtgctgtcacttataaatcatttaatgtatctcgaatttctgaacactcctcagggcattgactaaaatttgcatattccataaataaaagccaccttttgtgaacaggagaaaaatgtactagttaactatatgataagactgtttgtttgtgttctttaaatccaggaatgagccctttgcaaacataggtggggaggcgaggaggctttcagcaggagctgggttgtcgtctggttccagcaattttgtgatgcgggcagtgccactgttcctcagaatgtccagcagtgtgcctgatggacccccagtgccttcaccacccctttttattcatatcctcctttgttctgggaaagatttaaagctgcctacagtatacatggaacataatgaaaaaaaaaaaatgatgctaagcaaatgaagaaacagggagaagagtatcagtagagggaagatagagccatgagtgagagccgtgttcattttctgcgccgtcaggactctgcagctctccagaagccagtgtggccccagcggcacctgcatctatgatagaattatgcctgtgcttctagcccagtgagatagatgagcgatgggtcttccagaatgacatcagatgctactgatgtcactaacatcagtagtaatttgacactaacaaatttctttatatgaagtaaagttggttaggaacagtccatttaagcaatcgcagctgtcttttaagagaaaggttcccagtcaatcttctccctccttttcgaacctcttttcagttggggtcattttgccagttctagctttcatatacatatgtgaagagaaagagatttattttaatgaattggcatacagggttgtaggggattggtaagtctaaaatctgaagggtagaccagcaggctggagacccaggggagagatgcaatccaatcctcctagctggtgtgaggtcagtctttgttctgttttaaggccttcaactgattggatgaggccgacctacatttcagagggcaatctgctttactcaaagtccaccaatttgagtgttaatctcctaaataaaacaacaacaacaacgaaacttttactgaaacaaccataataatgtttgaccaaatatttgggcatcatggcccggccaagttgatgcataaaaattaaccatcgcagtccctcatcctgtttaccatgtaggccaccctacagccatcctttttgtttagtgttaaagcatgagtgaatgaatgaaccagaaaaagggagaattatttacatacatatacacgtatgtataggttttgtacaatatatatactctggatatacatgtattataaattttgtttttgttttattattttttgagacacagtttcactgacccaggcttaagtgcagtggtacagtcacaactcactgcagcttcgatctcctggattcaagcagtcctctcacctcagcctcccaagtagctgggactacaggtgtgtgccagcatgcccagctaatttttgtattttttttgtagagaagaggtttcaccatgttgcccagactggtcttgaactcctgggctcaagckatccatccactttggcctcccaaagtgctggaactacagactacagaactacagagccaccgcacccggcctatattttgttttaaataaagatgagcaaatttgatgaatagaaaagcattaaaaatgggctggcgtggtggcttatgcctgtaatcccagcattttgggatgccaaggcaggtggatcatctaaggttaggggttcgagaccagcctggccaacatggtgagccaccgtctctactaaaaatacagaaaattagctgggcgtggtggcgggtgcctgtaatcccagctacttgagaggctgaagcaggagaatcgcttgaactcgagaggcagaggttgcagtgagccgagatggctccattgtactccagcctggacaacaagagcaaaactctgtctcaaaaaaaaaaaaaaagaaaagccttaaaaatgaagaaacaaaaatgaatgaaatttgaataatagagctgaaactccaataaaaataaaaatacttcatatttaaaaataatatttagtgaaataaatgagacaaaaggctgaatggcaaataatatgtatatatgtttgtgtatatatacagagacagataaaacatatttccatcctgctttttattttaaatctcatttatatatacatagatagaaaattggcacattttatattccccacactagtgactgcaaaggcacttatagcactttggcatttattttgcgcaataagaagtggaatgtggtttgattgcttctgcactgtcctcggatgccgttccaccttcgagagtccaggttgctctgtctttctgagtttgagtctgtctaggaaggataactggggaagaagatcctgactgaaagtatcctggggccaggtgcrgtggctcatgcctgtaatcccaccactttgagaggctgaggcaggtggatcacttgaggccaagagttcgagaccagcctggccaacacggtgaaaccctgtctctaagtaaaatacaaaaattagcagggcgtggtggcaagtacctgtaatcccagctactcaggaggctgaggcaggagaatcgcttgaacgcaggaggcagaggctgcagtaagctgagatcacaccactgcactccaccctgggcaacagagcgagactccgtctcaaaaaaaaaaaacaccaaaaagaggccgggcacggtgactcacgcctgtagtcccagcactttggaggccaaggggagtgaatcacctgaggtcaggagttcaagaccagcctggccaacatggcgaaaccccatctctactaaaaatacaaaaattagccaggtgtaatggtgcttgcttgtaatcccagctactcaggagactgaggctggagaatcgcttgaacctgggaggtggaggttgcagtgagccgagatcgcaccattgcactccagtctgggtgagaaaagcgaaactccatctcgaaaaacaaaaataaaaacagaaagaaagtatcccgagagacatgggttgagctttgaaaatgcagctgtcccttggtgtctgtggaggatgtttcctatgacctcccatggataccaaaatccagcgatgcccaggtctttgatataatggtgtggtaggccgagtacaatggctcatgcatgtaatcccagcattttggaaggctgagggggaaggatcgcttgaggccagttcacctgggcaacatagtgagacaccacctctaaaataaaaaataaattagctcagcatggtgtcgcgtgcctgtggtcccagcttctctggagactaaggtggaaagatggcttgagttcaagagtgtgaggctgcagtgagctatgatcacacctctgcactccagcctgggtggcagaacgagatgctgtctcaaaaaaataaataaaataaaatggtgtggtatttgcatataacctacatacatcctcctgtatactttaaatcatctccagattacttatagtagccaatacagtataaatactgggtaaatcgttgttatcttgtattgtttttctatttgtattttttattgtttttctttacccccggggaatatttttggtctgaggttggttgaatccgaggatgcagaacctgcaggtatagagggcccagtgtccaggagacccacctctgaggttcaggggagagaggaatggagagaacctggacctggaagaaaggaggggagggctggagcagggcaggagcttcccctctctcctccccctccttccctaatctcccaccacatgctctttcttttccgctttaattcccttccctctgcccccgttccattctcacacatttccattaggaagcacagaggggcccaccatagggtctgtgggaaatggaaatggtgactccacacaggaaacacggctccacctcatgagaagcctgggaaacgggcatgacagcaagacagtttggaagggtattaaaaagggaaccgctagatcctgaatgctgtccaaataaatgcacctttgagtcccagtgaaacatatgattttctgggcaaatctaatatgtaaattattcacaccagatattttaaaatattaaaatgatgttatacatctataaatacactggcattttattactcaaaataatatggtgagtcagaatataaaaaccacgaatgaagtccctatcccaaatcagatgttagttcctccccaaagctggttctcttattatccccatccttctgaggcagccacaaaaattatgaactcagattctgaaatcaaagtgactttcattcaaactccagctctgtcaggtacaagctgtaaaaccttgggcaacttacttaaatgttttaagcctcagttttctcatttatagaataggaatggaaaactataactaacatgatgccctaagttttttgtggcatgttaatcagatcgcatatataaaatgtttgcaatagtggctggcacaaagtaagtgctcaataaaagcagctagtattattatcactgtcaatggttttgccacatcaatttagaaacctgagtggtgtctttgattttcttactcttcctccaagtgatgacctactttattatacttaataactatttttaacttgtccctctgtcccttttcccacagccactaccctagttcagatggttgtaaactttctaatcctccactca

SEQ ID NO: 6872 - DNA, 28157 bp, Homo sapiens
caccactggaatttgtacctccctactttcatccaagtatctctcttgccccttgtccctgatcacctttctcagccctactcctgccttgttttcatttttgcctggttcagtatttttctctctttgtctcctgctgtgtcctgctggctcttccctgtccgggattttcagagctctcttctcaccacgtgaccttccttctcatggctttagctgccttctctgcaaaatgaagatgttataattccctaaggctcttgaagcctgcaaacaaactctagctagcctggcagggagaccaaatactggttgctcaagccattcaggggtccgctcttgccccagcttttttctaacctgagatgcgggggccttctgaaggagcctagccctgtactgggcttcccaggcagtcaagctagaaatgtgattctctaactcaaagggatctatctcagaagttatctggtcaactcttgtgttttggagaaggggaaatagactctgggaggccaggaaacattttcaagacaggccagagaaaggacccagtccctgtaactcagtccttgcttgttccaagtcatcaagttaatactcagtcctgcaactcctcccatgctttctcctcttcagcaagtctgtctcgaattctgctctgtctcacccacttcccctgactgtattttcagtgcagctcagaatactagtcctaccccaccttcttccaccctcctggcaccccctctcagcaggctagaggaggcactggaggcagcaggtggcgcacaggctgcaagaggacaagtctgcccggctgctgctgatgtgcccctgcttggtacagggattgggtgcctcttaactaagagaatgggcaaatacaagctgcccattcccctcctggcaaactacaagcctcaaatggggaaaagcagggtgagaggggaaggctggaaagcagagatgggggtgttaggatacagaaggcatttgaaagccagggaagttaagaaggggtagagggtaaagaagttaggagagatgggatgaggagaattgaaaatctaagtagaaacaagagacaggaggcaggtatgaaaatggtctagatcagcggtctggtaccaagtggcagatagaccatttctgaccttacaagcagtccagagtctcaaaagagaagaaccacagctctctgtctttactccccaataagagaggaccctcccagtctccccagttccagctctctgccccctccccactcctggggcactttgcccaacctkattactatccgcttgtgtcccagctggacagacctggctatggggttgctgaccatgaaagaatgagggctgggctggtggatccgagaagctggaggagtctgtggagccaagaagcaggactgaaaggacccttcacactaagctgaaactgcatgtctccccccatttcctcyggacacttagacacccccttcctcctcaagcacggaagcctctggtgagaccccgataagggagctgagtcatgcctacccttactccccagctggtccagagtggatattcacacagctacaagagggtgtgtggacgcgaagaactgatcagtgaattgtgggtggtggtggcaaagaacaaggctgctacaagtatgagtagaagctagctcattcctcctttggcctgagaactttgctcccttttccattgtgtttgatggaacagcaactcsccactgccgtgtccccctcccagggaactcctcctccctcaatacattcctgcgatgcattccaaagaagttgggcaattggagggggggaatggaggacaggaggtcaaatcccagcaaggaatggaatgtaagagtattggagctaagaaagttggggtacttggagaatatagtcagagcagatacccacaaggggaattgcagaaagatagggagttacagacaggaacaaaaggaaagagcttaagacagtcagaatataagagggatgggggagtaacactcagtctgttaccaaatttggcctctgagtccgcaaccgctggcagtgggggagggctgtgggtgagactgacatatccggcctcaggctgctggagactcatttagagctggactgggcagctagctgaagggctgcacagaacttcccccggtacagcccctccatactcaaatgcacactcattctccccagatgcaccccagcctaggcagagctctttcccacaaagctaccttactctctctatacacacattatctcaatcacacagcccccacacagatcccatcacgactgcattatcttctcctagggagcccatcctatgcacacagcttttgcacagataacctccataacaagcacacccggcacccagtgtctctcctcccattatgtagacattctccattcacccagcaagcattccttgagggccagctgtggggaagaccctgggccaaactttcagtggctggggaccaagatcagtaagacctagcctttgagttcaaagggctcccagtccacgagatgagtgaataagccaagtacagaatcacaacggagggcaggatgtggtaagagccaaaaggtgtgtgctcagagagatccctttaggtcagggaaggggaaccaaaaagtctccatgataagtatcatttgaagctagaattttaaaaaatagagataataaaaaacaatagtgatctgccatttattgactctatgtcacttgcattgtatacataatttcatttaatccttacagtaggtgtcattatttccatttttacagatcagaaaacagactcaaagatgttaaatacttgttcaaatacttctccaaataataagttgtgaagccaggatccgaacccaggtttctgactgcaaagcccaagctttctccactacgccagccagctggagatgtgtcaggggtagttttcactccaggcagagaaatagcataagcaaagatggagaagcagtaaatcgtggaggagcattcagggaagtgagcaggcaggctgttgaagcacaggggtacctgcaagggagcagtggtggggaagtcagggttaggatggaaaggcagaggaagactggagaggggtatgaggaattttacttattggaggacaaaaggaagccaagggagtctttgagcagagaagagacataaccggaactggattttagaaaaataactctggcagttaccttggagattagttagaaggacactgtattagtacaaattaaaggtaatgaagccggagttggaatggcattgaggaagatgtcactcagaacaagtttggggaggtagaaatgacaggacctaataactactaaggtagacaggttagagtcccacagcttcctatcatcagcagccactttagcggctggggcagcttgagtttaggcgacgaattgggaagaggggaaaggatcaggttgggcagagaatgtgaggatgaggctgtggttacgggatgtggttaggctgtggggaaaaagggtatgagtatatgattagtagccactaggggcagatggggttgggttagtgactgcatcaggctgggaatggggaagacagggtgtagaaaaaggatgagaagacagggtgtagaaaaagaatgctggtgatgatggtgtttggaaaaatacatatacataagatacatatatgaccagtcactgcatcaggttgggggaaggggaatgattacatggatggtggctaagtcagggaatgatggggtgaggtcagaggccaggtcaggctataggaggttgagaagagctgggcctgtggtcagtcactaaatcagactggggtgggggtgggaaagtgaagggacattggcaatgtctaagtaaagctggagctgggatgggggatggggtacagccagtggctgggtcaggctgagtagaggatagtgctgtggtcagtggcagggtcaggctgggagtgaagtgggggtgtggtcagtggcctggctgggcgtgggatcagcaagacccagtttcctctttgggtctcgtttcctcttttctgttggggagtgggggaaggggatctacaaatggtccaagaaattaaaagaggcttagatccagggggtgacacacagcaggggatgggagtagggtattcagcagatgaccaggtggaatgtaggtacatgactgggtgaaaatggtaggagagtaatttaaaatgatgggaaagctcaggttttgatgagggtaaattcaggtaggatgtgcggattaaaggttggtgagggaggtagaactaaggatgggaacggatgataagatgagcatgggagagttaaaggcaagggaagtattttgtaaggggataggcaggatgggtgtgaaatgcagagtcagggatgagagttggagaggagggcttaataccaagagaacaagtgaagtgggagaagcagggctaaactttcaggggattcagttattcccttctcccatggcaacagtgattccttggttagcttcccccatagtcatcagctccttcttccctaggcagtccccaacttgtgactaggccttgtacatcctgggtccctatttcccacctatgttgtctgtaaacaacacagtccagaatctytgtcccctaactgtggtggccacagcaagggccttgggcttagagaatggaataaagaagctggaatcccagatgcctgcaattctagctaaagccagaacgctagcctgaaattagtttatctctctgggtaaaaagaagcccctgtaactacataggaataaaggatttccctacaaaagaagggcatttacctactgccaacctcttaaattttatctgctcaaggtcaactatgctagcctcaaaccacaacccctaaagctgccccaaattcctaacattaaccccacctctaatttgtttcctgattcccagtaccggcttggacattcatccctttcctagcacagactcatatccaatccctgatccctgaaactgatctaagttttgcctttagcaccaaatcccctgatgttaaccctaaatgttgacccctaagcctaaagttcatttataatttgattcctaactcacgctttcactgtttatccttaacaccgaccatgccaacattctttaatccctcaaacaagctctaacctgattcctgttgttgacccttaacctgaccctgaactcaaattatgacgtatgatggccatcccagcaaacaagataatgaccgtaatctaaaccttacctatctaaaacggacctgactcacactaactcttaagttttaaccccagcttttaactcctatagcgacccttgattcctaaacggaccccacctaatccccaactcacccaaagctttcctacccacatgcccgctatcagctaacaccaaagcccgtccccgccctgcgccccgctgccacccgactcctcacgctccccaaagcctatcccagacataggactgctcccaggaaaggcctgtcttccccaagacggcctacttcacgccgagctcaagccgagatgcgctggacgctgacctctccaactaataggacccgaaccggacacgcaagagaggcagggcccgcccgccccggggccaggccccgcggccccaccctaaggcccccgcccggcccggtctggcctacctgcgctgcctggctctgcgccccgcccgccggcccgccgccccgccgcttctcgggtcgccctcgggctccggcctcgccctcccttcgacactctctcggccacttccgtcctgggaacgtcccccacccgcgggcggcgccctgggcccgcgctctatggtcgcggggggcaggcaggaagctgctctggccccgttctcgatgctcgggagccgccaaagcccggcagcccctccctggcaggaarcgagggtgcggcgcaatccggagaggacgccaggacgacgcccgagttccctttcaggctagaactcttcctttttctagcttggggtagaaggcggagccggagccccggaacccccgccctcggggtgcgaggcggcagcagggccgtcccctacatttgcatagcccctgggacgtggcgctgcacccaagcctcttctcagttggagggaactccaagtcccacagtgccacggggtggggtgcgtcactttcgctgcgttggaggctgaggagaattgagcctgggaggcgggtccggagagggctatggaaagccgccggcggggaatcccggccgtagagggacagtggataggtgcccgaggcctacagctggcctggggctcgtgtctgggcttcggacgttggggcccggtggcccaccctttccgtagttgtcccaratggagctggaattggatgctggtgaccaagacctgctggccttcctgctagaggaaagtgaagatttggggacggcacccgatgaggccgtgagggccccactggactgggcgctgccgctttctgaggtaggttggggttctgactggggaaagcgtgggatgtccatgaagtcaggtgatggtgataaggtcaaggcctgttcattggaaccctgcgcaggtaccgagcgactgggaagtagatgatttgctgtgctccctgctgagtcccccagcgtcgttgaacattctcagctcctccaacccctgccttgtccaccatgaccacacctactccctcccacgggaaactgtctctatggatctaggtgagtctgaaataagtttgcggggaggacagggttcatgggcctggctattcatactttcccttttgcagagagtgagagctgtagaaaagaggggacccagatgactccacagcatatggaggagctggcagagcaggtacttgacttgattttcaggagattactctcacattccccaggtgggggcaggattccccattcctctctgacatccccatgcaactgccgtccactttcttgttaccctaggagattgctaggctagtactgacagatgaggagaagagtctattggagaaggaggggcttattctgcctgagacacttcctctcactaaggtaagactctcattggttgaacaaaggctgaaaagggattaaaagtcccaagtaggcaaattctgttaactttatatcaataactttaaaaaaggattgaggtgagaaacttagtagatttattgctaataggaagttgaggcaggtacacaatatgccagatgcaagggcagatcctcgtttttgttgggcttatacaaattttggtgttctgttaaaaaaataactcaaaattatcagtgcaacattagtattgggccttggaaaggactgtgtaagtgaagggccttgacacttcgttggcttcatagtaatccacctcttgctgaatggtagaactgtttagagagttcaacagggttggactaagcagtacatgaataaatgtaaaatccttagttttcagttttaagcaatgagtggcaacttcacaagcagagtactggggtactatgatgaaatcagtgctcattaatagaaaggttacaggaatatatatatattttttgacaaggtcttgctctgttgcccaggctggagtgcactgatgtgatcatggctcactgcagccttgactttctgggcttaggtgattctcccacctcagcctcccgagtagctgagactacaggtgcacactaccctgcccggcaattttttttttggtatttttagtagaaatggggttttgccttgttgccaggctggtctcgaactcctgggctcaagtgatctacccaccttggcctcccaaagtgaagaattttaatttcttcaaagtacaagatgagtcagcagtgtgatgtggctactaagaaagttcatgggatttggaaactgtagcaatagagttattgtctctacaagtcactctcttgctttccttgatactggctagagcacatctttgacagatactaagaggatgcagtctatcctgagaagatgagttaaaaattttgtctttttttttttctttaagctctgaggaaatgttaagtgccttaaaatagctaaacagggtttattctatttggccccagagatactaggtaagtccaacggatagaaattataaggaggcagctgttggttcaggataaggaagtttttatttgcttgtttgaagacaggttcttgctttattgcccaggttggagaatagtggcgagatcatggctcactacagcttcaacctctcaggctcaagtgatcctccttcctcagtctcctgagtagcagggaccacaggcatgtgccaccacacccggctaattttttatttttagtagagacaaggtctcactatgttgctcaggctggtctcaaactcctgggctcaaccggtcctcctgtcttagctccccaaagtgttgggattacaggcatgagccacgtcgcctgaatactgcccgaccagktttttttttaatagtttaaaatggtctggcttgttagggttaacacctggtcygtggaggcattcagaaagaatctgaatgcctgttggtcagggaagctgtagaagggatttctgtattggaaagagattgatctcagttgcgtttcaactcctttttctagagttcctctaatgatatccctttccctgtttcctttcagacagaggaacaaattctgaaacgtgtgcggaggaagattcgaaataaaagatctgctcaagagagccgcaggaaaaagaaggtgtatgttgggggtttagagagcaggtatgaaagggagagggactctgttgtaagtattaggtttttgaagggaggatacaggccatatccccgtatctttgttatttcccccagggtcttgaaatacacagcccagaatatggagcttcagaacaaagtacagcttctggaggaacagaatttgtaagtatccctccaaaccattcccttcctatgcccctcatttaatgctttctcactctttcccctgccctacacttgatttctaactgggcagctgccttcactaggtctctgattccaagaagctcccagtagtgaggaatacatttacaagtaactaagaataagttaagtaccaagaaaaagaaagggggtaagaaagacgtcatgggctttcatagtagttaggattctggggttgggttgggaaagcattctaggcagagagaaagcatcctaggcaagaggactagtccagcatagtcatcttgggctggaactcttaacacacatgagctgggacagaaggtagagaacatagaaaatgcctggtgaggattatgtgcatagctgatcagacagtggggaacgactgatgatattygcaaaggaggttaagtcctggcagagtttttttgttttgttttgtttttgctttttgttgttgttgttgttttaatgaggaacttcaggcattttgtccagagaggaagaagtcgtttgcaaaaatagaatgaaaagtaagagagaggatccagtgcagagatggaggaggtggcctgaacaggagtttcactgtgtctyaggatgctaggccaggggatgctcactattggcccctctcttcctctaggtcccttctagatcaactgaggaaactccaggccatggtgattgagatatcaaayaaaaccagcagcagcagcacctgcatcttggtgaggatggtgatgaggggagaaatccttttctcagttggtggggacagggcaatccagagcccttcytcatctcctttttcctgtgcyctaggtcctactagtctccttctgcctcctccttgtacctgctatgtactcctctgacacaagggggagcctgccagctgagcatggaggtaagaggcttaaggatagctctcagacagggcaaggggagaggtctgggttggcctctgaagattctttgtctcctcagtgttgtcccgccagcttcgtgccctccccagtgaggacccttaccagctggagctgcctgccctgcagtcagaagtgccgaaagacagcacacaccagtggttggacggctcagactgtgtactccaggcccctggcaacacttcctgcctgctgcattacatgcctyaggctcccagtgcagagcctcccctggagtggccattccctgacctcttctcagagcctctctgccgaggtcccatcctccccctgcaggcaaatctcacaaggaagggaggatggcttcctactggtagcccctctgtcattttgcaggacagatactcaggctagatatgaggatatgtggggggtctcagcaggagcctggggggctccccatctgtgtccaaataaaaagcggtgggcaagggctggccgcagctcctgtgccctgtcaggacgactgagggctcaaacmcmccacacttaatggctttctgggtcttttatttgtacccatgtgtctgtcacaccatgaatgtacctggggaaatcaactgacctccctgaacatttcacgcagtcagggaacaggtgaggaaagaaataaataagtgattctaatgctgcctaggtcaccctcaacccccatttactggcacarttgggtggagagaagggaaggggtatgattgtcctgatggctcagggttgcaggaggttcagaggggaaggaggaaaggccaggctggaggctgggctgttagcacttccctcccmcagttcagacggctcactctgggctcaggtttgccatggcttcctttggtccaaacataggccctgtccttagtcctgtgccctgtttgacttttggccaggaggcctttttgtgctgctgctgttgcagggctagctgcatggcccatatgctcagtggccgcatgtaggccagtgagcggaacactcgctgctggcagtatgcctctggggtctggaaggccagacccaggcgctcccacacggtacggtagcagccttcagctgtctggaagccctcccaagtcaggccctgttgggagagatgacagtcatacatactaacttggcaccctctgaagagccacttccactggatagatggaggcagtagagtctttgccttcaaggagctcccagcaagtggaggagataactatgacccacagacagaagcctgaaggcaggagctggaatgcataccagggaaaaatgggaggctttatagacggacaagatggcattgggttatgccttgaagaaatttggtggttgaggaagttttctgggccaggmtacagatggtggagagatgggaaaaggagtgcattacctcttggatcatggtagctgccagcccgtagaccacacccacccagacttcatcagactgcacactggatttatcagggacaccatggggctgcatcccattcacagcccccatggcccctcctgcaaaggcctggacgttcagctcaaagatagtttggagagcacggaccacatgttgggtaggaaacacctggaggggcaagggcaggaacatggtctcatatacttacttcccacctccagggaaaacccatttttctctctggctgctcctcctcctctctcacctcagtgtctccttctcctaggccacaggccttcaggaaccactgtccagcacactggtcagacataacactaygagactgaggccgagagctgctgtcatagttgtaatagcggcctggagtcgaggaagagaaaaataaggctcctggtgtcctctcagctgccttaagactacttaggctccccgaactcaccattccacagcagtctctcataggcttcttggccccggctgaggatagaagaaaacttatcctggatgtcctgtgccccacacagagcagccatctggaccatcacagccacagctgccagccacagccctccacagtaagcactgatcagggacatgggtttgggggtcagactggcagctccagctgctcccatgccgtgtaatagacaatgagtcattctttcttgagccctacaatcccttgttgcccagtttctcacctcaggcctcctggaaacccctacccgctaacctggggcctgtggtcacccatccatcataggtctggtctgcatagcctccattttcaatgagtccatcatggtccttgtcaaacttcatttcagattccatcacagcctagagagggaccaagatgttgaagacctaggtaccgaggaaaggcaacaaccagctaggctcttcccagacaccaaccatacccctggcacactggccactgcatgtgcatcccttactagacacacaggccacatgtccttcaggaagttttgatcacccgtgaggtaatagtcccgataaacctgcagcacaaacttcaggttcaggtccttccaatcagcagtatcatggattaaatatgcattgacgcggagccatggttcatcatctgtgggagaggaggggacttgggtcacttgcattggtggayagggtagagggtgcaaaagttgagggagggaagctgaccttggggtggayttttacctgggtccccaatatcatgggggatgacgttcctccttttcacaggtgccatcaccccactcatcaggtaccgtcgccgtgtcaggtcctccctgagagtggccagagctgggggagcagacacagaagggaggcagggaatgggyatgcctgaggaggggcacacagctatgtgtgtgactgcagtggggaaccagtaagcagcatgcagatacgtatgaagggaagggaaagaagagacaatctgagggaccacagaagttcgggggtatggggagccaagagggcagaagcggcacaaaagggatcctcacccatgtcatactgtaggctgagctcaagtttgggccagagcatgatgagggcaaaggaagcataaaagtggacatcatatgtgttgtacatgcggtactcctggcctggaggaatgaatgagacacactgttgccagaattsctgcttccccttcaaacccctctgtagcttgtcctctagatttagaggtggggcattgttactagtccacacccaacaccccctcatcctaaccaataccctggggtaggcaaatccatcatcctgacttggggatggcctgccatatcccagcccaccagcatcctgtaccctcaaggtagccaaatcgaccgtagtcccgtagggtggggcggaggtgacacatgtttctgcccagctcctctggtagggagtcctyaagaacttccagccacactgtgcctccatcagccaggaagtatagttcattgaacagcgcagatttgtaccaggcaggcagtgatctgggaagcgaggaggaggaaatggtttaaggaacatgtacctcccaagatggaaaggatttgggggttcagcagagtrggatcatcaaatgaatcccagtgcaagtctactgactttggtgggtggagagtaaatcgaggagtcccatttggagtgagtgcccaggagaaaggcaagaaatgggccccactggcacctgtcatccaataccgggctctgccaagctgagatcctctcttcccactctgcgtatcggcacagtgcatagtggctgagggcaggtgctgcatctccatcctggccaaagaaccttgtataccgcctggggtgggaaggggaaggatgaacacaagccccaggtcagagccccagcactctggatccttacactttcttggtcccctcacctgtagtggacttggcctttagctccaaacatgatcctgggcatgtcccaagccagtgaaaactccaggcggcactggcctcgaggtcgcaacttgctggaaacacacacagctccagcaatgcctactcctttctgcgtaggggtgctttggcctgagagaaacacaagagaattcaggacaggagccccttcagccccagggatagggatccctaacatggaaacaaggcctacttattaccaggcctcccacccctggtcccaagacagggacaacctctcttcccaccatctcccagtcagaccccccatcaccagtgggagagtccagctgtccatcctgaagtagatcctgccacacctgctgccccgtgctgtcagggtcaaaggctgtgatgtgggttaccrtggtagctgcctgtgaaggggtcagggactgtgagggcaggctccacgagtacactgggtcccggctagctccccagctcctcttacttactcttaacctcccaggcccaggggcttacaggagtatgatgagggtggatgaagagaccatgctggggtggaggtggggttcaggggctaaggtayagggcaggctctttccttaccgtgactcgtgcagccacagccatcgtgtaggggtttggaagggttggatgatgcaggagcagcccccggacagtttccccgctacgctccagacagaagggctcattccacaaaccccctggggcatcgtctccaccacccagtccattccgcatggagaacatgatggacacatctagagcttcgtccccttcattttccacatcccacacaaagactcctacaggcaggctgctgtcctgggggcagaagattagactcagacggtcccagtagagcgcctcctgaccccactctgctaggatcagtcctgggcacacagaggacctgactcaaatactccccagtgtactcttcttttgtccacttgcatctccccatattcccaggcaagctgcctagcagggaatatagaagaccagaaccagttgggcggtggttctgggaagccagtgtgatgttcatggctccaacctccctttcacaggccatgcagtttctttttttttttttttggggggtgcggtggcgcaatctcggctcactgcaagctccgcctcccgggttcacaccattatcctgcctcagcctcccgagtagctgggactacaggtgcctgccacaacgcccagctaatttttttttttgtatttttagtagatatggggtttcacgtgttagccaggatggtctcgatctcctgatctcrtgatccgcctgccttggcctcccaaagtgttgggattacaggcgtgagctaccgcgcctcgcaggccatgcagtttctagcagaggcaggtcctggggaagggagggcaatggaagatacagatgtgggggcctcacctggtagtcatggggcaagatgggtgtgatctgacggcaggtgagggtgacattctggccaggaagctgatagacagtccaggctcggggatagagggcatggtagaaagcaaagtacccacacaggccccagttccagctgcggaggacacttgggcgctccagggacaggacttgctggtacacagtctgcccttcccgacgcaggcacactgtgaacttaagagggcagataggctggaacggggtaaaccacagggaccacagactaartcttccctctcctcaaatcagctcctcccctttcagagcctgcaactgttaccactgcacyatcagcttcaagtcatcccccaggctcagtgaatcaccaagtcctgctacctccccatccatctatctcccaagctttctctcccttctccactacggtggtgttagcacctcacttaagcccaatctcctgctttttctgtggcccttttcatctgggtagcagagtgatctttctcacaggcaaatcaagatatgtcagtccttggttaggatgtttcagtgactccccatggccctcaggctaaagtctcaactcttgcctggctttcaaggcccttcttgagctggcctctccctgcccatcagactcatcacctgttcaagcacctatagtctgttcatataaaaacactcactgttccttgagcacactacattctctcctccatgcctgtgctcatgcttgttcgctatctggtgaaacctctcatccttcaaagcctaggtcaaaagccatctcttcctcctctacttcttccagcagtgagtcattatgtgtgcccccctccccttctattctagcatttggtgtattatgttataatgtattgactgaccattctgtgtccctgactgctgtatggattcttctgagggtagggacattttttaattcactgatgcacccttcttcagagttggcatgtatgtggagggaatgagcgaaatctgcagcaccgtccctttttccacagtatactatccacccctctccttttagcactgatgtggtctcacagtctccatttcccctaagtcttattttctcaaaaaaagttttagctcttggagggtaggagctatgagggattaatatccctttccctggttcaaactatgtcaaatatttttattgtatacagtgggctctccatatctgtgagttccacatcagtggattcaaccaaccaaatctaaaatatgtggaaaaaaagttgtgtctgtaccgaatatgtacacactttatttactgtacggcacaacaagggtttatgtaacaatgtatgaggtattataagtaatctacagatgatttaaagtatataggaggatgtgcaatggttatttgcaaatactataagccatttcaaatcaaagacttgagcatcctcggatagcaggtcctgggcccaaccccccatggatactgagggacaactgtataaaataatttttcattttgttggaatggtacataatggttaagaccacaagctcttcaccccagaaagaaatggttctgaatcccaacctttccatttaccaaccttgtgaccttgcgcatgttactaaacctctctggatcttagtgtcctcatctgcaaaatgagcataatagtggtacttcccttgtaggattgtttttaatattaaacagtatacaaagagcctagcacagtgtctagcacatgttaagcatgcaataattactttaattgtagagtcacaattctggaagccattcccctcaggatacctaagggatgaggcagagagggatcttgggacatgggcagggctggtaaacgtgaaccaggaagggtattgtcattaattggactaaagatttgctagtcatttttcctttgaagatgaggctgaatgctggagccaagaaagaggaacttcctaggcaactctaaaggggcggtcaactagagagagatgatgagaggcaggacacatacttctggcaatttaaggcccagatgtgatgcaggagcaaaaggaaaaaagtgaagcttcagaagagggaagaaggctagagatctaagcctgggagagaaggagctttttagaccctaagccaggagacctccaggggagtgatcagcagaggagctgaactttggtgaaggttcctcaatcagggtgaggaaccttgtactacgtgtctttttttcccatgagtttatagactttgggttttcttttcccttccagtcctacaaaatgttctttcaggcaggttaagtgatttgggaattctctgcattctctgtggttgggggctgcctcagctagttgggttggggcagtgaggtagacaggaggcatttactagagaaatgccagatctgtttactctttcaaggaatgtgtgcttgtgtgtgtcttattcctacggtatatcctagctcagggctgggcacacaggaagcatcccgagagtacttattagattgaatcttattcacatctaactgctaccttctacactagccaagaggtccttccttcttggcctggggaggtattgtcctggcctctccacctcctggctcttacttggtcagcgatgactgtccggtgctgatacattccagggttaagctgccaacgacagaactggcctctccagccacgggtaatagtgcctcccccgatgccacccaagggacaacctagagaaatcagggtggttagtggggtattgggagaggaaaataagcccatttctaactttctagactataaagcctggttcctctgaaaacctaggggatggaacagtgcaatytgcataagctggaagtctcttcctaactgtggtagacctggaggctaggccttctctgagcagrgcagagatggggtggggctcaccataaatctgtcttaggggtacagaattgatcatgtcgatgaaaggtgtcttcttttccacatgggtcttccggtaccaccactgcaggtacctgaggagcaagaggcaatgtgagtggaagggggcaggtgggcagctgttcacaggctgagtcacctgcctctctctgtgacctcccattaaatgtcccaaggacatctgctttcaaacctttcttcctcttgatttctatacagttcaaggtcccttcatcttcccagtcaccccagctgaagtgaaggagtggctttgtttctctcctttgttctcctcagaaggggctttctgatctctccttacctctctagcaccaccaccactgctttatttccaacatcaggagcttctgtctgacgtgctgaaaggaccatttatggtttcctggcctacagcctccgcccccaatcccctacctccaaaacaggcataggctgctgggaataactttcttatctttatttttattatttattattttttttttgagacagagtttcgttccttgttgtccaggctggagtgcagtggctcggtcttggctcactgcaaactccgcctcccaagttcaagaaattcttctgcctcagcctcccaagtagctgggattacaggtgcccgccaccatgcctggcacatttttttgtgtttttagtagagatggggtttcaccatgttagccaggctggtcttgaactcctgacctcaggtgatccgcccgcctcggcctcccaaagtgctgggattagaggcgtgagctaccgcttctggcctttcttctttttaaaatgatcatttttctttctaattatgaaaggtgaaagggggaaaaaaataatctcacccatagacaatcagtgtttatatttatttctggacatttcctctcaagccttttttttttttttttttaaattcaacatttaaactgtgaagctttctgattttgctcttggtaaagccttcaaaaaatcccaacattttcctgggcttggtacagccctatatccaagaggcaaatgattgaggctgttttcaataggcaaacgattctgttttcaaggctctgacatctgtcccagcctatcttctaatcttatttcctacaaattctcattccagatgggtcctcactaagtagcccctgccctgccagactctttcccatttccactctcctgcctactgccacattatgcctactgttcagtcacaccacttctaaccaaataattgggtaagtaacccctaagtcccagtttcctcatctacaaaatggggataccacctgctctagctatctaatgaaatggttgaaagatcaaatgacataatagataagaaagccataaagtacaggtatgattattactcatatatacaaactgttatctcaattcctaatcagacattgccttgttatttcaatgttcctcatgtgaggctgacatacttttaagttccttggggaaagggacaatgacaaagactagctgaatattaccctcaggtccaagcacagggtaggacatatggtctgcagtcaatgcatatttgccaattttacagatgaatgaacatacaaatgatggggcacaagagagataacagactggagcagaggagaagaaatgtgattaatgaatagggacagcggccaggcacggtggctcacacctgtaatcccagcactttgagaggccgaggtgggcggatcacgtgaggtcaggagttcaagaccagcctggccaatgtggtgaaaccccgtctctactaaaaatacaaaaacattagccagctgtggtggcaggcacctgcaatcccagctactcaggaggctgaggcaggagaatcgcttgaacccaggagacggaggttgcactgagctgagattgcaccattgtactccagcctgggtgacaagagcaagactgtctcaaaaaaaaaataataataaaataaaaagggacagcacattctaggggtggaaagaagagggaagacaaaggatgggatgacaggaaggcagagaatcctctctgccagcttagagaaaaccggactttgaaactagagaccagaaaggactggtagagggagggtgtggccgaggattagggcaaccagggagagtaactgcaatctatgaggacagacagaacaaaggactatctggcatggaacaagcactcaataaatatttattgaatgagtggactctggctggaagggagaacaattgaaattgagttcttacgaaggtaagacccagagaattctgtcttgctagagctcctggtcagagtgcccacagttcagctccatcttaggagctctcttactcccttaatatggtagctggccattcctgacctatttggccttctccacaatttcaacctcaactcaagagttatcacttagaattcttgtctcacctgtgctttctcctcataggaactcatcctattccaaaagccttgtatcagtaccccccactctatcctggaatggggagccagggtccagggggttgagcacagcttcaggcctctatgactcagttcatatttaagggctaagaggctaggatgcccatcttttcttgatctcattgttcctaccacatgcaactcagtgtacttctctatgtacactagatcctattttgatgcaaaaacttttggggtcaaacttggactgaattgattccagaagcagcctggagggatgattcttctctgctacaggctacccacaggcaccaacaaagccagatgtgcaggcagcatcaggcccttcccactccccagggctagggttagataactgatctccccatcacagccccacagcactgactggggaaatgaagggtctcctactctagaaactgtaagggcagggtttcccaagctttatgcctccctccacagttctgtgtgtattgtgtagactgagtcaggatgacctcagggtgatgctttctgtcctcacatccacctgttcctgttaatgggtctggctcctcatcactagtctttgaactcagtggggatctagatgggttctacatctatggcagtgcctctctgataaatgacttaatatcaagagctctctatcccagaacagaatgacagcaccttctcatcacttcagaggtgagggcagggaggctcttcttacctactccctggagctaaagcttgaagaaagaagcagtagtgttgggactctaacagtgtgtctaatgaggtacagagaatgccccagctgcttgtgggaaataaggggttgagacccccccacccccaaataaaacaacattgtgttagtatcacagcagccagattatcctttcctaccttgccacaaagtatagctaatcccaaagggaagtcattggaaaccagtatgtgagaagagcctgaatgggaaaggctgattgcatgaccaaatgttcctaccctttccttctgaaaagacaaaacactgggagggaagggtgttgcaaagagatgtgacctggtctcacggtccaaaaccacaggcctaaaatatgccagggatagggaccgcttcactcagacaagaagcccaactgctttcttgccctttcccacctctgctagaagttttgagctggaacaaagtgaagccaaaggcattctaggcaatggggtctactcacctcaagcccatgcctatatgctttatcatgttgcttagggagacgttgttagcttgaaagggtttcctcttctctgtaaactcatgagccagacagatgcgccagccaaagggaggcacctggtagcccatagctttaccctcataggaaaccatcagctgcccagagtcctccggattgcagcagtccgtctcttttgggggtcggctgtcttcgggactcttacagtctgtaacctgcacatccttggtgccgccagtctcttcagggcaataaacttgtggatcctctttggcacagcttatctgctccgaggctgggacgccrgttcccatgttccctggatcctgggtccccatgacctcgatggcgccaagtcccgagccctcggatactaagtatctcgccagcctattccagatgcgggcgccggtcgttgttaggtatcgtcccggagggccgggcgttggggaaagcttaaatgagctggtgtttcagtggagccggggagctcttgcttcagtgggggcggcgacagcaaagaagccgccttgggctctccttcggttgtctctgtaggtcctggacgggaagggtcgggcctcgtcgtcattgagccgacgattagctcgcccggccaaagggcgactgggcccgcagagaggggaggarccgcggggccagcccaccaggcaccgccccgggacgggcccgcaaggcaccgcccccgggacctcggcccggcccctgggccacggcaccgggtcccccaggattgggcgccaggtcccgccggccggctccggggcagcgcccgcgcccaggtgccagcccgtgggaaggtgaccctgggcgccgggatgacccgagccctttccggtctggcctgccgggcgcttccggccggaagggactccgcggagggtgggggaccgaagggaagtcccgcctctaccgcccagcggacgccgccgccgccgccgccgccgcgtacctagccaggtccctgaggggcgggcagatgaggcctaggggtgccgatccctagtgtcgactatgcgaggtgactagcggcggtgatcttgggctgggacgtggaactttgaggaaagggggagcggaggccagtttgggaactccgcgggggtgcccagggagaagaacccgtcgcacaggggctggggtctagggcccagagcgatgtcctccccctgggcagtactgagtcttcagtcgcctccctcccacccgcctacccctcctatatccaggagctccctcgggcaccacggtgctgaccacccctgtcctcagccctcagccctaggtgctcaccgcaacgcccctccctgtcaaggtgctgacctccgccccgccttgtttccttctagatctgattccggagctgccatgattgaagtggtagcagagctcagccggggtcctgtatttttggctggggaggcgctggagtgtgtagtgaccgtcaccaacccccttccscccacggccacttctgcatccaggtggggatgctggcactgaaggtggtggcccttctgggaagaagccagattatctctggggctgaggcagagctcaggttgtcctgtagcgacaccacctcctcttgctcactgtgctgtcattgtaggagagggctctttaacagaagatgtggatgacatagctgtacgctttccttcccctcccccgttcccctttttacgcacagtctgctactctttatttaatggtttctctttgggattgtggatttcctgatcactaggacagccatctaaccttgttggttaagatggtgtgatagggagcttgggaaagcatttgtgaggtcaggaactacctctgatgcctccttttccttttcccacagtgaggccctggcctgggccagtgcccaaatccactgccagttccatgccagtgagagtcgagtagcactgcctcctcctgactctagtcagccagatgtccagcccgacagccagactgtctttctgccacaccgaggttagagaggggcatttgcctgggagagggggggtgcggagggtgtgtgtggaggcattgtcacccatgggtgaagttgttaattgttcttgttcttatagtccctgtcatgctggggatgttggggagcatgactattgctttaggggtagaagactattcccatttcacagcagggacggagggcctggcagcctttcactatctccacttgccgtgctagtcttgttcagtactggacaatgggtcattaaattagtcatttttacctttttcaggtgagaggggccagtgtatcctttctactccaccgaaaattctattctgtgacctgaggcttgatcctggagagtccaaatcatgtgagtgattgtccccatccctgaattgccttctaagtctcctggagggaggactcctctggtgcctctggctgtcctgacaactacttcccaaccagactcctacagtgaagtgctgcccatagagggaccaccctcctttcggggtcagtcagtcaagtacgtctacaaactgaccattggctgccagcgtgtcaactcccctatcactttactcagagtccctctgagggttcttgtgctgactggtaagcaagggctcctggagggaagggctggggaagggcgatgccaaagcagaaattgtcttagagggcttgcaagagggactgcagggaaacttcctggtctcagtgacagtgctagggagttgggaagggagggagggttctggagatagagatgtaaacctcagccctggcaccccttacctttagccatctcatgttagaatctaaaaccctaacctctactctcatctctgttccctctcagcattacctctccactcattctttctctaggccttcaggatgtccggtttccccaggatgaggctgtagccccatccagtccattcttggaggaggatgaaggtgggaagaaagattcatggctagctgagctggctggggaaygcctaatggctgccacatcctgccgcagcctccgtgagaattctttcagaattgtcctaccccatccttcccctcattgttttcccatctcagagacagtctcctaaccaccacacacttctgtggatccactgatacctgacacctccaattttaaagaaaagccccatcttttggcctgtggtgcccagtcctagacgttatccagtatgtagactccaggcttatagtgtcctattctccccagatctatacaatatcagtgatggccgagggaaagttgggacgtttggcatcttcaaatctgtgtacagacttggcgaggacgtggtggggaccttaaacttaggggaaggaaccgtagcttgtttgcaggtaagaagggagcagagcttcttacctgctggggtgctggggttgaagggctagggtggaaggcctgtataaagaggggtggcatgtagaaggggatagtggggtcatccagggtccctttgtaaaacagcttgaggttgggctgtcctctcacctacagacagcacttcctgttagcacacacctgtctcttgctcccagttttcagtcagcttacagaccgaggagcgtgtacagcctgagtaccagcggcgacgtggggcagggggtgtcccctctgtgtcacatgtgactcamgcccggcaccaggaatcctgcctacatacaactagaaccagcttctccctcccaatccctctcagctccaccccaggcttctgtacagccattggtgagaccctcactgttactggagaagggagagggggacagtaaaatgctgtgctaagggagggtgtaatggatcctgattccttatacacactcccagacatacccacatctagcctctgacccggaacagtttctcagaccttcaacctcttcctgtttcttagatgcactgacccctaaactcctaacagcttgatagaactccttccccacacctacctactaggaccctgtgatacactgatttttgattacttcatgctacctagacttgactgcctcactcttgggttattaggtacttaatactgctatcttcagctcacatctgtggtagtacccattgcttcagaaaaacccttaatcacagctccctgccctgtgacttttccctgtcttcctgaacacagattgttttcttctcattcactaactatatcctgtcattggcttttactcctgctagcttctgatgcttctaccttaatctttttcttccatagtgtccttgaagtggagattgcattttgaatttgtaacgtcccgagaaccaggattggtactcctaccccctgtggaacagcccgaacctaccacctggacaggacctgagcaagtacctgtagacaccttcagctgggacctgcccatcaaggtgctgcctactagccccaccctggcctcatatgctgccccaggccccagcaccagcaccataaccatctgaaactggcccaccctggtgctagttccttccggatactgagaactcagcacctggactctaatgggacccactttttccacctggggtccaatgtcgtggacagtgagagtcgggctttcagctatagcattaatttatttgttcagaatacattggcagctgctagtggtttccctggaagtggcagcagcagtgagcagtcagcagatggatgatcagttgagtttagctggagtggggagcaggagccccaggaacaggggtgttggctgagccccattctgggtcaggccctccccctttgcagggcagccgagggtcagatttttgcaccaaggagaactggcaggttcctgcctcctgacgtacctcacacccagccgggaagtcgatgggatgctgggacctggggaaccaaggataggggaaggagtcagcacagtgaaaggctgcctttatccctgcccacatgttccctctctcacagttttccccccacagagcccctttcagtggccccttggtcctcctaactaagctgtcacctaccatatgtgggcctttttgttttataacaggagtattttctctccaggtccaccccaacctcccctgatttatagcctgaagccttatctttcacactagtgttggtcccttcaggtttggcccatcttgtattgctcttctgttcattcttacatcacagcaatctagtcactccctggtcatccctcagtcactcatatcagagtcattctctctggccatctttggtcactcacgtgtcacagcagcccacgccaacaggatgcagacaggtgcaatggaaacagtccttgcggagccaagactcacccagggtaaaatatttcccctcatagtgacagggggctagggaagaacgggaaatgttagtaggtgtaggagtgctgatgagaggcagaggctcttctggtctggggtggagacagtaagtacgcactatccccgtatttagtttgtctttcctgtttcacagctggaggaagcctgggtattttgacacgggatcatctgtaaggccccatcctccctgtgccctctctgctgctcctccattcctaacgcttcaccccactttaccttgagcttggaagtagcacttgctgtagactcctgggtgctggaggagtagagacatcaccaagcagatgatcccccagcctcctaggatccccttggcctgtccagcccagagcatccttagggccattgctgctgcacagccctctcagacccttcttggcctctgctcagctactctggtcttgactccttgactttgctttgcgttgctccttgagtcttagtttctgtctttctcccctgggctcctgtctcacactatctccctgccctctgctctcacaggctggggatgtttataaagtgaggaccctggccccctgctgagtagagctggaaaagttgtaactctgtttcctgaggtgagggcatgaaaacaagaggtctagctttaacaagctgtgagagctgattcatgccccggcacagctagagggagggaggtggccatggagggggcactgg

SEQ ID NO: 6873 - DNA, 65273 bp, Homo sapiens
tcacgccactgcactccagcctgggcgacagagtgagactccgtctcaaaaaaaaaaaaaaaaaaagtgggattgggattacaggcgtgagccacccagcctggcctgttcctgtcttttgaccttgaagtagaggtttcaagggccctcttatccatcccacctcctggggacagcagagttcttgagaacttgggagacaggcccataagcacaacctgagtaagcaggcggtgtggtggaaggaatggaggtatgcatttgataggggtagtgggctcagggcaggggtctttttgccatcctgggggtcctaaaaagacttcctggtggagatcacattggagttgagtcttggaggaagaacaggtgtgatgtgggtgaagaaaggaaagcatgtttggccatctccagcctcgatggtggtgttggttgtcaggaacagaagcgaacatcttctagctcaggtaaaagtagaatttgtgtgtgtgtgttatttttattttttagagacagggtcttactctgtcactcaggctggagtgcagtggcacgatcatggctcactgcaggttcaacattctggggtcaagtgatcctcctgcctcagccactcaagtagctagtacttcagctgcatgccactgtgtctggctaatctttattttttgtagagatggggtcttgctatgttgcccaggctggtctcgaactcccggccccaggcaatcctcctgcctcagcctcccaaagtgtggggattacaggcatgaaaaagtggaatttattgaaaagatacaggggcatcttccagacctaagcaggcctcctgggcaatgggctagtcctgcagctctccttcctctctgtggccacagctgctccttgctggtttgggcatgccggcttcctcagcaaggctcctagtagctcttcctgcttaacctctgctgtccagagtggtgctgacggccatggctgggtccaactccatatgaacccccccagggaccagcacagtcccgccttattgcataaccctcgagggcacctgtttgaggtgttttctaagtgatctgcctctcctggagtacagcagtttgaatggtccccctgcagttgtgtaaagttgcaatcctccaccaacaccatgtatctcagtcttggggtctctcggttctaattctcaagaaggagaatcaggctggttcagtgtgaggaaggttttcagccctgatccaggtccaatcagggggttgggggtgtgtgtgtgtgtgtatgtgtgtgtgtgtgtgtatctgtgggtttggcttgatgtgtgtgtgtgtgtgtgtgtgtgtgtgtgtgtgtgtatctgtgggtttggcttgattcacagtgagtagcctgggctgaagatagattctctaagaaggggctgtagcagttgggatcctggtgggaaacagtaacaccctccaagggataattaaaaagacaggtgtgagcagcttcagagaaaaaagaggtgctgaagcacctaaggactagtgagctgtggggatccgtgatcacctctgggtgtgaaaagtgagtgggggaaaccattactaacaccacgggtgagacaggccatgcagcaggagctgtgcctcacggccaggccaggccaggtgggaaggctcttcctcgctcacctgaccctgccgcactttggtcaaatccaagaggagggagaggacatgcttagcgggtgtggctcagaggggagcccagacagagaagggcaaacggagaatgaccagcacaggctgcagaggccatctggtgcggagggagaggagacggcctaagccaaggtagggcggtgtgaagcctctgggcgttccttggtactggaggacacggtgctagaaagcaaggggaaactgatgcgctagagaggccggggctgcagagggccttgggggctgccagcagaagctcagaccccatcctgcgggggttgcccaccaacggcagggcacctggccaggaggctgctgcacagacagctgaaagctaaagccaaaaggcaattcaagcggatgaacttcgggcacagagtgggaaatatttttggctggtggtgtccttccaaaggcctctgaatcccaccacatccagaaggccttttgttgatgagggtcagaaatccaatgaaactagcattggccaaaatagttattgcttcatggaacttggaaggccagggcaaagctggtttcagggactccggaaatgcaggagatagcagcatgaatttctctttccatctctgtctctttcactctttaactcgacttgtcacacaccttgctgtaggacgggggaagggagaggccacagcttcctcatcgcagtttagtgaccccaaaggaaagagaaaaattgcttttttttttttaaacacccatctataaagacccagaggagcactctagtccagctcaagtcacaggtccactgtagaccaaccatttcagcttgttaaagcaaatgaaatatggcctgagaaggactccgtacttttatatttgagtccttgtggacgaaccgtaacctagcttaataggcacgcaaaattgaaaacctaacttagtagtatgcacttgtaacaatagctgagtgttggccaatcccagcggccatacttcaaccactcatagactgctgagtgttcaaactgttcaaatacggcaaacgccgagctgcaaccaatctcactgtttctgtacctcacttctgattcctgtatgtcactttagtttagtttttttttttttttttttttggagaccaagtctctctttgttacccaggctggaatgcagtggcacaatctcagctcactacaacctctgcctcccaggttcaagtgattctcctgcctcagcctcctgagtagcttggattataggtacccgccaccacgcctggctaatttttgtatttttagtagagacagggtttcaccatgttggccaggctggtctcgaactcctgacctcaagccatctacctgccttggcctcccaaattgctaggattacagaagtgagctactgcgccaggccactttactttgtctataaatttgttctgaccccgggagtctctctgaatctgttgattctagaggctgcctgattcatgaattctctttttctttctttttttttttttttttgctcgattaaatttaatctaattgaacttgtcttaagctttcttttaacaagctccatgatgggcatctcagattggccaggcctggtccacctgctgtggcctggggctggtactgtgattgtgaggaccatcagcactgaaagaattgaggatgggcggttcacctgttcagaaggcgagggggagatgtcacacagccaaatgcagcagatgtcctccaccacgtgcatcctgtcagcacgcccgcctatggagggctcagccctttcatgctcagacaggccggtcaggaagccccgtcacagggaggctccagggtggtgtatggaaggtagtggtctgaatagtgtctgttgagcaaatgacaaaaatcaaccccagagaagcagaaaacatctaggtggcccagcctggtaagtggcaggagatggtagtagagctgtctctgcctgtcaccttcagcctcttcttgcaagcccctggtggtcccatattgaggtaacaatgcccattcttcttccagacagtgtagaaacagtgacaatgtggttatggccccctggaaagtgagcagttgatgagctctgcttatggctgctctcctccatggcagaatgcattcctgcaggatgaggtcatggagccaaggaaggtcagggtgtgggggggcttcctgggtcagagctccagagcagtgctgctccccctgccctcctccttaggtctcccatcactggtggtctcagaaatctctgaagatttcagaaatcttgaatcccttccctggtgtgaatgcaaagggaagagtctgttcctgtaaagtagtttgcagattggtggaactgagagaacccagacccttccccgtttccctcgacctttccatctctggaccccatgcagactatgcttgggtggtgacacagaagaatttagtgtttggtggacccgtttctggaagtgatggatgctgacagctggcacttaacagttatcaaaaataacattaactggagtaggctctgtgccacttagagcttaatgactcactgacttcaccccaaatccccatgaactagcattattattagccctatgttgcaggtgaggagactaaggctcatccagttagaacatgatggctgaaacctacattcaaactctggtctgtttgaatctagaactcttagcttccccccagcgactgtgttagaacagaggaatcatcagttcaattttcacctccctcctaagccttcgtggctctagacgtatggttataaaggttgttcactgctcaagggcccaggagggtttggggctggtggataggggccaaaatacagcccaggggtgccatttttctaattctcaccaaggccctatactgactagcagcggctctacccgataccatccagggccttttcagaattctgaaggcacccacggtgctggctactcacacacctggccccccttaaccatggctgccttgcactgtgacccaattggttcccatgacaaaacctgttattcccataactcacccaacacttttttgcccctaggctcttgctcctttggttccctctgcctggaatggccttctctcccgagccgcctcgcctggttctattaggttgatgcaaaagtcatcgcggttttaatggtaaaaaccgtgatgacttttgcaccgacctagtatttcacaaaacctacatttcctttaaaacccaacctgatgcctactccttcaaaatgcctttcatatcccacagttcgacttcatctcactctgcctcctctcacagggctttgtgttcgtgctggatggagcccatcatactcagcctcgcaataaaggccacctatctagtgagtgagcatttactaggcgcaggactctgggctaaacgctgtccatacttcatctccttgattcttcacgtcacagatgtcattatgcccatttcacagaggaagaaactgaggcttggaggacttaaagccttgtttcagcaggaaacggaataaggcgttctgattttcaagctgtctcctattagggctggtttcccctagatgtcatgagtaggtgtgaagtgtgagctacttgaaggcagaagccaggggggtcccccgcaatcccggaggcgggcttctgaaaatgtttagcccaggaaggagggctgccctggcccgcagctttccgccccttcccaggtgagctgcaactccaaagctcccaagcaggcccttcacccacgcgggccccagcagctccttgggaaacaggatcgctgctctgaggccgcccacagagagaccctcggagggcgccacgcaagcgaagggcagaaacgactcggggggcaggggcagggcgctccaaccacacccaggcgccgccagcttgtttacgcctctccgccgcgtccccccgcccgccagtcacgtgaccgcccgccccgccccctcgggctctcgcgtggctcctcccgccgcgccggcccttctttttgcctccttcgcggagtcacaagatctcttcgcagcctcctttcggatccttccgcccggccccgcccccctccataaaaaccctccttactttttttctcgtccaacccacatcgtcagttatgagtggaagagcctcttccttccggcggggctgccgagcgcggccgtctatccttcctttcgagaaggaggggaggtccggagggggactctttttcgtggcggaggccgccgtcggccttggccctttcacgacgggggaggtgctgtacgtccaagatggcggcgccctgtaggctggagggactgtgaggtaaacagctgagggggaggagacggtgggtgagtatgggggtgtctccccctcctttttatgggggcttcctggggcagccccggcaccatgactccagccggggaggctcggaggggctggagcaagagactcacttgcttggtagggatcccggggaaggggggttcggagagctctcccctccctcttattacacgctatctccggctggcccggccgggactggcgggtccctggggaggagaggcgagccggacggagcacttcgcccctccttggcccccgaggggacggctgcaccctgggcctcggtccctcgggcaggggcgaggtgggccccttcgtcagtccctcacttggtggggtgacaggttyacgctaggtgcggagggcagggtagagacgcttggcgggaggggaagggtcgcgagggtggggctggtcccagaacttaaagagaggggtcggggtataggggcgtggagaatgaatggaggtcgcctgtggggatcaaggactcgcctggattcggtgtctccgctgaaatttgcatgactcgctctgggtgtacttgtgggtgtttaattggtggtgaaagacagttaccttaaagtgggcaaaggggattcctaagagacagctatttgcagagcccctcctaggcgttcattcattcatttgaggaactggaggatgaagagcctgcaatcggagggaccttgtagaattaaagctctttctttgtgtttcctgttaaagagttttgctttgtgtgttttggatgtgtggtgaggacttgggaggggacgcggtcctcctaagaacaacagctaacgttaatggagtgctctctgtgtgccaggcactgtgaaagtgcttggcagtcattatctcctttggtcctcacgacaaagagaagaggcagccactgttaacacctccaatcttctcaaatgaagaaactgaggcccggagagagcagggtactttgcctaagttcacaccccaattgtatctgagccaggactggaactgctgggatctgactgactccaaagatatgactcttaaatttatctgttatttgatcaaagctggcctgtaagtgattaaaatttatcatttagccaaggtttatgcacgtgtgtctgtttaatgttgaagtggggggatgcacttggcttatccgccttagcttttgtttgggatggcagtgttgtgcatgtgaacttgttagtctaaattaggctaaaaagtatttgatagtttaataaaactgatgagtttactgaagaaagaagtcctgctaaaatccttgctggcttttttttttttttaaatagaaagcatacaaataacacttcacgttgcatagagtaagctataaaagtgctaaaatagaataatactcttctgagatactttgatttataattttgggatcaacttggagtcatctgaattcaaacaggccggcaaagtggagctgtaaatttcaggaagcattataaaacctaatctttggggagcctttgatttaccgagcaaccacctgtgattcttaaattgaacattcctgagtaaatctggaatatgcaaatgtgaaaactgatttagggttgtgtagggaaatgcacctttaacagtcatgcatcaggcaaatgaggctcctcagaaacagtgaaacattctttgctattgccctagggagctgcagaatcttcctctaaccacctggtgtaaacttaaggggtatttatagaagatgtaaacggaaaatatcctcttactaaagttaatatcttatccaaaacactcttatatcacgtgcctagaagggcagatgatgtaaactttctctgctgcatgcatttcctggtgtcataaacacttggtacgttcctaaattcctggttagaaagcaggtggctaccagccttcttgtttccataaaattagagtgcttcaggtcctgtgactcagttgtcctcttcctcactgggttaagagtaaaaactgatactgctactgttgtggtgtaatatgatgccttctgtgcatgcctggtttcattcgtgagatgaaacttaacagtcttactagggcaaatctaatatatacctctatatgtaatgtttgcagaataatgaacttggtggaaacgagatctgaaaccctagtgctcatgagaaccttgatgtacagatatttggcactatactaggtagacctacatattcggacaccttgtatatatattttggaagaagactgattcttatgtgcaccggaggttgaggaccactggcttcaagtatcattctggctattttcatttattatttatcacagaggtatttcttaaaatagcttgtagccttttatttgtgtagtggtgggtgaattttgggctctgaattagagctgacttgttcttatagctctgtcttcatttgaagtttgtttggctacaggtatgtttatttctgggttccagggccatagtgaactaaaattagcttttcctggaattaattggatattcttgaatgccgatgagccaaatatagcaatatctcaaccatttcaggcttttctagagagtcagatagcttttgaccttcagtgggtcacttaagttctgtgagcctgtgtcttcatctgtgaagtaaaagttggaatgtaaattaatgagtatttctaggcctacatttctgtgatttaaagtcctttggggtgtcatttaaatattctgactaaatcgattgagtcaacctgttaatggttttataaaaaccaagcaaattggtgactttgagcctaccctgttgggtgaagatctgtttatcatttatcctttcctttacatcataatactctttgaaaaggtaattccctataagtttcccatattataaatctctgaaaggttagtctttgcattggttttgtcatttaagtagctgaaggcgtgaaagaaaagtgtacttaatagcgttaaaatctgtggctgtttgcttgaaatgtgtatatgtagtatacactcaaacactgagtttgttttttttaatctcagatcatgaattggtaactaatataatttgggtagcatgaaatactcattctccatttaaattcatctgaaagaggtaaactgtcagcagtttgagattattctttctctggtttactttttaagactgtagttgctagaaattagtaactttatgtctgttttcatgggagagaataaaaatgcaaattttatatactgtgtataaaatacactgtctcaggaccttgtcagtttcttcttgtcctttctctcgttcagtgctaacttttattatgaacatggaatcagcaaaagataacaatactttttacggttgaatgaattcagatttacatctaataagtaaaatgtcttaaaaaccatgctttagtccaaaataaagcatagtagttactgccctacaactcacaggtcactctcttaagtaaatatgatggcagtagaggcccagaagtgttggagtaacaaaggacagttttgcccttctgtgggtgatgtgatggaagacacagaggggagctgtaggaagaacagaggcagtgaccttaatgtctgcaatcattaagactctgctactttgagtagttcacagagcatagtaacaaacttgaactgtatccattttaagttatacaatggttgtatcaatgtttcaaataccagttgttaaatggatagactgctaagcattatgtacccagcaatccatttttgtgaagtagtaatattgttataataaagtttatattttttgagtactcatgtgccaaacactgtggtattttacatgtctgataccccattaacttcttacagccttaagaggcaggataggaagaggaagcaggcttagagtaagttgcctatagtcacttattcagtggctaagctgggatatgaacctttttggttgactccacagcccaaacatttagtcttccactgtgataaactgcttcatctgctgacctcataaattaactcacaggtcaggtcagtggttcttaactttggtggtggtgggaaggtgtgtggactcagttgccctctgaaaatctgtgggaagctatggaccaaatttctcttctaccctttatgtcccatcatcaccaaaaaaattcatacagacatgggattttggatatggcttcaggtaatttatggacgcagcttgaaacccagctgatcattttagatagattactgctctaaaaatggacttaggctttattaaaaaacttttttttttttttaactagtagtcaggaaaggcccaagtcagaaggtggccttatgtactgtctgggttataaattactttgttaaatttctgtagtgtacccaggtatgtaacctgctacgtgcttgtcaggcttggcattcggtctgtgctggtacctttagcmcctggcagaattccactgggccttttccccaaggtttatgcactctatatatttttttccttttgaacctcaaaggaggtatattaatgaatgaatgttttttaccttcatccttctttttcctagaccagtggttctgaacctttagtggacgtcagaattacctagaaggccccacccccaaagtatccaattccgagatctrgtgaaaggcctgagaatttacatttctaacaaatacccaggctcctgctcgtggtgccaggaccacattttgagaaccactgccctagactatcaaactatacccttcttccctagaatacttctattttggtcctataaacctgaaacctaaagatatctcacagtttgcttgtatctcttttaggagaagctctgcgtagtgtctttttgaaatatacatggtatctgtttggcctgtattatcttagtaaataatgttgttcatgttaatagaaagtcaaaacgtaagcattatttattgaagagatacgccttaccaaaattaagctctggccttacacttaagttactagaagattcttcacctttgggataggctataagctttagcaaaccatccatcaaggcccctgatggcagaaattctgaatggagaatctggcaagttggagctctcctgccccagtttgtccttgagagggactccaactactaagacctattcaatcacacatgactacacatgttggcaggttttaccatcagctgttttactctcacatagtaagtagttatttcctacmcttttttccttccttctaggcactgataggaagagagaatgggagcaagtatcttaccctttttagatgcatttgtgctgaaggcgtcttggttcacttgatagaatattaccctaagaagtcacctgagagttcctgagccagagcggaacattaacttaacagtgtaacatttctgctctatctaactgtacctgataataaaatagtctatccatgcctggacctgtgtctgaattgtccttgaatttttatggataaaaaattgaatataggaaacaagttatagtgaagagacatstgccttcatttacacatgcagtacatttttacatcatagacaaatgtgtacaaaattatcttaggcaaattgatatgcggtcacctattttatgttacatacagtcctgaggagtcgtagagggtagtgtctaggccacatatcacagcacttgtttttgaaaaattcgaatattcacctgtaatttcagataaatccattctaaagacatcttaggtatctgccactagtattttcaaaaggtttgtgtgtactcttggctctctcacagctcataatgcatcttggctaggrcagagatatgtgaaaaaaatggcgtacgggtcctgctaatgacagctgtccatggctgttaggctagagttcatgtgtaatcctaggcatataagccatccgtctgtaaacacctaaagaatgatattagttaagatgaacagtgaaaacagattgatctatgtgccttctgtttcatctcaaaatacttaaacacagagcccttatcttcttcctcaaacctacattttattcagaaagattgcttatagaagtgaagttataatgatgaacataagtgagaacacaacttttgggtcaaatatgaaagggaaaaaagtctagatctggaggcaggtttctttttaaatttggctttcgaagataaggacgtggattgacactggtgttctgctctgccaggtgtttccatctgcattcctcccttcccctcaggaggttcacagatcacatctcactttactgaccagagtgattatgccttgtagtacccccataggacaggattgaaatacaaatgaataagtcaataaacacttaaaaatataaataagagtagaatagtaggtagcctttgacataccaacataaaattgctaccaatttagtaccattatcatttttagtgcagtaataaagaaattaaaagtcttaacattgagcattggacaaaaacactctgcttggcagggggtgggggctcacgcctgtaaccccagcactatgggaggccaaggtggatggatcacttgagtccaggagttctagaccagcctgggcgacttagggagaccctgtctctacaaaaaaatacaaaaattagttgggcatggtggtgcgtgcctgtattcccagctacttgggaggttgaggtgggatgattgcttgagcctgggaggcgaaggtcgcagtgaaccatgagtcatgattaggccactgaactccagcctgagcgacagagcagggctctatctcaaaaaacaaaacaaaaaaaccaaccaccaacaacaaaaccactctgctttcctagagtagggcctttatgtaggatgggttgtggctgggcagtctacaggatctcatctagcgtagatcctaattttacccttgccttagatatttcttttcaggtaaaatgtccaaccgggattagtcgcaagaggaagtctatatgactcactggactaactgcttattttaagattctgattttaagattagaggctcttgcactttatttatttatgtatttattttgaaacggagttttgctcttgttgcccaggctggagtgcagtggcactatctcgactcattgcaacctccacctcctgggttcaagtgattctcctgccttagcctcccgagtagctgggattacaggcatgtgccaccacgcctggctagttttgtattttcagtagagatggggtttctccatgttggttaggttggtctcaaactcccgacgccaggtgatccgcccaccttggcctcccaaagtgctrggattacaggcgtgagccaccacacctggcctgggctcctgcactttaattcaagccctgtgacttgcagtgagtgtggccaggcaagcactccctgtcagaatggtatgatccctcttttctggagggccagcctgcctgcagcactgttcacaggcttgcaggtgccactgaagagaccagtggagtttaatgtctggaatgtgttccacgtggaaatataattactctgtcatctggaacaagcgattttaattgttagagagttcctcagtccactagtttgactttggccatggtcgtacatttaagaacttggttcaagttttttccatgtttagggtaattaggtgtccatagtatatgaggctcagctttcatactctattcaactctggaatggctgccaaagaagctgattaaatcttaccagttctgagcagggtgtttttgcctcttgtgtgccaggtgccaggataggccctaggtgtcccagatggttcctgtcctcatggagtttaccatctagtgatcagattgtacctaaatatagtttgaaggacccatattttaaaagcaaacaaaaatgtatttatatatactcatttagcatggatatttaatacaagttaatttggacagaaagtagggtaaaagggggaagaaaatagaaaaatgatagctgttcacaaacattttatgtctcttttgtagtaaacttaagtcatgctgcctgaaggcagaattaggctttgcacatttatttaagaaatactggccaggtgcagtggctcacgtctgtaatactagcaccttgggaggccttggtgggaggattgcgtgaggctaggagtttgggaacagcctgggcaacatagtgagaccccatctttaaaactaaaagaaaccgattagtcgggcctggtggagtgcatctgtattcctagctactcgggaggctgaggtgggaggatcacttgagcctaggagtttgaggttgcagtgagctatgatggctccactgtactctagcctaagagtgagaccctgtctctaaaaaagaaagagagaaagaaagaaaaagaaaagattttaacttctagtcattcaatcaagaagtgccagacagcatggtagctgcttgaaatacagtactgagtaagctgcggtctctccctggatataactcctagtgaaggaggcatgttcagtaatcaatcaagcttatttaattgggttgtggtaagtgacacaagaaatataggctgcaagagtataacaggggacctgacctagtctggaaggtggaagtgggaggcaagtagaggcctaggaggtcttctctgaggaagtgagcatttaagctgagattttaaggatgaagagtgagtttaggaggagccaaaggtagactctcttaggctcaggaatggggagcatgtggcttagccaaggaactgaaaggccagtgagtcaaggtggtggggagggttggggaggggtgaggactgtggggactgtggcaggcggtgaggccctgcaggcccactcagtgctttgtgcctctcactgtcctggacctgcctcacatggctcctccagtaacttcggtgtgccccgtgctgtgccgagggcaatggaatgcatcatctcatgtaatccccacaagccttgtgagcttgatgccatcattattctaactttacagacgaggtaacttacggttagacattggagacttaagataaatagctaaatgttacacagctaataagttgcagagcttggattttaacccggaactctctaattctagggcctatcctgcccattcatttatacctctaacagacattaacaaaagacagagattacaagttcagcacaatataaagaattttccagcaaccagctgttcagaaatgtagacggggagaggcacgtgcttccaatgattatgagtgttcattccagtggaaacgtggtggccacctgtcagggatagaggaggaagaagcttgtgccagatgaacccctaacccgcttttgattacatctgggattttgcttcattgtacatatgttttcttccttcagtgaccatgaaagacaccaggttgacagcactggaaactgaagtaccagttgtcgctagaacaggtaagctataaccaggccagtggttagaggaagatgggagggaattatcttgcccatggtcgtgcattcagggatttaacatttacagttttagctacttgccaggaactggaccatctatggcatgaagggattagtcacattactgatgattattagttgcttgtattcagtgcctgacactgtgcaaagcgcattatatgcgttactttcttcttcacagccacgcttttggtgtttccccattttacaggtgaggattcgggttcaaacatgtcaattttcctaaagatgcatagctggtacttagtggactcaattcagctctgtttagcagcaaagtttggttgtgaccacttcattcaattaaagcctgtgtgctggcacaagtcatttaactagtgcagacgttcttaaccctggctgcacctgagaaatctgcatgggtttataaaaacaaaccaaatgtgatgtccggattccatcccttagttaacctgctccagagtttctgtaagctctccaggtgattctgatgtacatcctgggctgagaacccttgagctggtgagtgagcatttgcatcttaacatggctatatctgttgctttaaattaattttgggggataaattatatgctatagtagtttttaggaattggatgatcctgtctcagaatatatccttcataaatgttgaggcrccggcatttccacggatggaatttcctcttagtgacttaactgatcactgaactgtaattttggtttagcagtaatagtgccaagcgcaacagagctgtgtataggaagggtgtagggaagacgggaggtgcttggtctgctgtctttgtacatggacagctctgtgactcatgccgaggctcagtggttgctgtttagtgtattctgtcactgtctgcctcacctctgtcgtaggaattgtaaaataaggtagggatttttgtcttacagctctacattggttcataagtagggtcttgatacaaattgtagactgtcgaaagttaagtrttgttctcaagtagggaaagttttctgagtttgatttttcattttcagtgtttttgtgtatacttcatactgttccttttttagaagtccactgtatatgaatttgaacccaaagtcaaatggttaagtgttcagatcattgaggtccccaagctaaatatcaccatcataaaatgtaaattctgggatacaaaagtaaatctcaaattttattaaacatttttcacgatagtaattgtattgcattttagtagtcagattttagaagtttggaattttaatataggaaaaatactttgtgggcactaccggctgctaggttactcctgtggtcactatgtcacatgtgtagtatcatctcaactggcacacagcgtcattggtaacatttttggacaaagcagaattcaggaaagtttctggtagatggttttctggaaggaaccttgtacctgggattcatagcttggcaagcctcaaagatccttactcttcaattactaaaaattgttggccgcctttarcaattattcttattttgaaacaaaaaaaaccccagcttttaatagcatttttcttttttcatggggtactcttgtttatacttttgtcctcatttttaagacatttttggccaggtgtggtggctcacacccgtaatcccagcactttgggaggccaaggtgggaggatcacatgaggtcaggagttcgagaccagcctggccaacatggtaaaaccccatctctacgaaaaatacaaaaattagccaggcatggtggtgtgcgcctataatctcagctactcgggaggctgaggcaggagaatcacttgaacccaggagatggaggttgcagtgggccaagattgtgccattgcactgcagcctgagtgatggagcgagactctgtctcaattaaaaacaaacaaaacaccaaagccaaagccagacagccaccagattttggctgagtatagagactgaaactgaactttggcagatccctgctttccatgttttttgagatcataagtatcattggatcaaatctggctactagttgtatagtttaaacttagttcaaggtttctcatgaattacaaagtatcttttattgaaaagtgatgactgagaacctccctgctgctttagattgggtggtcaggggaggcccatcagatatctgcgagaccgtcagctgtgcaaggatgtgggagaagagtgtttcatgcatagagggaacagcaagtgcaaaggccttgagcaagaaagaaccagtattcctgtgtttgggaagactgggactagagcagaggaatgaagaggcagaggggggttgggaggttaataactggctggatcttatgaggccttgtaggctactcatgagtttcataagttccataatgttattggctcttattaattccatgggaagccattggatgattttaaacagaggagtgagattctgatgtttatatctcaatgtctcttgtggttatttggaggcaaatgaattttgtagggtagcatgaatacaagcaaggagagtagtgaggggggctgctgctcccttgtctctgagagatgatgcgggcttcgactgaggtgatagcaaagggtttgctgatggattagatgtggtggtgggggtggtgaaagagtcaaggagtcacctgggtgtttgctttagactgatggtagtgccttttactgagatccagaagatggcagagtgatggattttggagtggagattggccttgaaggtcatgccctctgaatatgactagcatcatctacagcactgtactgtgcactgtatgtggccactaaagataatattaaactaaatggaatattgctttagcatgtacgatacagaaatccattcacccagttgctgtcttttaacttctcctgtatggctattttctatggtgagttacttccaaaatggaaaagagacttatggctagagacttttgtggctaacacactgatgcttccttgtgtctgtggtgctaatctttaattgacttttctcagccagtcttctataggctgtaaagtgtgtttaacatgtgtatatttcatccaccactaccaccacccctgactgagtccatgtagggctggtttcttccccttttttgtacacatattgaaccatgtctttttttctgctataaaacatttaattcttcattgcactggctaaatctgttttacctgcttaacaccttgcacttactgtagaccctcaaatgtttgaatgtgcttaaaaaggagatattctagttgtgggactgattccaaaagctatgatttaactcttaggagggctttttagaatgtcaaaaatgcttgaacttgagccacttatgcgaagaatctcacataaaacccaatgtttatatttttcctggagattaaaaactatggtaaacagtagaattttggaaggcagctatgctcaccactataccaccaacgcggccgacagtaggattttggaaccagagagaaaaacttgttgccaaaacgtgtttctaatgtgttttagaataaaaccttactttgcaaatggaaaaacaagctaggtggcccaagctgattagcccacactatcgccaagttgactggatgggcgccatctttgtttaaaattgagctcatgtcactccrggctctggggctgcctgcatttggaggaccagatatgacattatcgtcttctgactacacagaaggcaaactcagagtctccctagacaaatagtaggtaagtaacaattttattgaaacaaaaccaaacttagggacaagatacttttaaatttatgaacaacattctttgtcactaattgagaatcatttgtgatttacctgaagcagaaatcaatgtgggggttagctagacaagtgtgccattaaaaagtcatcttgaaagtggtggcccaaagatttttactggtattttttatgataatatacaggtactatgcagcgagtgtttatatgtacctgataccatactaatcgctttttggttttgaacttttacggtagaatcttaccaacggtggtctcacattttggagccctttgaaattaacttcctatgtgatttacttgtaagatttttatttatagatatgagtcagcaacttcctatatcatggtatcaaaaaggcatttagacattttaattgatttttctgataaatgaacttctaacttactaagagccaaaatcagtgaatgtcacaagattgtaattaaataagaatatagatgatagcaagttaatacctggcagtttttggggtcatggctaatttaaatttggcattcttgcagaaggagcttatctctctctttttttttttttttttttttttttgaggcagagtcttgctttgttgcccaggctagagtgcagtggcatgaccttgactcactgcaacctccgtctcccaggctcaagtgattctcctgcctcagcctcctgagtaggtgggactacaggcacacgccaccacaccagctaatttttgtatttttagtagagacggggcttcaccatgttggccaggttggtctcgaactcttgaccttaggtgatctgcctgcctcggcctcccattatgctgggattacaagcgtgagccaccatgcctggcctcagccactacatccggcctcagcttaactctttagttggatttttctttatcatagtgtttctcaaaaataatttgtgtctcactttaagaattacctggagtgcttattaaaatatagattcctgagcccaaaatacagttttggaaggggcccaggtattgcatttctagcaagtatcccaggtggtttcgatgcacattgaagcttaagaactgctacttacacttactgaaagaaaaggaagtgttatcctttttgggcatgcatatccccatgtgtaaaataaggatgatacctgctcacaccacatcacatcacatcacagacttgctgtgatgatcaaaaccacaggttagcttagtgtgacacttaagggcttggggctttggagtcgggcatacctagcttccaatatcagtttttctcctctggttttgcctcttgctagctttgtgacccagaacaaatggcttgatctccattctgctccctgtacaatggggacaaaagtgccaattacatggtggtcatattaggagtatatacaatgatgtttgtgaaaggtgtacagtgcttatgaatgataactgttgttacttgttttaacaaatatagcctcagagatcaaagtgggggagaaatcgtaaatgtgtatagttacacttgggaatgagctgctttttgtatatcaagataaagcagctgctctactaccatagagagcttgggttttgaagggtgagtttttgaagatttgccctgatgatcccatctatggatayctccctgtagccagtggtatttgggtgtgcaattagatgtctcagatgagaggtatatgctaaaacagagaaatgatccccagtttatgctagatgttggacttaacagacttgtgacctaaccagctatactaactcttagccattgatgagactgtcaagaaggaaatagtrtgtatttagttcttttrctgaaaaaagactgtctgctttttagatcaataatttgaaatataaatgtggtcttagccaaaacccaaggtagaatcagaagtaggaataaaacttagatttgatcctatcattaagttgctgtgactggtatcagtttttaaggtttctttctgattgttatattttgtagaaaccctcttcataaactcgccaaagaattattcatacactttatcttcttttatcagctaaatgtactcactgtttgaatcagagaattctggccaaactttccattgcattgaacacgtgcattagtttgtcttgcaggtattttctttttttatggagaaaaatggggccatttagtgactgttcatcttcctttttctcagtttggtagtggccccaatgaagaaccttcagaacctgtagcacacgtcctggagccagcacagcgccttcgagygagagaatggcccaacaagcaaatgtcggggagcttcttgccatgctggactcccccatgctgggtgtgcgggacgacgtgacagctgtctttaaagagaacctcaattctggttagcaaaataatatcctttttagcttatcttctagaaagaagagattgactttagagccactagaatcctgctgatacattttagttttcatcttctgaaaagttttttaaacacccaaagagagtatctatatgtgttttaaactttcaattatggaaatactcaagtatgcacacacatgaagtaagaatcatgcagtgaaccccatgaatccagtttcaaattctttcctccctgactctcccaccctccaaatattttaaagcaaattccagatgttgctttaactgtaaatcatatatgtggtttttaatatgaaaagtgcttaacctctttttaatatgagaaatacaaatttaaatagtacccttttttgcttaccaggttggcaaaattaaatattgaatatagaaatgggcactgttagcaggaatatgaattgatgttcagccttttggagcatcagtcatcaattttaaaacacataccatttgggccatttataagaatctgtatcttattacagctttgagtgaaatacagtgaagaattggaaaaacccaagtatccttcagtaggtgaatggttaaattagttatgtagagccatgcagtggaacactaggaggacggaaagaaatgaaataggccatagatgctgacgtgggaaggtggttacaacatactgttcagtggaaaaaacacacacatgcacaaactgtgtctgtgtctgtggacatgagggctgtgtgcgtgtggttatacaagtagaaaagggtttgaagagacacactctaaacttaagggtgtttatctgtgaagagtgggttgggaggcaggtggtgaggagcactttcatttttattttatgtacttttacatagcctgaatgtttaacagtagatatggattattttttgtaattaaaaaagcaataaagggccaggtgtggcggctcacgcctgtaatcccagcacttggggaggccgaggygggcggatcacaaggtcaggagattgagaccatgttggccaatgtggtgaaaccccatctctagtaaaaatacaaaaattagccaggcgtggtggcaggtgcctgtaatcccagctagctacttgggaggctgaggcacgagaattgcttgaacccaggaggcagaggttgcagtgagctgagattgtgccactgcactccagcctggcaacagagtgagactccatctcaaaaaaaaaaaaaaaaaaaaggcaataaaaatgacttcatatgtttttatgcatatttaggcaaataagcttggaatatcttattattaaattaagaaggcagaactgtaatgctgcacaaaacttagaatagcatataaagaaacattttctggattttgtgacaggaagctgtgtaaggtaaatttaggatgttaaggggaataagtatcatccattgcccttttcttgatttagaccgtggccctatgcttgtaaacaccttggtggattattacctggaaaccagctctcagccggcattgcacatcctgaccaccttgcaagagccacatgacaaggtaatggctgaaatatcataggcatttcatatgttcttcatgagtacaacagcttctgtgcacggccactgtgcaacttgtcctgagcttattcttttgatttctgtgcgccactgatgacattgttcccagtttataactacatataaaaattactttgtaggacccatgattcttgaaaagtttacaaaataaaacatatttcagagactgttaaagatcttgtttgggccgggtgtggtggctcacgcctgtaatccccttaggaggccgaggcgggtggattgcctgaggtcacgagtttgagaccagcctggccaacacagtgaaaccccgtctctactaaaaaatacaaaaaattagctgggcgtggtggtggacacctataatctcagctactcaggaagctgaggcaggagaatcgcttgaacctgggaggcggaggttgcagtgacctgagattgcaccattgcactccagggcaacaagagtgaaactgtctcaaaaaaaamaaagatcttgtttaaagaaatcttacatttccagtactataattgtatagtgatgatttggcccataggtacccatctttcaacccatactttgaatagaatttttagacttttatcgatatggaaaagcttcaagtacaaaggactaacatgacaaattaatgagtcttgtttcctagcacccggcacttggagggctccttcatgttttccttttgtttttagtaagtagctaataaagcattgttattgcagactttggtaagtcttaagtgtatatatgagagcaacttccccaggatttgaagaccttgtattgcatgccttttacagtacatcttgttttgttttgttttctaaagaggtgaggtctcattgtgttccctagactggagcgtggtggcacaatcatagctcactgtaaccttgaactcctggcctcaagctatcctcctgcctcagcctcccaaagtgcagggattgccggcatgagccactgcgcctggcccgtcttgtttttttgtttactctggtctgaaatgtaacttctactacctaattgatacttgaggccaaaccatgtaggctgggttgctctagcaataagtggctgcttccagcaggatcccctcatggcttcagtaacctatcacagtttgggactgttggttattgaggggctgtgaacaagtctccccctttctgcatgcgtgtattgtagggtcctttttcatgagctgcaaactggctgccttttgtcaggccaaatgcagcagtgttttgtttgctaacgtggtttttaaaatcttgaatttgaccttttatctgcatgacccttgctttacattagagacaagacttgagagattggagcacatcattgctgtctttatttgtgttaacttcatacattcatgtgaggactgcccttgttcttttacattttcagcaccycttggacaggattaacgaatatgtgggcaaagccgccactcgtttatccatcctctmgttactgggtcatgtcataagactgcagccatcttrraagcataagctctctcaagcacctcttttgccttctttactaaaatgtctcaaggtaggatgtttgtaaggatttgaatgaaatggttttatgagtatagtttctgaaattttaggcaacttaaagcaaggaagctagattttaacttttagagtttaaaaccttctaggcatttggcttttctcaaatagaatgttgtccagagttggtacttagtaagttctcaaatacatcactatgactattgaataccttgtccatgcaagtatggaaaaatttcgatcagatgggttcaatgttacattattccaaacctcttgatttcgtcatcgtttagccttccctcatttaaaaacatcctggattatcttttgggaatccctgtttctaaattatcttttagctaatagaaaaatggcttaaagtttctgttaaccatttaggagtatggtctggttgcagctataattaagactttgttgatgtaaattctactaagttgcattctattttttgcactaaatttagtgcatttttctatatagggagtcaaaatctaaatagaactttatggttttagttttaacagtggcgtgcagccatactcagggttatttgtttaatctgttttagttcctggacttgttttctatctataaaataagaaaatgtggttaatattaactgcctgtacctcacagagacatgaaaatatccaatagtatttgttccaggatggcagtaccattggattcatctgctacagcaccatgcaaattgatttttgtgtctgccaagaagggtaactcttttattatccctagaggtgggtcccaaggagtcacattggcagggtattataaaaacatgcatttaattcagaaaaaataggaacagttttaacaacttaatgttttttaaacaaatggattgatgagaatataatctaattaatggattggtgagaatataatctaaatggattgatgagaatataatctaaatggattggtgagaatataatctaaatggattgatgagaatataatctaattttgaggcacatcatttagttcagattgcaaaacacttatcttttccaaaagagtamgttttgttaatcatggataagtcttcagttagactgttaggaaaatgaaatcagggctagttctttctgctgagaatcattatatagtctcatatattctcaattctcctaccaatatattattcttactggatatcttcygtaatgaaaggcttgatgcttgatgtaaaaatcaaaatatatttaaaactttattcccagactcatagattcctattctaataggaataatggatgtcttaacctacatagtagtcttttgattaatatcttgtttcataaatctgaatttcatctacctggcaaacattcatgatttaattatgggtcaggtgagctgctgtagctagctagtcagagctgattgagtatccattgggtgttaagtgtcttcagttagcctgaagttatttatttgacttaatatttaaactgtaggcgtgctgaaaggtttccatatatatatatattttaatttactggtctctaaatactgctttgaagtgagcctttaagttgacttgttagtgctatatgaatttctccttcaattatacttctgttgtagttctttaaaaaatagtaagttacttgtcaatgtgcagttttttttttttttaattaacaaaaagtaagtatcttaggatttggttgaatgaatgaaacagagcagtgctcctgtgttttgttgaaaagcagctccttttgttttcatccaactgctatcaatagggcatcctaaggctgcaggacttgggtgtccccaagtcaagtttgaactcgtctcccggatgcctttgcataggtgtgttgtaaatggtcctcactgactcattacagtagagttggggctcagtgttctgttgagtctgtttgaatgttatcccttcagtaatccttagggatagggaaatgagtacgtgagtcaacttgtgatttgtgattctctcagtgtttagagcctcttcatgtactgtacaatgccgatcctggtgccagtgcctgacagacrtttcctgtttgaccttttctcctgcagatggacactgacgtcgttgtcctcacaacaggcgtcttggtgttgataaccatgctaccaatgattccacagtctgggaaacagcatcttcttgatttctttgacatttttggccgtctgtcatcatggtgmctgaagaaaccaggtacagatctcctcatatacctgttgggccctgtgaggtgaatgctttcattattgattaattgctcatatgctgtaaggaatggacatgtagacttttatagctgaaatgagtggttttcaccagacagatgagggaatatcttgggtgcatccactacaggcacatagaagaaacatgactgttgagataactttttttattttcttggcttaaaaggattagtcgtcagagaaattgagtggtaggatgtaaaactttatgattgttgataaactgaaaaacagcctccgtctgtattgcagcagtacaggactaagcttgtgggacatttctgtcttccttggctgctctgttgtgacagaacgcaaatgtcagattctgagaacccactcgttgtacctgtaggagtcagagggaaatgcggtgtgtcctgattagcactccagcttcaaatgcagtggtttttttttttcccctatcggcaggtagcagagctctatcaaagggatcagaagctgtaagcatgtgaaatttggaatctttgggttatcccagtgtgaggtatttctatcaaaagggtgaagtatgtcagacctgtgagacagaacaccgtgccttcctgtataggattaaattacaagcataggcccacgtggtgcctgcttgtttagtaggacctttgtgaaaaaggaatggtctgtccattattttggaggacctttatgtatactgtggccgtgggtttccacagggtctaggtaaggctaaattaagatgttcaatttctttcactcttagttctttaagctaatttctagataatagtttttttcactctgtagttataaatctgcatagctaagactacatactgatttaaaagagtctcacacattcattctgtaaatattgagtgcttgttaaatatcaggtccagtgcaaagcaccgagaaataagtaagacagtttttttctcaagaagctcgtactgaattcggcaatggaaaagtataaattttacagagagctatcatcataaagatagttcagtattgtgagaatgtttgggatcctttttgggcagtggctgaagaggagggcagaagttagatcaggaagagccttcatggatcatactagtagactggaatttatccaaaacttatagggagccattgatggatttgaaataagggtgtctggtgtgttcggatttgtttgcattttagaaaaccactcttcctgtctttggagtgaggtgggaatatacatagatamaaagtcctgctggcagccacttgtttatagctgttttgcactcctcaatctgtctccaactaagaggctcttctcaacgggttccttttctaggccacgtggcggaagtctatctcgtccatctccatgccagtgtgtacgcactctttcatcgcctttatggaatgtacccttgcaacttcgtctcctttttgcgttctcattacagtatgaaagaaaacctggagacttttgaagaagtggtcaaggtaaattgaaactgcttgtttgtttgctacttagtatactgtttagataggctgcatttataccttttgtatttaacggcagacagggaaattttgaaaagaaattcagttttcttcctcgccactccaatccctaggcagccactaatctgttttctgtcttaatagatttgcctattctggacattttgtataaatgggatcatataatatgtggtcttttgtgactggcttctttcactcagtataatgttctcaaggttccatctgtgttataacatgtatcagtacttcattccttttaattgtcaactaatattccatcatttggatgttccacaaacattcagccctttataatttgtcaacccaactcttctagccaatgatggagcatgtgygaattcatccggaattagtgactggatccaaggaccatgaactggaccctcgaaggtatagaaactagtgtcaaaattttaaagaatctttcgagagattgaaaatgtgatctaggaggtaatccctgttgaggtatatttgggaatatagatgttctacttacagaatcagtccacttggaagcactcatacagctaaaatttgtgtgagtttaaaacatactcttcacaggcggaggactaataacatttagcagagtggagaaagttgcagcacaagtgcctgtcccccagaaaggcttacacctcagtagtgccagtgatggggcgatgcaggaggtgaagcatatggctaaaaacaaggggactgcagaaaaacaatttagcatatatataaatctggctttgcaaaatggagaaaggacttcagggagtcctatattaagtatttggagtccctgaggtcctttctccattctgcaaagccagttgactataccatcctccccagggccctacagaggcccccaggtatgttctctggaaaaaccgaacctttgagtcccttgattgaaggattccaggcacagtggagagtggaactgagggtaagactgagcgagggagataaaggaaatttacagactgagctgtgggaggcccagctccttccctctgcttgtctctgcctggtagccaggcttattatgctccccagttaggggagctggccctttttggggaaactgacccatggatactgacacttagggatctcctgctgaaaaagctagctcactgcctgatcccccaacagcgaatctcacctcaccacagacactgcctctaccacacagagcctcagccagcttaaagcagtttattgtgagattatatgtagagaagtatagaaaatgtgtatgtaaagtttaataataacacaaaaacacatgtagctggcacctagcttaaaaaaaacagaacattactggtaccttagaggctccccgtggagaacccctcttttctccctactacctcagagacaactaccattgttgcttttaatcattctcttgcttttctttgtagttttactgtaggtattgctttgttttgaaaagctagttgactaggaggcaaagcctggttaagagaagggcagtcttgtcactagtagttgaaggtttccaggagatgagaggaggaccagcgcatctgagtcttggtgtggtttcactgtccctgaggtttcacagccccttctgggaagtcagtgcacaaggtcatgaatgagtctgggaaacacaaggcttaccctcatcagagcgtctggcaaggcttctagcaagggcaaggcactggacatgcgtgaaatatggcaggcagggaagctgctctctgcgcctgctttcagctctcaggaataggtcagacagaatccttctgtgggataaaatgaatgtcctctgctgatcagacagaggagggagagtaggaatttcatcagtatgtagttaagacaagctaagtacagacaagttatacaggccagggtcacctggctctgtccctcattaaaaagatagtgcaggacagcaggaactttgagacatgcctgtctcttggcagctgctgttctgatccgaactggttctcgtctgtgcctagtacccagctgtcatcctagtctcctggggctttccttcgcctctctcctgtgcaggatctcccatttcctgtatcttgtcttctttcttggtttactcttgtttaataggacatagcctctaggagctttttgaggaaggatgcagtgttttggctggtgtagacttacaggttgagagtcggtaatttgaaggcattcagtaatttgaaggcattattccattgccaccctgcttccaatgttgctcttagaatttctgatcatctgtatttgctgtgtttttctctaggggagctggtagggagttctctttgttgtcataatattctgaaatttccagtgatgtatgttggtatgaatctattctcattgttcaagctggaagctcttcaagttctatgatattttctttagttgttttgtgcttgatttcctgttttctctgtctttccttctagaaatccagttcatccctgcaccacataatgacatttcagtcaatgatgggctccatagatgatagtggttctgcgagattataccaccacatctttaccgtacctttcctaggttcagatatgtctagatacacaaatacctactgttgttacagttactgcagtctttagtacagtaccatgctgtgcaggtttgtagcctaggagcctataacatctagttttgtatgagtacactctgatgttcacacaacaaagaaattgcctaatgatgcatttctcagaacatgtcactgtcattaagtgacacatgactgtatacttatacaaggagttttcttttccctgcataatctgtttcttctaagcttccttcttttcggttttgtgttattctttttaaatctttgaggccttctgccaggatctagtaaactgtttatatatggggagacaaaacagctttgttcacagtggtgggacttgttgactttgagctttgttgtatgttgaactgagcatctgttggaaatagtggtgtcggtattgttttcttcttgagctggtcatgttttttagaaagtagtcttctgattttcaggctggtaggggtctgactacctctggggggaaagaggctggtggtgaggaagggttggtggtctgggcattcagaatgtatatgcttcacttaatcccctcatttggaatggcactcatgccctcaactacttctggaatactttatccaggtactccttgttttattctctatagagaataatccaggtttctggtgagaaaagagctgttgcttgggagtgtagagttggggcaggacccaggggttgtgactgctcctccagtggttttcactctgtcttcagtattttagctccccttgtctacctgctgctcatctcctgttccagaagtaccagatgctataagttcctcatgattttaaggattctgtagtataatcagttgactcttcactttgagacagtggcagcttaggattctgcttttgtggatttgcagtgtcagttaccacctgcctgtctgttttttagtttcaaaaacttatggttctattccctctctcctgttctcctccttgtgggtttatatttaaaaacaaagaagtctttactgtagacagtgggattccaggaggttgtacagttgagtgcatatgttcaaccaactatattaacttggaagsctcctcagtcagcttatagagagcctcactcaccttggctgggcagattgtttggctttggaagaaggttttaacagtaaagacagacaccaacattaagaggagaaaagagagctagaacaaaaccataatgatagagcagaagaaaatatctaccatagccacagagataagatgtttgtgcatatgtaagcatcaggatgccacagaaaaagaccattttgagactaaaagaactcttcaaaattaaaaatgatagccaaaataaacatttcagtaaaagaattgggagatacttttctgagatataggtaaatagaaagcagaaccaaaggatagagcttggtaatatgagcagaacagagatttagaatgatcagttcaggaagtcccagcatccaattaaaaaaawtttttttttaaagaagagccgggtgcagtggctcacgcctgtaatcctagcactttgggaggcggacgggggaggatctcttgaggtcaggagttcgagaccagcctggccaacatggtgaaacctcctctctactaaaactgcaaaaaattagtcgggcatggtggtgggtgcctgtaatcccagctacttgggaggctgaggcaggagaatcgtttgaacccaggaggcagaggttgcagtgagccgagatcrtgctactgcacgccagcctgggtgacagagcgagaatccatctcagaaaaagagagagaagaaaactttggtggaggaagaaattgtgaaagaaataatacaacaaaaaaaaaatcctaggattgaaggatatgagtttccagattgaaggggcttacctggtgcccagctaaatcaataaaaaagaatgccaccaggtctcaatattgtaaaagtttatagtaccagggattaacctttcagagaaagaaaaaaatgaaatcacattaataaggattagaaatcagaatgctgttagcttctgaaataccttcaaaattgagagaaaaaggttttcaactagaattctatagccagccaacttgtctatcaaatatgagacactttcagatatgcatggactcaaatttccttcccatatgtccttcctcagttaatcactggagcatgtattccaccaaaatgagagtaaaatcatgaaggaggaagaccgaatccaggagactggggcctgatcatgaccgttttacaggaccatgtccagggaaagtgtcaggataacaggcagtgctgagagcagccagtccaatctgaagccagggagagagtgctccagaagggagctcttctggaagatgaggaataatcctggtggattctttgcatttcattagtaaaagttatattaggcattgtttcagagctgttagaatacatttaggaaaaattagcaatagacacacaaaaaagtgaggaagagaaacagaacaattaaaacttacaagaaaggaaatattatcatagtatactctgtggctcagccatgagtagtacttaggtagtcataatgttgaaatcaattttgaaaacaacaaaaacagttacatatttattttgagagcattgaggaggagggaaaggatatatggaagagtcctcaatcctcacttcccattaatagtaagttaatagatggtgtctataatttataaatcaagaaattaaaagcacagggcatattctttagaactatagaggcaggataacaattcagctaacagaattggaagcagctgccagagtggttgcagtggggagggatgggaggaacctttagtaccgtattgactttttaaactaccatatttcattggatctcagatgccgttagatgtgtgctgtacttctattttatatacatctgagaaagaaaaaaatgccaagtaaactaacatgcatttgattagacgatggttcccagttttagatattaaaatatgaaaagtccttttaagaagcagggaaatactgtaagtgcataaattactttgattaaaataaaacatttaaatgtattcctcttttattatgattctcattttctcctctaaaatcaatcttcttgtgtgtacacatgtgtcctaacgcctgctctcaatcactttctagtcatgctgagaatgcataaataggagcctatccccattaacaggatcccacaggcagtgagaacccaggtagtgaatgaaggggcagccctgaaatcgaaaggctcgctcttcagggaagctgccttatattctccccatgccctggacactttcttttctgtatttaataccgtgttttcagcatctaagatataatgagcttcctacaacagttgagtaggatcayatgctttgttaaggtaaacctatggagtgcccttagtgttgctgtgctgttttctgtaaacttggaaaaaaaatgcaaatctctgatggagttactaaccaccttagaaacacatagagcaaagttatgttgtctaaaggaaaatagtttatgcttgactaggcgtttaattttaaatattctgttcattattagggcctttatagaatgtttggtaaatactgaagagttgaaagaataaatgaacattgttcgtaacttcacttcttttcatttgaatacttactacagtcagatatatttgcgggtgtgtctctgaatagctttgtgtctttttttcttttaagattatattataagcgttttatgtcatctaatgtttgaaagcattattatttttttgcggcacagtcttgctatgttgcccaagctgatctcgaactcctgggctcaagtgatcctcctgcttcagcctccccggtggctgagagtacaggcacgtggaaagcatgattttttttttttcttcctgagacagggtcttgctctgttgcccaggctggagtgcagtggtacagcatggctcatggcagcctcaacctcccagggtcaagctatcctcccacgtcagcctcctgagtggctggaccatgagcacatgccaccacgcccagctattttgttgttgttgttgttgttgtagagatggggtgtggtctcactttgttgcccaggctggtcttgaacccctggcctcaagtgatctcctgccttggcctcccatagtgctgggattacaggtgtgagccaccatgcccagctgaaagcatgattttcttttttctttttttcagagtctagccctgtagctcaggctggagtgcagtggtgctttcctggctctctgcaacctccgccttccaggttcaagtgattctcgagtcttagccactcaagtagctgggattacaggtgcatgccaccatgcctggctaattttttttttttttttgtattttttttttaagatggggttttgccatgttgcccatgctggtctcgaacttggcctcaagtaatccgcctgccttggccacccaaaatgctgagattacaggtacgagccaccacacccagccttaagcatgattttttaaatcaactttggtatggtataatttgcttacaataaaattaatcaattttgctaagttttgacaaaaatcccaatcataataaagaacacttccatcatcccaaaagttcctttgtgtctcttcccccacttctggcaaccatcgatctgctaaaagcatgctttttcagggggtgtaataatagttattctataaaatatatccctttggttgaactttgggttatttcctttcttctttccattacaagctgtgctgtgctgaacattgttgtatgtctgtttctataggataaattcttagaagtgaaaccatggatcacataacaggaatctttagacagttttaaaaatattcttggccgggtacagtggctcacrcctgtaatcccagcactttgggaggctaaggcaggtggatcacctgaggtcaggagttsaagaccagcctggcaaacatggtgaaaccccatctctactaaaaatacaaaaaattggctggggatggtggcgggcacctggaatcccagctactcgggagactgaggcaggagaattgcttgaatccagaaggtggaggttgcagtgagtcgagattgcgccactgaactccagcctgggtgacagagtgagactctgtctaaaaaaaaaaaaaaaaaaaaaaaaaacaaaacaaaacaaaaaacccatgggaggctggcacattggctcactttttttttttttttttttttgagacggagtctcgctctatcgcccaggctggagtgcagtggcgtaatctcggctcactgcaaattccgcctcctgggttcacgccattctcctgcctcagcctcctgagtagctgggactacaggcgcccgccaccgcgcccagctaattttttgtatttttagtagaaacgggggttcaccatgttagccaggatggtctcaatctctcgaccttgtgatccgtccgcctcagcctcccaaagtgctgggattacaggctcacttctgtatgtacgtcaagacatacaacagtgttcagcacagcacagcttgtaatggaaagaagaaataacccaaagttcaaccaaagggttatattctatagaataactattattacaccccctgaaaaagcatgcttttagcagatcgatagttgcaagaagtgggggaagagactcaccacaaagggcacaaaggaacttttggggtgatggacatgttctttattatgatcgggacttttgtcaaaacttagcaagattgactaattttattgtaagcaaattatgccatactaacacgttgatttaaaaaatcatgccttcagctgggcatggtcatggcttatgcctgtaatcccagcactttgggaggccaaggtgggaggatcatttgaggccagtaagttcgagaccagcatgagcaacaaagtgagaccccatttctgtaagaatattagccaggcacggtggcacgtgcctgtagtcccagctacttgggaggctgtggcaggaggatccctgagcctaggagttggaggtagcagtgagccacgatcatgccactgtcctccagcctgggtgatagagtgagaccccatctcaagaaaaaaaaaaaaagaaaaaaattctcatggactttctttagtttgtctttttatactctgtttctggtccagggatggatttgacacctgaggccttgataggagaccttaagtcagcctcagctgcttggcagtctccaggtctccctattttttgatgacctttgttccaaaggacatttttccctgcctgctgctctgctgcatagcttatgtttcatttttccattttgaggctacacctagtcttttgttgaggaaatatttgtttcagattagcttgtaaacttgatataaccattttaaacagggaaggtataggattgtaaaatgaatggctatttctttatgtactagaattgtttcagacttgggctggcatggtcccgcttgttctttgctatcagagttccgtggctggcactgagttgacactctgaagtatttaattcagttgattacagtttgcatttcttgactttcattgcattttacaggtggaagagattagaaactcatgatgttgtgatcgagtgtgccaaaatctctctggatcccacagaagcctcatatgaakatggctattctgtgtctcaccaaatctcagcccgctttcctcatcgttcagccgatgtcaccaccagcccttatgctgacacayagaatagctatggtaaaaagtgtctttggtacttatctgttttgcaactttgtctctggaaaacattatttgtctttgttgattttcttttctggagtaagacttagttcagttcctagggatttttcccaaaatatcttaaatttgcatgtccctccattttcttctaattaatttctccttcaagtttaatttagatgtccttggtctgctacctgattgtatgccaacagagttggtgacgtgtctccaacacttaagaaagaaaatgggtttaagtatttgacttccagactctacctcataagggaatctttctgattttcagacatttagagtgaggctcttgtgtctgtagcactgacacagtttgaatgagtcggaacaatttagaattggattcatataaaaatctaggctttatttgtgggttgcagccactgaagttgtcatctgtattgtgcttttttaagttatcttgaggcttaatgagacatcaaaccttattgaactttatttcaaaggagcatttagagaaactctgaagtgttactttgtccccaaggatgtcagttaagtccctcagattttttaggtacagagaattgaatattatcaaatggtctagaggaccatcttttttttttttttttttttttttttttttamccagaataacctaaaaccacacactaaccccctgtgttcttctcttccattttagggtgtgctacttctaccccttactccacgtctcggctgatgttgttaaataygccagggcagctacctcagactctgagttccccatcgacacggctgataactgaaccaccacaagtatggtgtcaactagtgtgcctgctctctcctctgctttctggtgaagctgaccctttgggtcaratttagtatgtggttgggaaaatttcacactgctcatttcaggagtcacttttaaggatccatgatattagcaaagaaagttactgttgcctcttagattcatcttgaagtcttgatttacaaaatgcaacttgtttcttgatacgcttttaataagatgcctttttctagatgaaaaagctaaatttaagctgaacactggccatggatataaacctcgtggatgacttagcattcctttgccactgctgatgtactttattaacttcccaggctactctttggagcccatctatggtttgtggtatgaccactcctccaacttctcctggaaatgtcccacctgatctgtcacacccttacagtaaagtctttggtacaactggtatgtatgtcttaggttggatttgattagttggttttggcctgcctttaatggcaggaggarctctcttttagrtctaagggaccacttgctgttgtaaacttgtttttgacacttattgcaaatccctggggctttcagaatgtgtaaagtgaacctaaaaacaaaaaagagagagactgatctagatccccagaaagttaactctagcagctttatttatagtaatagttataggctgaaaaaaaatcggcagtttttctaatagttgggctcrgtgttcatatatgttctgcccttgtctctaagcaggtggaaaaggaactcctctgggaaccccagcaacctctcctcctccagccccactctgtcattcggatgactacgtgcacatttcactcccccaggccacagtcayaccccccaggaaggtgcgatccagctcgtctgctatccctctgcccaggcacagtgactcacttgcaagcctcactttgagaagcctaattatgccagatagaattctgacctaaaatgcaatgggtttgaatcagaataattgaaaatggactaacaagctgctctcaaggtgtgatctgccgacccctgggtggttccaaaactctgctttggcagaactcttgtggggaacccagcaggtcaaacctactctcttgattttttttttttttttttttttggagacagggtcttgctctgtcgcccagggtggagtgcagtggcacgatcatggctcactgcagccttgacctcccagactcatgcaatcctcctgcatcagcctcgctagtagctgggactacaggcatgtgccatgatgcctggctaagttttttttttttttggtggagatgaggtctcactatgttgcccaggctagtcttaaactcctggactcaaacgatcctcctacctgggcctcccaaaatcctgggattacaggtttgagccaccacacctgaccaaacccaccttcatagtaacactaagctgtcatttgcccttcccactgcattggcatctgcaatgatggcacaaatacgacggggggtgaaatggtggcaacttagcctgaatcaaggcaggcattgaagtgtcctatcccaagaggccttgcattcttccctgacatcttctctccattaaaaacaataaaaactaaaaaattttaaaagttgagtgttctgtattaagcagtaaccattattaattttattaaatcttagcccttgagaacatgtatgtgtaatattcttcgtggcaaaatagaaaatatgcataaggcacatgtactgcataccagggtatgatggtgacctctggccctcatgcagttatttgaattgagaggtgaagtagctgccttttttcatggaatgccagttttatttgaaagaactgctgtcttacaaactggttattcagacttgggtgtttggcaggcagcttctcaaatgatgagctgagtctgtcacttcaagataaacaactgacagtatttgttgccaacaataaaagtcaactctcaggtggaaatcaagatattaaaaaacgtgtatatactaccatgaacttgatagctgccccaggacttttatgatgagaccgaaaagtctgtggaagcttagttagtaatttgagtttttgatattgtataatgaagtgtttcaacatttggaatatttgaatagcttgaggagccaatattttcagagtgtccaatgtatgatacgttgcagaatcatgcataggtaaaaagtacattcaaagtacaaagcaggctgggcgcagtggcttacacctgtaacccagcactttgggaggctgaagcaggtggatcacttgaggtcagcagttgaagaccagcctggcctacatgttgaaacaccatctctactaaatatagacattagccgggtatggtggcaggcacctgtaatcccagctacttgggaggctgaggcgggagaatcacttgaacccaggaggcggaggttgcagtaagtcgagatcacaccactgcattccagccccagcctgggcaacagggcaagactgtcacaaaaaaaaaaaaaaaaagtgcaaggtagactagtgggttttaacacaggaaaagctcattgatgtggtttcaaatttcactttgtaactttaagaaactaacacttatcaaattttggtgtaataacaaagatgatkatttgaaaagtctgtcaacatacgtttactttttgcggctgggcgtggtggcttgcttctgtatccagcactctgggagtccaagggaggtagattgcttgagcccaggcgttcaagaccagcctgggcaacatgcaaaaccccatctcaactaaaaaaaaaaaaaaagccaggtgtggtgatgtgcatctgtagtcccagctaatcggggagctgatggagaacggcttgagcccaggaggcagagattgcagtgagccatgatcacgccactgcattccagcctaggtgacagagccagaccctgtctcaaaaagaaaaacaacaacacatatgtttacttttgcaattacatatctgtggggccccagattttctttatacacttcagtcaaaataacatattgcaacagactgaatgtagaggtagatatgagaatccagctgtctttcatgaagccatatattaaagagatggcaaaaatgttccattcttctcactaaatttatttttatttcgggaaatatagttttttaataagaatatgtaatttacattaacttgtaatgggcttgctatttttaagggaattaatattttaaaaatttcctggttttctaatataataattatgcctcgtaaaagctcttgggattctccaactttctcattattattattattttgtgtgtgtgagacagggtctcactctgtcgcccaggctggagtgcagtggcacaattgcagctctctgcagccttgacctccctggctcaggtggtcctcccacctcagcctcctgggtagttgggactacaagcaccagtcaccatgcccggctactttttaaattttttgtagagatggggttttgccatgttccccaggctagtctcaaactgctgagctcaagggatccactggccttggcctcccaaagtgctgggactacaggcgtgggccaccacgcccagtctgcagccattttttaagactataaagaaagctgctgggcgtggtcccagcactttgggaggccgaggcaggcagatcatctgaggttgggagttcgtgaccagcctgaccaatgtggagaaaccccgtctgtactaaaaatacaaaaattagccaggcgtggtggtgcatttctgtaatcccagctactctggaggctgaggcaggagaatcgcttgaacccargakgcggaggttgcagtgagccgagrttgtgccattgcactccagcctgggcaacaagagcgaaactccacctcaaaaaaaaagaaaagaaaacatcccaacaatttgagaatcactgcactcggctgacctttaaactactttacaatatgctcgagaacatgtgcaacatttttcgtcttgtgatataaatgatacttatcttttcaggaagagagaatggattctgcaagaccatgtctacacagacaacaccatcttctgaatgacagaggatsaggtaaaatttctgcgttactacaggccttgcttgcctcttctaattgggttatatgtgtttaagaaaagaaagttaaatggaaacaaggaaattctgggatatccaaaatactgaggcctaaacataatgaaacgagtagtgaattctaaacaccaacctaataatatcaaaaacagtttttaagctattgcagtgaagtacctgtattytgacttgactatatctcttttcagagacattaagaactgagaattttatttgctatgggattatttttggtacttttagttatattatttttaatatttcagtcttttgtagtatccccaggacagagccatgtccagccttctctgttcagcatgaagagttattacagacatattctatacagtgtaagcagttttacasttacagggattacactgtatttctttgacttcagttgtctttgtttctcttcagargagccacctggcagcaaaggttctgtcactctaagtgatcttccagggtttttaggtgatctggcctctgaagaagatagtattgaaaaagataaagaagaaggtaatgtatgtgggattgctatgagttgataaaacctgaccctcgctctgctataaatctgggattttgtgccattgctcacaggcttgctggatttttcttctcttgaggtaacaagatgggtggtttagtctgggacctatgccaggtaaagtgatgccactttttttttttttttttttgagacagggtcttgctctgtcaccctggctggagtgcagtggtacgatcatggctcactgcagccttgacctcccaggctcaagcaatccgcccacctcagcctcctgagtagctgggaccacaggcatacaccacgatgctcagctgatttttattgtattttttgtagagatgggatctccctatgttgtccaggctgstctctaactcctgggctcaagtgatcctccctcctcagcctcccaaagttctggcattacaggcgtgagccactgtgtccagccggatgccactttttctcctctctctgagtgacactggcatgtggcagcatgccacccaaactgcctagtctttcccaggtggaatacygactgccatttcttttgtttcctctcttcctctcagctgcaatatctagagaactttctgagatcaccacagcagaggcagagcctgtggttcctyraggaggctttgactctcccttttacygagacagtctcccaggttctcagcggaagacccactcggcagcctccagttctcagggcgccagcgtgaaccctgagcctttacactcctccctggacaagcttgggcctgacacaccaaagcaagcctttactcccatagacctgccctgcggcagtgctgatgaaagccctgcrggagacagggaatgcyagacttctttgkagaccagtatcttcactcccagtccttgtaraattccacctccgacgagagtgggctttggaagcgggcagcctcccccgtatgatcatctttttgaggtggcattgccaaagacagcccatcattttgtcatcaggaagactgaggagctgtwaaagaaagcaaaaggaaacacagaggaagatggtgtgccctctacctccccaatggaagtgctggacagactgatacagcagggagcagacgcrcacagcaaggagctgaacaagtaagggactggggcactctcttctgtgttaaatggtccattttattgtgaagtacagaaagtgtaagagaggaacaagaatcattcttcacactcccaccttgaggcagctggttctctgctgtttgtcagatgtccttctaggctgttgcatcttcatatatgtgaccatgtgtgacctctgtgcacctaaattgggatgattccttagcagtccatttcaaaatgagtctttttatataggccattttatgcctctgttctatgaggacactcaaatgctttcatatgtgccctctgcaagctgtaggctgaaaatgaggttatggtatttcaaagaatataagaatatttgtcacagtgtttccctctctagctacagattattattattattttctattttggtatcatagttcattaggtggagataaaatcatcagcattttatgcaagttcagatggcctgacatcccctccagaccccctgaggcacccaagttttcatagaaaggactctagctgagaaacggtttcccatccgtcttttattagctactttacaggtgcttggggaatatttttatttttcttcttatatactatgctatggtggaatttgacagggattatagtatttaagctccctctttttaaacgagatttggtatgataggctyaggtaaattacctactttttccttaaatcggagtgacatagctttacaacagagtgtactccctgtatatttcaacagacagggttgaaaacggctctcagtgtgtttgactactcagtttctctggagagctggccccagaaacggaggccacggtgtatgcagtgcagctcagcctgcaaccctctccgctctggatttgttttttaaaggactgtgttaagctaacaacacaggtcctaggcagtggggcgagggccgcctcccattgtgtccagtgtaggcttctcctctaactctctgtggacctggagtttgaaacattcttatgccattgcagattttgaccacaaggaagtgatctaactttgctgcaaataaaagtccagatacgtttttttcttggtaagatcggtaactttgttactcaaaaactttcttcctaggttgcctttacccagcaagtctgtcgactggacccactttggaggtaaagttgttactttagctccaaatccagcccacatggttcctgcttgcttgttgccctttctgtccttgaaggaggtgccctctgggaaacagatctccccttggctattgctccggccaggctatctgcttggctaaaggatctcaagtgttgccaagtcagcatttcttatttttgaaaagtggcaagtactatgcgcttgagagtataagtgcaaaatacagacttcctgccaggcttccctggagaagaccagagtgaagcatcttcctgggggagaacacacagcgaaggaagtgtcttgagaaacagggcatctgaaatgcgtgatctagatttgtggggaaaggaaagcaggctctcaaagagtcatcccacatgatatgaccttttgcattccttcacgggggagacacatagtccatactttcccccctgctgttgctgggagtcaagtggtcatttgcaaagagagtggtgatttgtttttaaagaattgtgtttgttaagctaacaacacatgggaagggggcttgattgaaccatctgtaaaaggcatttctgccaccctccctctgctttacaatcaggctctcctccttcagatgagatccgcaccctccgagaccagttgcttttactgcacaaccagttactctatgagcgttttaagaggcagcagcatgccctccggaacaggcggctcctccgcaaggtgatcaaagcagcagctctggaggaacataatgctgccatggtgaggactggggaggggacaggtggagcttgctttttgttttgttttgggtcagcatgatagcttataaagcacagcagccgaggaggtcagagttcccagtccttcccactcctttgggcaggtcgcttgagattaagacatgaatggtgacacctcggaattccctcrtaattctcagaaaccgtggggacaagtgattttgtgtgtgtatgtttgcatgtaactggccatgatgatgaagggtcagaagatgattttatttctccaaatgtaaaaccaactcttgtaaagctatttcatggcacaaaactgaagcgtgtattgtacagcgggtgtgaagccagtcaggcctggagtttgaatcttggctctaccagtgttaccttagaaaagtaacgtggcctcttgaagcctctgttagccatgctataaaatggaaataacaatagcagcacctgctctttaagttgtgatggttaaaagaaattatgtcggtaagcccttgctgagcgcccagcacactgcaagcattcagtaaatgctcatcgtttcagtgaacttagtaccatgtttgagagattttattccagtgttggtagtcagacttttgaaagtattggaagcaaactgatccctgagaagatttatttaagcaacttaagatccatttgcttaatgtaaaatttggaaaaccttgacctaaggccaagtaagacagtagtgagctctaagagttttggtctgtagttagttacattttcagggtagcttatgactattcagatgaaatgttcgcagtgtgtgttaaattgcctgtgttggaagacagctaaaatgatgacatttctggtctctgctagaaagatcagttgaagttayaagagaaggacatccagatgtgraaggttagtctgcagaaagaacaagctagatasaatcagctcyaggagyagcgtgacactatggtaaccaagctccacagccagatcagacagctgcagcatgaccgagaggaattctacaaccagagccaggaattacaggtataaactgcagcaccaggcaaagccaactgcgagaatgccggagagcagtggggagggaggcagtcagtttccctgggtgtccttgacttgttcagctttactaagctgaatgcttttctctctgaaatcatggcagaaattcttcatggcaggtgaatcttacttaggacagaggttccccaactttgttggttcatatagtagctcccttagtgtctcagtcatttttttttctgcagccaaaaggaaacagttaacagttctgctcattaagtagatctgaataacttagtgagtacgaatgtcctaagaacttagtagctgttcacagataatacacataaattaatttttaaaaaaataattgcaattactaatgcctcgtgtgcacctattgggcactgcatggtatctcagaccttgaaatcagagtggacagtgacaccctcatttcctgttccacactggttttccttgtggtgctttgtatcactgcacccaaaaaaacccggcttcacaaagacgtcatccacagacacagcatcatttccagccagttagtaattcacagagtgtccaacagatggcgctgcgtctccctcgaaaattcagaatctttctgcagcatccctgtgagtttgctgtgtagcctcagggctctttggtgcacagtttgggaactgaggatctaaggtctctttttttcttttgttaaacagtaaggaactcagaaatcaaccataacttactttttaaaactaagacatcaaattctgagggcccaagaaagtagagccgttgagctaaggcattcccagtcctctgtgggctggtggctaggtaggcctgtgatctggcctgttggtgytcctcaaacttcatgtccacgtctctttgggcagacgaagctggaggactgcaggaacatgattgcggagctgcggatagaactgaagaaggccaacaacaaggtgtgtcacactgagctgctgctcagtcaggtttccyaaaaggtaagaagaaatgaggcagacctgaatctgctgaaacaccatttgctaacrttcttccttcagacaggttaaagaaatagattacttgagtgtctgtgtcatgggttcccaacaggaagtggttctgctgyccccatagtccctgacatttggcaatgtctggagacattttaggttcatgtttttggtgctgytggtatccagtgggtaggagccagggtgctgccaaatatcctacaatgcacaggcagccccctgcaacaaagaagtatccatcctaaaccctgctctatgtgtatcccatggaactctttcttcataccttgtttacataaatgtcaaaagtttgttcaggtttttgagcgtgattcctccttctttgggaatcactgcacttcatacatcattttgtcaagaacggtgagttttccctagggctttatgccactgggccttggtggtatacctgtccaccttctccaggtgttctgtgggtggtcagtttgatggactgcatttgtgctgtcccctttgcaaagcacagttctgaagtgtgtttctgtctatttttgttgtccttgggtaccatcctccccacctgccattatgtcagggactgtgaacccatgggactkgtttattttgccttaacattgaaatagtgtgctcctagctgattccctgtttaatgacgtctatgtgctagttttatgtcgtcggatttttcactttgctcatgttttttggttagctctsaaacagtgagtcggtccagcagcagatggagttcttgaacaggcagctgttggttcttggggaggtcaacgagctctatttggaacaactgcagaacaagcactcagataccacaaaggtatgccagggctcgggagccagaccttagtggggaaagcgtttcagacccagacagtatgtctcccrcatggcatagagaatggcttgatgacttatttcctaaaagacggagcggcagtcccactactccgtggtccagctatacaagcactttccagccaccatgtgagcttgtttctcctattgggttgctttgaagttaactcacactgaaagcacctaatggtagttggtagagagtaggtgtaaagtgtttcctttctcttccctaggctgcctttcaaagagggagagagaaaaagaaggatgggggaccaattctgtttaacatacctctcaggaccatggatatagagtgctgtacataccatttttttttttccttttaatgttggatttctgcagatggtagttcagtcctggcaacaaggccagcattgggatgatcttacattaattagtgcctcaccagtggtgtcgaggcagaagttttaagtcactttataaatagcctcaggtaatgttagtgaatgaggtgggaattgaattttaatagtagctgttcagatrcttcctgtcactaacttctccatcacacatgggccttctttttgggtttcttgggcatgtgctttgtaaagagtctttttcggccggatgtagagaggagtcttagaactggagagagtaattttcctaatagagttactctttatttcttggctcctctcagctctcagattcagactcccttttttagaaggatgttaggtgtgggactttctctagaaagcagctatcacttattttggaggtgtaatgactgggaacagaaagggggagaaacagatccgaggcacaagagagctcctgaaaaagctgctgaaacgtgcctgkgccatctcctgagagaagcctagatgggcggcctccaaggagtccttgtgctgtttgggaccttgagtagctgcctctccatggggccctgtttcccagttcataaaacgggtgatgcagctgagttgtgatagtcaggatgccttcaattgtagacaacaaaaaccaaactagggctgggcacggtgacacatgcctacagtgccaactatttggaaggctgaaataggaggattgcttgagctcagaagttctagaccaagcctaacaatatccaaaaaaacaacaaaaacaaaaagcactcaactggcttaacagtgaagaactgtattgtttcacttgacaagaggttgtgaggcaggtgagttccaggttggtcaagttggccattcagggacagcatcgaggagccaggctctttccactcttctgcactgccttgcttatcctgcagaccttgtcttccagctagctgcactcatggttgccaggtgtgtgccacaggcacagatatgacaggcagacacaatgatgtccccacagaagaggagagcatctcttcctattcctcagcaagaaaatctttcccaggctggacgtggtggctcatgcttgtaatcccagcactttggtaggccgaggcgggtggatcacgaggttaggagawcgagaccatcctggcgaacatggtgaaaccccgtctctactaaaaatacaaaaaattagccaggtgtggtggcgcacacttgtagtcccagctacttggggagctgaggcaggggaatcgcttgaaccccggaggcggaggtttcagtgggccgagatcacgccactgcactccagcccggtcaacagagcaagactctgtctccaaaaaaaagaaaaggaaaagaaaacctttcccagatgatcccaccatacttctcatcacccctgttggccaggcctgtcctgtgcccatccctagcctagtcattgcctcaacccagtcaggatttgctcctgaacctggagctagggttgctcttgttccatccaaaggaggaggaagagtgagtggtggggaatcaggtgggaacagttggtaggggtagctgtaaggattagtgagagtgcacggatgttcctggttcaatgctttgcrtgattatccatgaataagtcctgttgtttatgacgaaggccagatagatgcgttcatccaccctgtgctgaagtcgagccatttagcacagctggaacagccgcattatccgagagccagttctgagtttcaatcagttgcgttctataacaaggaagcattgggcttaccagacagcatcaaggcagggcgccttcgtgaaagctcatctccttgctgtttatggtttattatcttttttaaaaaacaaatatatggcaagttttgtgttttgtatattttaccacggtaaacatacacacacaaatgtaacacaggcttaaaaaaataccctttccgccttctttctgagcattagtgtgtacttgctctgggtttcaagctgttccaatctgtcggcagcaggccatctgccttagcacgatcaacaaaccttgtcagggcatccagtctgcaaaggctgctttgcttgagcagacctgctccattggcattccattctgtagcctcacctgcgctattgtcaggagggggagaaaaggagaaaggaaagcaagtgacctgcggtaccactggactgaaatgataactggatagtggcgtattttcacttggtgttttgtatatgtatatgttcgcatagttgattgtactattcacacagtcttgtagtctgctttttaatctttttactgacaccatatcattttttaaaaagacttagaaatataggatgtattttaatttacttaactgttcccctgacattagacttaaacgatgtttccaggtttttgctcttataaatatgctgtgatgattatttttgtgcaaaatctctatttatgtttcacatgatttgcttggggatagatttcaaggaagggttactaggataatactaccagcttactttccataaagttgtactagtttatatttctgttatcagtatactaaaatgccttctcagtccttcttacattgtcttttcaaaatggatacagcatgtttattttttataagtactaattccagtcttttttttttttttttttttcaggaagtagaaatgatgaaagccgcctatcggaaagagctagaaaaaaacagaagccatgttctcyagyagastcagaggcttgatacctcccaaaaacggattttggaactggaatctcacctggccaagaaagaccaccttcttttggaacagaagaaatatctagaggatgtcaaactccaggcaaggtaactttcatcaggaaaggcttttgtgtttttattaagtggaacttcctatattctggctggtctgtatctttcagaggacagctgcaggcygcagagagcaggtatgaggctcagaaaaggataacccaggtgtttgaattggagatcttagatttatatggcaggttggagaaagatggcctcctgaaaaaacttgaagaagaaaaagcagaagcagctgaagcagcagaagaaaggtaggaacaaagaactgattsatgaccttgggactaagctgccaattccagcataaggactgtgtcacgtggtgtgggaagcagttactgctgactagacrggctgcaacactcagctcactccgtktcagagacccactctgacgttcctttcctcaaaacgcccagtgatctcttcgtgttcgtgttcctggccttgagtccctccatatggccacaggaagtgttcacacttaagattgccacctactatccctagttgtgatttaggtttctcttgatgagatctcttgagtccagtattataaaacagagagtgggctagcggagttcagtgtcagtgtgagtgagtgtcagtgtaattccacatcctccgaatgtggacastccaatcaccagctccttttttcctccccggctttcttacaggcttgactgttgtaatgacgggtgctcagattccatggtagggcacaatgaagaggcatctggccacaacggtgagaccaagacccccaggcccagcagcgcccggggcagtagtggaagcagaggtggtggaggcagcagcagcagcagcagcgagctttctaccccagagaaacccccacaccagagggcaggcccattcagcagtcggtgggagacgactatgggagaagcgtctgccagcatccccaccactgtgggctcacttcccagttcaaaaagcttcctgggtatgaaggctcgagagttatttcgtaataagagcgagagccagtgtgatgaggacggyatgaccagtagcctttctgagagcctaaagacagaactgggcaaagacttgggtgtggaagccaagattcccctgaacctagatggccctcacccgtctcccccgaccccggacagtgttggacagctacatatcatggactacaatgagactcatcatgaacacagctaaggaatgatggtcaatcagtgttaacttgcatattgttggcacagaacaggaggtgtgaatgcacgtttcaaagctttcctgtttccagggtctgagtgcaagttcatgtgtggaaatgggacggaggtcctttggacagctgactgaatgcagaacggtttttggatctggcattgaaatgcctcttgaccttcccctccacccgccctaaccccctctcatttacctcgcagtgtgttctaatccaagggccagttggtgttcctcagtagctttactttcttcctttcccccccaaatggttgcgtcctttgaacctgtgcaatatgaggccaaatttaatctttgagtctaacacaccactttctgctttcccgaagttcagataactgggttggctctcaattagaccaggtagtttgttgcattgcaggtaagtctggttttgtcccttccaggaggacatagcctgcaaagctggttgtctttacatgaaagcgtttacatgagactttccgactgcttttttgattctgaagttcagcatctaaagcagcaggtctagaagaacaacggtttattcatacttgcattcttttggcagttctgataagcttcctagaaagttctgtgtaaacagaagcctgtttcagaaatctggagctggcactgtggagaccacacaccctttgggaaagctcttgtctcttcttcccccactacctcttatttatttggtgtttgcttgaatgctggtactattgtgaccacaggctggtgtgtaggtggtaaaacctgttctccataggagggaaggagcagtcactgggagaggttacccgagaagcacttgagcatgaggaactgcacctttaggccatctcagcttgctgggccttttgttaaacccttctgtctactggcctccctttgtgtgcatacgcctcttgttcatgtcagcttatatgtgacactgcagcagaaaggctctgaaggtccaaagagtttctgcaaagtgtatgtgaccatcatttcccaggccattagggttgcctcactgtagcaggttctaggctaccagaagaggggcagctttttcataccaattccaactttcaggggctgactctccagggagctgatgtcatcacactctccatgttagtaatggcagagcagtctaaacagagtccgggagaatgctggcaaaggctggctgtgtatacccactaggctgccccacgtgctcccgagagatgacactagtcagaaaaktggcagtggcagagaatccaaactcaacaagtgctcctgaaagaaaygctagaagcctaagaactgtggtctggtgttccagctgaggcagggggatttggtaggaaggagccagtgaacttggctttcctgtttctatctttcattaaaaagaatagaaggattcagtcataaagaggtaaaaaactgtcacggtacgaaatcttagtgccyacggaggcctcgagcagaragaatgaaagtcttttttttttttttttttttttagcatggcaataaatattctagcatccctaactaaaggggactagacagttagagactctgtcaccctagctataccagcagaaaacctgttcaggcaggctttctgggtgtgactgattcccagcctgtggcagggcgtggtcccaactactcagcctagcacaggctggcagttggtactgaattgtcagatgtggagtattagtgacaccacacatttaattcagmtttgtccaaaggaaagcttaaaacccaatacagtctagtttcctggttccgttttagaaaaggaaaacgtgaacaaacttagaaagggaaggaaatcccatcagtgaatcctgaaactggttttaagtgctttccttctcctcatgcccaagagatctgtgccatagaacaagataccaggcacttaaagccttttcctgaattggaaaggaaaagaggcccaagtgcaaaagaaaaaacattttagaaacggacagcttataaaaataaagggaagaaaggaggcagcatggagagaggcctgtgctagaagctccatggacgtgtctgcacagggtcctcagctcatccatgcggcctgggtgtccttttactcagctttataacaaatgtggctccaagctcaggtgcctttgagttctaggaggctgtgggttttattcaactacggttgggagaatgagacctggagtcatgttgaaggtgcccaacctaaaaatgtaggctttcatgttgcaaagaactccagagtcagtagttaggtttggtttggttttggacatgataaacctgccaagagtcaacaggtcacttgatcatgctgcagtgggtagttctaaggatggaaaggtgacagtattactctcgagaggcaattcagtcctgggcaaaggtattagtacaataagcgttaagggcagagtctaccttgaaaccaattaagcagcttggtattcataaatattgggattggatggcctccatccagaaatcactatgggtgagcatacctgtctcagctgtttggccaatgtgcataacctactcggatccccacctgacactaaccagagtcagcacaggccccgaggagcccgaagtctgctgctgtgcagcatggaattcctttaaaaaggtgcactacagttttagcggggagggggataggaagacgcagagcaaatgagctccggagtccctgcaggtgaataaacacacagatctgcatctgatagaactttgatggattttcaaaaagccgttgacaaggctctgctatacagtctataaaaattgttattatgggattggaagaaacacrtggtcatgaatagaaaaaaaacaaacccaaaggtaggaaggtcaaggtcatttcttagatggagaagttgtgaaagatgtccttggagatgagttttaggaccagcattactaaggcaggtgggcagacagtgacctctctaggtgtgtccacagagtttttcaggagagaaaactgcctgacctttgggactaagctgcggaatcttcttactaagcttgaagagtggagaggcgagaggtgagctactttgtgagccaaagcttatgtgacatggttggggaaacagtccaaactgttctgagaaggtgaactgttacgacccaggacaattagaaaaattcacccaccatgccgcacattactgggtaaaagcagggcagcagggaacaaaactccagactcttgggccgtccccatttgcaacagcacacatagtttctggtatatttgttgggaaagataaaactctagcagttgttgaggggaggatgtataaaatggtcatggggatgaaaggatctctgagaccacagaggctcagactcactgttaagaatagaaaactgggtatgcgtttcatgtagccagcagaactgaagtgtgctgtgacaagccaatgtgaatttctaccaaatagtagagcataccacttgaagaaggaaagaaccgaagagcaaacaaaagttctgcgtaatgagactcaccttttctcgctgaaagcactaagaggtgggaggaggcctgcacaggctggaggagggtttgggcagagcgaagacccggccaggaccttggtgagatggrgtgccgcccacctcctgcggatactcttggagagttgttcccccagggggctctgccccacctggagaaggaagctgcctggtgtggagtgactcaaatcagtatacctatctgctgcaccttcactctccagggtacatgctttaaaaccgacccgcaacaagtattggaaaaatgtatccagtctgaagatgtttgtgtatctgtttacatccagagttctgtgacacatgccccccagattgctgcaaagatcccaaggcattgattgcacttgattaagcttttgtctgtaggtgaaagaacaagtttaggtcgaggactggcccctaggctgctgctgtgacccttgtcccatgtggcttgtttgcctgtccgggactcttcgatgtgcccaggggagcgtgttcctgtctcttccatgccgtcctgcagtccttatctgctcgcctgagggaagagtagctgtagctacaagggaagcctgcctggaagagccgagcacctgtgcccatggcttctggtcatgaaacgagttaatgatggcagaggagcttcctccccacttcgcagcgccacattatccatcctctgagataagtaggctggtttaaccattggaatggacctttcagtggaaaccctgagagtctgagaacccccagaccaacccttccctccctttccccacctcttacagtgtttggacaggagggtatggtgctgctctgtgtagcaagtactttggcttatgaaagaggcagccacgcattttgcactaggaagaatcagtaatcacttttcagaagacttctatggaccacaaatatattacggaggaacagattttgctaagacataatctagttttataactcaatcatgaatgaaccatgtgtggcaaacttgcagtttaaaggggtcccatcagtgaaagaaactgattttttttaacggactgcttttagttaaattgaagaaagtcagctcttgtcaaaaggtctaaactttcccgcctcaatcctaaaagcatgtcaacaatccacatcagatgccataaatatgaactgcaggataaaatggtacaatcttagtgaatgggaattggaatcaaaagagtttgctgtccttcttagaatgttctaaaatgtcaaggcagttgcttgtgtttaactgtgaacaaataaaaatttattgttttgcactactctgctgtgtggacatggagtggcttacactggccttggcaggcttacaggtcaagcaggggactggtccaaagatacaaagccttagggtctggtttggctaccttgggtgactggaagaggagcctgacaaataatggatttgggcttttgtctctaagaagaccctttttattctggcaaatggtctggtgcacagccacaaatccttcctgtatctgcctcaaattcatgctcttcctcaatgagtggccaagtggcatagtgtgggagggggtgatttgaatcctgcctacagaaaaaccaagaaccaggctgtctgcaggggtgtgtggctcctccgtgctggcatgttgggtgtcccatgttttggtggcaccacactgacacttcagtgctccagagcttgccctcttgagccttgctggttgtgttaatgtgagtgtgccaaggagacagtacagctcccaacattcccttctccgtgcccttcatgggctttagaagaaggccggaaactgcctttacacaattttgacatctaccctggcttatgatctcttggcctgggacttccatataaggaccagggatgaatttcatttgtgatgtggctttcaattgcttgcctctgcctggctgtgtctggaaatcagcgttgctctgcccattttatttttatttgttttgtttatttatttgagacggagtctcactctgtcgcccaggctggagtgcagtggcctggtctcaactccactgcaacctccgcctcccaggttcaagtgattctcctgtctcagcctcccaagtagctggaattacaggcgcctgccaccatatccggctagtttttttgtgtttttagtagagacgggttttcaccatgttggccaggctggtctcgaactcctggcctcaagtgattcacccgccttggcctcccaaagtgctgggattacaggcgtgagccactgcacccaccctgctctgcccattttaatggttgaagcaactcctttgagactaaggctgggaggcggcagtttttaatttctctggaaaattcaggttttcttatctgactaggtctcttaactagacttcccatccttggaggaagatctgattgctggtcctctggagcttgggcatgagcctcttagaagccgacttgagacaggcatgcccccttgcctagggtggcctctctctctgctgtctgctgaggcttactgcccagtgtcctttgatgtcttaggggagatgtaggttttctttcagggataaatcccaggaaaccaagtcaggcagagaggtggtagaatactttttattcttgactgtctccccctgaggaagcaacaataatacagaagctaagtcrtcccctgtgaagggaaaaaccarcagtcagacattactttgggcaagctcagaagccagggacacattttacaatgtttggggttyractacgctgtgaaaaccaggtcatcgcccttgctcaggagccacaaaatcagaattctggcttctgtcatggtctccctctcccaagtaaaggcgaaggaaaggtgagtttattcccctttggctgtggtccagagaactaaacacactactgagttctggccaggtgccgtggctcacacctgtaatcccagcactttgggaggccgaggcgggtggaccagttgaggtcaggagttcaagaccagcctggccaacgtggtgaagccccgtctctactaaaaaatatatatatatataaattagccaggtggggtggtgggcgcctgtaattccagctactcaggaggctgaggcaggagaatcgcttgaacctggaggtggaggttgcagtgagccaagatcgtgccactgcactccagcctgggagacagagtgaaactccatctcaaaaaataaaaaaataaacacgctgagttccacatgccgacccccactccatcctggaggggagcatccctggctcgcaaacagcgtgtgccttgcctacagttggggctggtggtggggcaaggagcagatggtctccagcttgatcaccctctgcaaaactgcagcccgcagcagggacaggcgtggcactggagccggatgtggctcaaagaggacctaggtgacagttcagtgccctcctgggaccctctaccacaccatcctgtttgggcaacttctgtaagtgggtttcctcttcatcagcacggagcctgatgcttagaagtggaaatgttagaagttaaagcaagagggccgggcgctgtggctcacgcctgtaatcccagcactttgggaggccgatcacgagggtagatcatgaggtcaggagattgagaccatcctggctaacatggtgaaacgctgtctctactaaaaatacaaaaaattagccaggcgaggtggtgggcgcctgtagtcccagctacttgggaggctgaggcaggagaatggcgtgaacctgggaggcggaggttgcagtgagccgaggttgcgccaccgcactccagcctgggcgacagagcgagactccgtctcaaaaaaaaaagaagttaaagcaagaagagagagaggaagtctcagtaatatattggctgattcccttggggttagtaagtggcagggtccacgggtaccagtgaaaaaaggaccaaccagtaaaatccaaattaaacagcaaagctctccgccgacggagctcctggctctgagttacaatttcccaccaggaggcctccagggtggttttgaacatcccctgggtttgaggctggcttttgtgagctgtctacacttgtgtttagtggccctgggctgggtccctatggcctgggcaggacgagcggctcccctggtgctctcctggtgcgcctggggctcactcacgtgctgcarcaccttgcgcggcaacttctcggagtgggcgatccattctttcattaagtctaggatgagggggatgaggctgaccacgccgccgtagtggttccgggcctcgtcacagctgaggtggttcaccacatcatgagggtatctgcaggacggcagggggccaggtgaacccatgctcccgggacttgccatgccgtggcaagcagctgccacacctcaggcacagcagagtcacctggggaggctttagaactggacacacagcacgctgaggcgctctgtccccagagattctggcagaccaggcctggggtgccacaagccccaggtaattctggtgtgaaagacaggagatgcaaaccactgccccatggtccgtagaaacctgggttaggggtgaggaactggctggctcatccctctggctcttctcaccctggtatctacagagcttccccaggctctggcccactgtgctgcaggctcccgggctgtcaggatgaggagccctcagtgccagtgctgctgcccctgggaggcggctctggtgtccacttctttgcatgtcagtgaggatctctgtgggcttctgggggcaactgctctgggctctacacccccttctccacctgcctggtgctaacacccgtgagacacctggtgtcctgccatgtctacgatggttgtaaagaaaaggttttgttgaatccgagtcattccaataaatgagtggagactgggatttcctgcccggggtggtytaataggagcaccatgatccaggcaacaggaaagaagcaggacagaggcctccccacaggcacacacggggcctcaagagcagcatcagagggacttactttgctctgaggctgcttaagtcgttgctttggctaaygagggttttgcatttctccaggaggttgttggtgactggggtgccagagtgcacggcctcaaagtgctggcagagcttattcagctctgaacagatgtccaggaacatgagcagaacccgccggtctgtggagctgttgcagtagtgttccatgtagctctgcacctgcaagggccgccgccacatgagctggggacatgccaacccgggtcctggctggcttatggtgcaaatgtccagaagcacccaccctactccctcccaccctacatgactcatgggggagacgcaagtaacgcttaagcattttaaggtacagaccactctatatagtggtatctctctctctatagatggatggatggatggatggatggatggatggatggatggatggatagacatgatatgaaattaatggatcggttgggcacagtggctcacacgtgtaatccccgcactttgggaggctgaggtgggcggggatcacttgaggtcaggagttcgagaccagcctggtcaacatggtgaaaccccatctctactaggaaaaaaaaaattagccaggcgtggtggcacgygcctgtaatcccagctactcgggaggctgaggcaggaaaaccacttgaacccgggaggaggaggctgcagtgagccgagatcatgccactgcactccagcctgggtaacagagcaagatgccatctcaaaaacaaaaaattaattaaattaaatggacggatggatgggtagatagatagatggatataaaatcaagtgttccaggcaccatgcaaaatgctttacgggcctgctctcgcctgtcttcatctaaaccctacacactgagcaggtacctttttaaattcccattttacagatcagtaccatgacatgaacactggaggtttgcagaggtgaaataacccgcccagggcaccagtggcttagttgggtgtccccagctcagtggctccgtgccctacccctcacctgtcccctgccacctgaaccaaccaccgcctaaagcaaaagggggctgccccctgacttaatgccacagtgcctgtcatcccacttctagagggttcattgtgagaaattccagcgtgggccacccatactgagagggaaacagcagggactggaatcctttgggcttcagccgtactgtgttcacaaggtggagaaggaggggcaggccagtaagtggagcttatggggttacccagtgactgcatctgaggttgggccagagccggaggtctgatctcgagctagggaggaattggctgtggtccaggccagatgaacagacccatttcgtagtcagatggttctactctccacaatctgatgacagatgcaggtatcacctcctccagcacccacaaaggtctacatctaaatcagggttttcttgctgtaaccgtttgtctttttgttgctaggggatgtttccccaaacaatctgaagtggttccttcccaaggactgccatgcacaagcagcttcgtaagggggagaggctcttcacactcatacccacaaaggcacctgtaggggtcgaggaggaggaacctgccccatggtgtaactacaacagagcattgcgggggtggggggcggtgtgcagggaacctttggacacttctggttcagggagggcaggggaggggtgaggcaactcagaacacaaggccactgtttaccaagagccttcggctgaacctaaggcaagaaggccactcccttatgcatggatgtagattctgggaagggacacttgttgacttttgaagcttctggaggatggactaaaaaggatgtaggcagtttcttttcttttttcccccgaagtccaggtttacagaagaggaagtttattttccaatagctcaggggctgcatgcgtgggcaaatatggctaaattggctaaatgtcacaagtcggtgaatctgggtgagggttatatgggtgctccttttctgtacatttaactttttttttttttttttttttttgagacagggtcttgctgtgtcacccaggctggagtgcagtggtgcgatctcggctcactgcagcttctgcctccagggttcatgtgattctcatgcctcagcctcccgagtcactgggactacaggcgcgtaccaccacaactggctaattttgggat

SEQ ID NO: 6874 - DNA, 63635 bp, Homo sapiens
ctgccccgggtcacacagtgtgagagccagggctgggatgagacttaggctttcacaggggagggtctcagtgcccacggcccccctgctgccaggcccacacagcygctgacactcacaccctggttggcgcccatcgtctccgagggaaccttcaacccagagcttctgcagcacatctaccagccactgaacctgaccattggggtcacggtgtttgcygtggggaagtgagtagtgggctggggaakgggagggaggtctccctgagccacaggagtttatagttgggaagagaccagaccagacgtgcacacaggaccctgctgggcacccaggaggctcggaaccaggtgccaagcagatagaaagtacagtgtagggtgtgatagtgggatgggagcttcctggagtaggggatctggctctagcatagacaggatgcagagtccaggtgaggggacagcaggagcctttgtcaggaggcccccttgcccctccctgtttcatctagacccctcctctgcccttgtctctcccatgaccccacctggccttcctttaggagctgccgcttggcagccttcctctgggcctctgggactccttcctggaacttcctggggccctaaagcatgaccagatgatgaatggtccacctagggtcaggtgacccccttgtccaatgagttttggcctgggggcagggctgtgtcaaccacacccccctccatgcccccagcatctagctcaacttgccttcccttgattcgtccacttacctgcttcttcactactttcttctctgtgatcctcaatgttcctgcctgtaaaatgggcatgcttatgcagatcaaagatcataagaattcttagaacgtcgctgggcacttagaaattgctcagtaaaagttcacctggcctaggagcataagaatctctaccaggaacatgcttacaacagccgtaagaggctggtactagcattttgggaattggacaaatgaggacccagagggccagagcagagtgacatcttgagatggggagctggtaagtggaccccagcctggctgaccccagcacacagtggggaccctggcaggctgctggtgtagcagtgggtgaccgggtgatcatcactaggtamactcatttcatccagtccttcctggagtcagccgaggagttcttcatgcgtgggtaccgggtgcactactacatcttcactgacaaccctgcagccgttcccggggtcccgctgggtccccaccggcttctcagctccatccccatccagggtcactcccactgggaggaracatccatgcgccggatggagaccatcagccagcacattgctaagagggctcaccgggaggtggactacctcttctgccttgatgtggacatggtgtttcggaacccgtggggccctgagaccttgggagacctggtggctgccattcacccaagctactaygccgttccccgccagcmgttcccctatgagcgcaggcgtgtttccactgcctttgtggcagacagcgaaggggacttctattatggtggggcagtcttcggggggcaggtggccagggtatatgagtttactaggggctgccacatggccatcctggcggacaaggccaatggywtcatggctgcctggcgggaggaaagccacctgaaccgtcacttcatctcaaacaagccgtccaaggtgctgtcccccgagtacctctgggaygacaggaagccccagccacccagcctgaagctgatccgcttttctacactggacaaggatatcagctgcctgaggagctgaccacggagctgggggttgccatggatggggacccaaagacctgcagccaccagtgcttcactagcgtgcagaccagccctgtcccgcctccctgtcagtcaggcgaattcaaccggaaaagggacgtggaaaggccactgtgaactgcagagggctgtgcacacagtagcacacaggatctcacagtaacgcggcatgggaacagtgagacagggggaggggaggcgcagttacaaaggcagggcccggcaggcttgccacgttctgcagccgtgcctttgcggggcaggctctgaagcctcagcccgactcagagtgcctgaaccctgccgcgccagtcccccgtttattgcatattgcccttaacgtagcatttctaataccctggtgtgaaggcgccctagaccccttttctctggtcacaggggtcctgggtcctttgatgtctcccaaccacatgtagccaattcctcactcaggcccccagagtgagcctttgaaatggaacaggtctaggctccctcggtttcctgcaccccaaagtgagccgcactctcaggggactagccacctccttcttaagagggtttggggcagtttataataaagggggcgtgtgctcaaccctagctagggtgattttttttgttttgtttttgttttttttgagaccgagtttcgctcttgtcacccaggctggagttcagtggcgtgatcttggctcactgcaacctctggctcccaggttcaagcgattctcctgcctcagactcccaagtagctgggattacaggtgcccgccacacccagttaatttttgtatttttagtagagacggggtttcaccgtgttggccaggcttgtctcaaactcctggcctcaagtgatccacctgcctcgacctcccaaagtgctgggattacaggtgtgagccactgtgcccggccactaaggtggtttttacctgcacatccagcctgcctgtgtccccagtgtctgttccatcaggcagtggggacacaggcagactggaagtcaaacacaatcgaatagggatatagttactccagaaaatctgagctaaagctagaggctacaacggacaggatttcattccagttctccagggagactgggtgaagtggagcatgctggcagagccaccacactcccaactgtgtagaggggtatggagcccagcagccggacaaccctgggagctcccgtatccagggtcactgcagccctgtgaggtcaccagtgggcgtgggactctgagccaatggtgcaggccaggattagagggcatgggaagatgacctctccagtctggatccagaaggacttcagaggcctacagtgtggttctgtctgcctggccacgcagagatggggtggggtatgggttcagggcttggcggcctggtgctcaccgccctggagacagcagcatctttttcatggaaggagaagacagaaaggagggtggggtagactctggtcatactggaacgggcaggcacccacccacttggtcacccgtggaaaagctggggccagccctgagttcattcttccttcacctgtggtttggctggcgagcagggacagacccgaagagcgtggacagatggagtgaccagttggaggagacagactgggctggagaggcctggagtcttgaaggggcactgagtgcctcctgggcagaggggcaggaatggaaccatggcctctgtgtccctcatagggagcacctgctccaggggaggggttctgtgctgaaggagtaggccctgcctccgaggagcttctgttgaaagcacagagagggccatggagcgctggactcagctgggtggatggctgggagatgggggacctgaggtgacagcagactctgaggcctgggcagctccacctagcaggggagaagtcccccatacccccctcaccccacttacacccagctttacccctggcacaccctcccgggtgggagtccctgactcattttcagtagaggaaactgagactctgagaggtcaccatgagcttgcctgtgatgtggctcagctgcaggtttgaacccaggtcatctgggttcaagactgtgctctgcacagggtgggaggagtgcagctctgaaggtgagtgcattgtggaggaggatacagggaggggcagtgctggcagggggctctgagaggggcaggggcttgatggggtccctgggtcaggatggccccaggaggctagagttggggtatagggaccaggtcacacagggttctgaatgccaggctaggaggcaggggtcaccgcaggcctgtcccagcagggggatcaatatatatggggcccaagcgctggactcaggggatacctggccagcgaggccccaacacaggatgaggcctctgatgaccagctcggggatgagtgacggggaagagccatgaagtgggggtcaccacgcacagcagggcctggccacttacagctgagtggcctgcagtgctggtgccttggctctggtataaaattgaatgaagccgggcacagtggctcacgcctgtaattgcggcactttgggaggccaaggcaggaggatctctggagcccaagagttccaaaccagcctgggcaacatagtgagacttcatctctacatagtttttttaaaaataaaaaaggccgggcacagtggctcacgcctgtaatcccagcactttgggaggccaaggtgggcagattacgaggtcagaagttccagaccagcctggccaacatagtgaaaccccgcctctactaaaaatacaaaaattagccgggtgtgatggcacatgcctgtagtcccagctactcgggaggctgagacgggagaatcacttgaacctgggaggtggaggttgcagtgagctgagactgtgccattgcactccagtctgggtgacagagtgagactctgtctcaaaaaaataaaataaataaataaatcaaaagggttggccaggcaaagtggctcacgcctgtaatcccaacactttgggaggccgaggagggcagatcacctgaggtcagaagttcgagaccagcctggccaatatggtgaaactctgtctctactaaaaacacaaaaattagtcgggcgtggtggtggcagcgtgcacctgtaatcccagctacttgggaggctgagacaggagaatcgcttgaacccaggaggcagaggttgcaataagccgtgatctagccactgcattccagcctggtcgacaagaaggagactgcggctggtgcagtggctcatgcctgtaatcccagcactttgggaggccaaggtgggaggatcacctgacgtctggagtttgagaccagcctggccaacatggtgaaaccccatctctactaaaaatacaaaattagccgggcgtggtggcaggtgcctgtaatcccagctactcaggaggctgaggcaggagaattgcttgaacctgggacgtggaggttgcagtgagccgagatcgcgccattgcactccagcctgggggacaagagtgagacttcgtctcaaaaaacaaacaaacgagactccatctcaaaaacaaaagtaaataaaaaataaaaagggacgaaatcagttagccctaataacactgactacccccaacagtcgctcaaccccagtgtgaggcctccttcccccaggctcccttgagccccatcttacaccagctgaagctgcagctggaccttgtggtcccgggtgctgtcagggaagacaaggagggaggtggggaagaggaggggaaggggagacctgactttctccctgcccaggctgagttcgctgtcacctcgggtcccccagctcccagccatccgccgagccgagtccagcaggtggcatcggggtgctgggcgccagggtgaacgtgtatatttggtgacgccggcgcgccgactcagcggcccccgcctggctggggcgaggttggccctaggtcctagcggggtggggagtactgagcaggcggctggggcggacggacacgtgagatcggccgcacatggcgctgggagcgtggcgcgtgcgcgcggcgaagcggagtgacgtgcacgcgctgtctgcggtcccgcgcaggccccgtgtgcgcgcccggccttggacaacaggcccggctgccccgcggggggaacacccgcgtcggcccgcgggagggaggcctgagcgcgcccccgagcgcgtccccgagctcacgcggcggggcgcgcccctcgcacctgcgggcgggctggggcggggccgcggctgtccccgcccacccgggcccgagcccggggagccggggcggaaccgagcggcgaggcccgagcggccggagcgcggcgcggcgcagacaatgggagcggcgctggcggctgccggggcggccccgagggccgcagagtcctgggcccggcggggaccggaggccgcgccatgagccccgcagccgggcgcacccctgcgccgcgcgcgggcccaggcgagcggcctctgcgagccccgggtcccgccctggggccggcgatgtgccaccgaggctgaggatgatggtagattgccaggtgagtgcgcgccgtccccagcctcgcgtcgcgggtggagggaggaccgtatgccccagcccacacccaccggggggagggagcccggcgccgcgtccacgctgagcgtgcgcttacgcagctccgcgtccaaccccgcccgggacagtagggaaactgaggacaggagaggggcagggactcgcccggggcacacgaagttggcggagtccagagatgaagggagggttccggcctcttaggccaggaagggctcggctcacccttcccgtggggtttgctttgggaatgacagcctctaagatcctggggacccctgcccatctcccatgtgggctcatttgcctgggcttctccgcgcacgtacaggcgcaggcctgcgcatacatgctcacacacacgcagacacacacaccacacacttcctggggctcagagtaggacgggacgctggggaagtgactgggggaaagaagaaagagggcgggggctactctgccacgggcaggggcatccagtacccagcaacatgcctggggccatggcacggggtggggggcaaggggaggacacgccagcttgatgggcggggattctccaaggttcccaggatctgtctgggctggggcagcctggagaggacagattgtggggttctgtgttcaccgctgtgatcacctggaagcaggaaaagaccccttcagtgtggacggggctgtaggaaaggaagcctcaaattcctgctctataaattggaatgtttggcctgggtgactccaagggtcccacaggctcgtagacgtgtctgtcggccttaggtctccactggggatgcccccactacccaccgaggtctgtggaaaatgccttcttcttggaggttcttctgagcaagagaagccgggggggctgaagggctgagggcctggggtggtgcagagcgtggccaagcactggacaactcttgtgggacaagactgtccttgttggagcctcagggttcttatttggaagtggggccagagccgttgccctggttggagtgaggaggcctcacgagtgaactggacaccccaggaccagcagagggaaagaggggagcaaatgaagcttctgaggckccttgaattacccctggagcctgcaggttctgctcctttgaccccctgggactcaggagagctgctaccttgacaacacccaaacaaaggtgtgtgttttgttttctgggttttctgcctgaggctgctgctgctgtgctagtgccggccaccagggggaggcagtgcccactgtactcattggagcaactggagtcagggagagcccggcagggtccctctgggggaccccggcctctacccaatgcacaccccccattactagcatccctctccacaatgttagctgctcagaggcgggagggggctccaagagcttcctctttcccttcagcaggtgtgcccaagcactcaccctgggttgtgggggggcagcgttgggcttgggygtggctctgaaagtgacccaggggggcctgccctccagagctggcagtctggagggggcgatggacagggcacaaaagcaaacaggcacagaaaggaaaaagcagtgctgcagcgaaaataatgccggggctgccatggagggctggggcctgctgggtggggatctgagaggtctcgctaaggggacatctgtgctgtgaccagaagacaaagcatgggccagccctgcacgagtctggacagtgtgatggagaaggctcagcaggcagggctgggaggcagaaatgagtttggccagagaggagtgagaaaggaggccagtgtggcccaagtgagctgggggtgggaggggcagcccaggggcctgtggacagctatgtgacaacactaccctaatgtacagcttccagcaacagacattgatcatcacacagtttctgtggacccagatccagggcagctcagctgggtgcctctgcccccaggtctcaagggaggctgggactggggtctcatccatggctggactgggcaggacccgcccccaggccattctcatgttattggcaggattcagttttgactgagggcatcagttcttctgtgactgttggtgggggccctcccttggttcactgccatgtgggtctctctgtagggcaggcagctcacggcatcagaactcacttccccagagtgaggggtgaaggtggggaggaaaacaagagcaaacaagcaagacagaagtcatagttttttgtaaatcttggaagtgacctcacatcacctgtgctgtgttctgttggtgagaagccagtcactaaatccaatcaccctcggaggaaggggatcactcagcaacttatgtaccaggaggcagggatctctggggccagtgtggaggctgcctgggacagtgtctgagaggaggcagtcaggcctgattctaaacataacggaggctgggcgcggtggctcacacctgtaatctcagcattttgggaggccgaggcgggtggatcacctgaggtcaggagttcaacaccagcctggccaacrtggtgaaaccccgtctctacaaaaaagaaatacaaaaattagctgggtgtctcggcaggtgcctataatcccagctactccggaggctgaggcaggaaaatcacttgaacctgggaggtgatgagtgcagtgagccaagatcatgccactgcactccagcctgggcgacggagccagaccctgtctcaataaacaaacgaacaaacaaacaaacaaacatcatgggagccattggaaggtgttcccattggaagatgctcccatatgccacagggggccgatatctgatttttgcttcattttcaacccgttcatggtgcaaatgaggaaaccagaccaagaagggagtgactttccccagatcacagcaccagtgcccagcctgtccgacttgtattccgggctgtgtctcgcccctgtgagaagtttctttcctcacagttgtaaaggccagaggtccaaaatccaggggtcagcaggaccctgcagtctctgaaggcccttttccttcctaatccttccatctctaagtctgtgaggcagctaacaggttttgtagtattgtctcacattagcgtggtgatgtccccaggaagtagacgttagaaccatccccattgtgcaggtcaggagactggggaggccctgaaaggcacaatggctagtttggggtcacagaactggcaagaggcaggagcttggtgacccagatggcttcccctctctgagcctcaggggctgggagcatgagaacacactggttggctgtcccagctcccagggtggctgtgagtacctggaagtgccccttgtctcccctcacacatctgccatcactctccccatttccttaacccccagcactgctgccacttgatttttacgaacatctgaatatgacgaacatacagatttttacgaacatctgaatatgacgaagtagcaaaggtggatattcactcattcatttcgtatctgtctcctgggcccaggccatgccggggcggggggtgggggtaacaagaatccggggagttgccaggggaaggggaagtgctcatctggggagtgcgtgggcacagagagrttccagaaggaggtgtcctgtggtcgtggttgattcgtggaggggaggtgtggtgatggcacagagggtgatgactgggaccagtgtctatcgggtcagcttcctgggctgctgtcacaaagtgctgggtggctcaacacaacagaaatgtattctctcacagttctaaaggccagaagtccaaaatccaggggtcagcaaggccatgctgtctctgaaggttctaggagaggatacttccttgcatcttccaacctctggtggctgccagtttccttggcattcgttcctggttttgtagacgtgtgactgcaaactgtgccttcatcagttcgtgtctgtccgcctgtgcgtgtctgtccaattttccctgttatcataaggatagcagtcattggattaaggcccaccctaatccagtatgacctcatccggattctatccgcacagaccctatttccaaataagatctcattcacgggtaccagagatctttttgttcagggacacagttcaacccgtaacaggagtattgggaatgatccccctcccaaaggccgggtacccgcgtgcctacggggactaggggagcagcggggagtcggaagacatcgcaggaacccagcccccagcyagggggtgtgggggcgtgagcggagcccrcctgctcctcagcttggcgcgctctggcggcagcaccagcaggtggcgctgtgccctcccgtgcggccgcccagcccggcgcggagctgccgcagacaaaggtctcgctttcgggtcgcgaggrgcytgcgcacagctgtaaacaggccaggggcacggccacctcatgggtgacacacacgggaggaaatcaaaccaggcggggccgaggcggggtgactgggtggcgactttgcgtcggaggccggcggggggcggaggaggaggtgacaggggtggcgaggaggaccatggtttgcagaccgtggtgtcagcggggcggaaaggaaggcagggaggagggataggggacctgcgaggctgcaggggccaggagtttgcctttcgtttggttcctcgcctgcaagctgagccggcctttctcaggcctctccagaggccgtgcggctgatgacactgcggtttgcagatagctctcctgttactgcaggcccaggtctgcgggtgctcggaaggcagccctgggcacgggtgggctgtctgtgcagayagagacttgaggggtccttccccccaaccccagccccagaccctgcctcaggggagctgggatgcctgaggtggtcctgctgctcctggtggggktcagcacagcccctcagaggcgcctttgatatacaaaggggcgaggcagtgtggggctgaggagcaggggtcaggtccccgccatggagctgctcacatggcatcagcgaaagggagcggagtgcacagcgggccgctggcccaggagtggaatgagtggaagccattcctttattttattattattattattattattattattrttgttgttgttgttrttrttrttattattattattattattattattattattattgagacagggtcttgctctgtggcccaggctgcagtgcaggggccagatcacggctcactgcgtcctcgacctcctgggctcagacctccagagtagctggggcggcaggtgcacgccaacactcccagctaatttttggattttttttgtagaaacagtttcaccatgttgcccaggctggtctcaaacacctgggctcaagggattccccccgcctcggcctcccaaactgctaggattaaaggcttgagacactgcatccagcaagaggccatttcttactgtcacctccctacccgcacaaggccctcccaccacctcctcgctcaccgagctaccaggcccgcccctgaggctgctggtccttgacagttggttcagygattgattcacacagcagatactggcctctgtacacctggctggcgctgggtgcctggcctgtgggaagcaccctggcttctgtggaaggctcaggggtatggggcagacagatcttgtggagaaggcatgggctgcgagcctggggacctggattcagtggccactctgccatcagtggcgtggtcagtcaccattgcacgctagccacaggactattctccacagagtccttccctctgtcccctgctgcagaggtgcctggtgatgacagccagcctgtaggccttgtgctaaagtgtcccttgtatctgctcagcactctgcaagataagtgccactgccatcctcacttccaggtggggaaactgaggcactggaaggggaaggaactcccacagctaggtagtggcagcttggcaatggcgcctccccgtgtgcacacaagcctgggaagggccaggcaccaggaccacattccttccaattacagtggccttccaacggtcagggctgggccyggctgctgggcagggcggggctgggaggccctaggccccaagtggtggttaatggcggcaaggagacrtaaacagagctaatgagcccctttcatcgtctccctgctctaatgaaggccttggactctgggctttgcattttgggggttcttgattctggagcctcaaagagtcttagggccaggggtatgtgggcccccccataggggtggggtgtgagcttatggactcccagtgtcccctcccagggcagccaagccagggtgaggaagtggagaggaaagggaacgggaagcattgtggcatccccctaaaaatgacaagccccagaaaaaagggagtgttcccgtggcaacccagagcagttgcttggcaactgctggcccccaaaatacttgcctgcaggaaggctccgggctggggctttccgatgggctttccgatggctcacttccaacccccaccagcgcacacccacccctggcccaaaaagaagactctgaggctgaaagagaaaatgcagagaccagggtccaggaccttcattagagcctggggaggaaggggcctgacctgctgagtttcctcagatacttctcatggccctccaccctgacacaggacccagtagactctgcccctggatccttcctgagggacaccccagtccactcccccctccccatctccccactctgccagccacccggcatcaagccagtcccctagcaacagaggccgcttcctggatacctgagtgagagttgacagtggcagaatgtcagaaaacgcaaggtcagaaagcacagcgatggctcggtgccagccagagtgtgtggggccatggggtaccacgtgtggtaccgtgtgctttgccgccctgcagccgtgggctccctggcctggggctggatggcatgccaggttgtggttgggctgggtacagcccttggaacaggggactgtggttctgggccaactttgataccgactgactatgtgaccttagtgtgtcccttctcgctgrcctcagtttccccattggtggcccatctacccctctgcctgtgtgtttaccgttcagtgcataaacattgccctgtgaattatgtcacctactggggccttggggcaggagagtgaggggaccaggaccaggccgccactgcccttcctcctcacatgtcggcatccacctcggccatcaggcccctggtcctcaggtgaggcaggtggctttggagcaggacacctgggtccaaattccagctcagcgyttattgctgggcatcctagaagcagcacaggtcccctctgagcctccctgtctgccctgaggtccccgcagttgctgtgagggtgtaagaaagccctgcccttgggctcycataggggctgccttagtttgtgggcacccaccctgcacccagacttgggcactgcgggagccgaggtgagaacatggatgaggggtgtccagcctggaaggagcgaggtggagccccagaccctgggagagggtggggcagtagaatggtgggaraaggcaggtggggccacactgcccagtgggttggactttggggatgggaaggctatgagacctggttgcctcagatgttctctctggggatggcagtgagggtaggactgttggtgacaactctgcaggaactcccggtgctctcatggagccaggatgccagtctgaccctggtcatttgctcactgtgtgaccctgggtcatgatttcacccctctgagcctcccttgccccatctgtcaaatgggcaaggggtgtgcccacctccggagttgggtactgggctcgtatgttcacttgggggtcgtcggctgggctcagggtgatcccatggggactctgcccagccacccccagctggagtgccacaggaggaggggcagggcagagggcagcacagacagtggcggggagctgccggcccacagcccaaggtgcgtgcagccccggcccacgttcttgccggatgccacgccaagaaggcgggcggatgaggcgagcccccagcccagcaccaaggaacaggctgcaggaagccagttggtgggagggaagattcaggcacacagccccacccaccctgcgtgggtgctgcactaaggaccttccccaccccctcccccacgttggcctcccctccctgcactgcatggtgggcacataattaactgaattgagctgcccagtccttctgggaaggataaggggggccgggacccactgcctgctggagggcaccccagtccttccctctttctaggttagggtccagaaagggctcccatgggaagggtgcaggacctctctgctggacaccacccgagaggtcaggtgtgcccatctgacctttgtgttccgagggaggaaggcagggaggggtgggcttgtccagtggagagaaagaagaaagcacccttggccaaccagaggccctgagtccaggaacttcccccacctctggcacccgcccctcttgggactttgtcctgatcccagatgtgtgtgtgggggggtgccctttgcctgtaatgtaagttcaaaactgggagggtgggaccgtggggagggtgggaccatggggagggtggcagaaggtatttaagtcctgggggctgccaccacctgacctgaatccattccaaagggattcccgctcccaccccaccccaccccacccctgctgggctatagctgcagcagcacttatctgtcccgatgatcaagtgatcagctgattaatcacctgactagtgctgtcatctgtcacgatgttcaccaggaacagcagccgcagggaagttcgggctgtctagaggtcaaggggagagaagcctgggaggtgggatgggagccctggcttgrcctcaggggacccagacaagtgggttccttaactcctctgtacccccattgcctcctctgtgggcctacggatgtgggggagtatgagatgttcctgaggcccctggcaccgcatgggcaggccctccgcagatggcagccaatgtctgctccgcttygcagaagggagatggccgatggcccaccagctcccgctgcccttggggagccagggtgtgggtggagggcagggacacttgcaggccctaagttgaatccacaggtttttttcaggtaggrgaactacggccccgaggaggcgagtaagttgcccaggccacgcatcccactctcccccgacccccttcttccctgaggccaagttccaggccctgctgcccagttgacaggactggagttcaagggtgaagcagtccacctggccccaggccctgggtggctggggaggtgacagctgggggtagtgggcaggtgggtagtgcccagtgtggaaggtctcagctggcggcaccgcctgcctggtccccctgccccctcgaaatagccgcttgccgttcttcaggactccatgaggtgtttccttcccagcttctggggtcggggagtccctgcatggagccctgcctcctcccctctccgcagccctgaggagattgctgtctggcagatatgcagggagcagggtgtgtatccagggcctctgggcctgcaggggcagcggctgtgtgctgtgggatgcggtggggcacatgtgcattctagcacgtgtgttgggggcaggkgcatctctctgcctttgggtgaccctgtatgtctgcagcatgcatgtgctcagatgtgacaagcttgacagtggctgagggagcacatatatgaaggggtatgtgtggctgcgtgtggggacacatggctggtgcctggggagggacagcacgttgccacagtgagtgtgggagggagtgggggtttgcattttgcctttttaaagcactagacctggacaggtgcggtggctcatgcctgtactcccagcaytttggaagtcgaggcaggtggatcacctgaggtcaggagtttgaggccagcctggcyaacacggtgaaaccccatctctactaaaaatacaaaaattagccgggcgtggtggtgcacacctgtaattccagctactcgggaggctgaggcaggagaattgcttgaacctgggaggcagaggttgcagcgagccgagatcactccagcctgggtgacagaacaaggctctgtctcagataaacaaacaaacaaagcaccaggcccaggccggagccgtgaccatgaggagggctgagtgtcagttttctcatgtgtcactgggttgacagccggacccagctcacagggttgtggtggctgggaactgctcagccactgcctggcacacccagctgcccaccatgatgctggcatggagacctgaacagctcttggagggtccctgggcaggggagggcagctggtaccttgctgtcctttgtcaggcatcccaggtgaggcagayaggagaggcccttgagcctcgccttccaggggagaagccaaggaaggagccaagcccagggattaacgggacagtgggtggcaggagggtgggacacagcagtgtccctcagacccagggccctagagtcccaaggrattgcgcttctctagccctggggaacttcttgcaggcaaaggactgtgagaaagagggcagcgggcaccagccctgccacctcctggcagccagccaaggccctgtgccctctccagaggccagggcagcttaggaggttccctttggaaacagtagccccacttcccaggccctcagccccttcaggcaggcagcaggctggtggcggcaccgggcacacagtgtccctggcacggcaggcagcctcccaaccacaagggcccgtttgtcctggytcccctggcccgagcgcactgggcgaccagggcctgctggacacaggggcctgactgtgggctcagcccccatcccccatcctcaccagccacggctgtgccttggggaggggtctcygcccacagcagagcaacttctacttacctgtgaacagagacccattccccaagaattgttcctgggccaggaatttaggaagggaaaaccccctaggttaaaccagggccaacctgaccacctaccaccgcctccaccgtcccagggcaggctggcttctgggaaactccagggccctgcttctaagaaaaagggctcttgcttcccagaaagcctggctgccttcctcctcgctcttcccccgcctggcttgcctctgcctctcttctcagcctggttcctggggggaaagcactttaatgggagggagccaggtgagcagaggcgccccgcccttccctggccctccggccccctgccctccctcaggctcctctccagcctcatcacctcttccaaggagctctcctggtgatcttcccacaagaacctccgaatattttagagtctggcccrtcgagctcacttgttcatctaggcatttatggagagccagctgtgtgctagatgctgttctaggcatcaggaccctggggaacagagtccctgctctcaagragcttacaaactccccgccatggggggcrtgaaaggaccccgtggtaggtgaattgtgttgttttgttttgagacggagtcttgctctgtcgcccaggctggagtgcagtggcacgatctcagctcactgcaacctttacctcccgggttcaagtggttctcccgcttcagcctcccgagtagctgggactacaggtgcaccaccacacccgtctattttttgtatttttagtagagatggggttttaccgtgttggccaggctggtctcaaactcctgagctcaagtgatccgcccgcctcggcctcccaaagtgctgggattacaggcgtaagccaccacgcccagccttgtttcgttttttgagacgaagtcttgctctgtcgcctaggctggagtatgcagtggtgctatctcagctcactgcaacctccacctcctggatttaagccagtctcctgcctcagcctcctgagtagctgggattacaggcacgcaccaccatgcccagctagtttttttgtttgtttttgagatggagtcttgctctgtcgcccaggctggagtgcagtggcacgatcttggtcactgcaacctctgcctcccaggttcaagcagttctctgcctcagcctcccgagtagctggggttacaggygccgccaccacgcctggctaatttttgtatttttagtagaaacagggtttcaccatgttagccaggctggtcttgaactcctgacctcatgatccacccgcctcggcctcccaaagtgctgggattacaggcgtgagccaccgcacccgagctagtttttttgtatttttagtagatgcagggtttcaccacattgaccaggctggtctcgaactcctgagctcaagtgattcacttgccttggcctcccaaagtgctgggattacaggcgtgagccaccgcgcccggccaaggtgaaatgttttaatgtccctccttccatccatacccgcgctgccccctcagccctcctggcctgtctgcagttgtagcacctgctcctgccccatgggccccatcagccttccctgttctgtttttgccttctggagcattcttattttcaaaaatgcattttacttattatgacctaggccaaaggtgatttttatgtgttgtgtttttccctggtctatcgctggcacttgaatagtgcccggcacctagtaggtgttcagtaaattcgcgtggtctggctgtgtgaatatagttgtgccccgggccctctctgtggtctgcagacagtgcaggctacaaactctgttactgatcctcatctccttcagtagagaaatggacattgtttagaaactctatggcagttgacattgctgcaacatttcacctgcattttacagaagtatcagctggccttgaattcaaaataagaactctggttcttccctgcagaggatgccaccttggggtgccatttttttgacacggagcatgtgccaggccctatcttgagtgcttcycatccagtgtttcatttcagcatgcagtctttttgaggcagagatgttccctgttgatgggctagaaccaaggctcagcaagggaaaggaacctgcctggctcacccagctccacccagccaggaagtgacaggatgagggtttggcccaagactcctgacactgtaggccccagctcccagccactgcttggatccttacagttagacgttgggttcctcctggagctggacctgggggcaggcagggttggggaggggagctgyggtgcccttggcagggctgggtcctgctgggctcaaagccaatgggagcggctggggcagggcctggattcttggatcctcagcttcttggcaacctgcgtgactcagtgggctggtaataggggccggcgggcaggcagccagtgcaggggagccctgcggtgggtgaatcagccagttgctgaattactgtcctgcctggggtggtgccaagccccaactgccaaaataagcacagcccctctttgcctttctctccccactccagggtggcccaccttccacatgccttggcaggtgtgtcctgtggctctgctgctcctgggagtccccgggtctccctagcctggagcaggggaaaggtcctccccactggggtgtgtagccttccacaagtcattctgcggctctgcctccccaccacacacaggrgccctcctgtgaactggaggtcattgagatacttgcaccctgaacttagaagggcaccgtgaggataaaatcacctttgactctttatgaaragtcataaagagtcttcctgctaggagtttgcaggaaggagtgactgggagcgcaaacctgagagtcagacaggattggaagccctgctctgctgtgtggctttggatgagctttgtgccatctctgagcttcatcctcaaactcacctgcaaaacctgcgtcacatatcatgatggtgaaatgatacccgcattggcatggcagtgcrtagtagaaattatcagagggttgttgactctggtttaggcgccaggttggaggcagcagtgatcagcagaaatggaagtcagagtccccagcctaggcctcctacaggggacagaccacccaccccagggacagggtcccagcagcgtcaagtctgtgtgctgcctggaacaaatctacttgtgatccttaatttggaacagagtagaggaaagcaagcagccttgggggccggacttacaccctgccttggcactgacacgctgtgtgacatcaggcaagttgttcgccctctctgggcctcagttttctcagttttacaacagagatgatgactgtggcctcatctttctggcagaggctgtctggaaaagtgctttgtccccattgaggtgtgctaaaggcggcgccagactaggctctagggtacgaaggggtgtcaggagttgatcctgcctsccaggcttctgaacgtggcaagaatttgcctctgggctgcacagtgacaggtgtcagtgatgcccccgtccctgggagtctcctagtcagagccaaagagggaggggatgccaggcataggtgcagcctccaggggcaggatctgtctcctgcacgaccacagcatcactacctagcagagccggctgggcctgaatgtgtgttgagcgacttgacggggcctcaggttcccagaagccagggggaggggagctggagtgtcccccsagctggacaccgagtctggccagcagctccctgagtcaagttagcagcaggaaagaggagcaaaagccaggcctcggcctctgctatctgcttcctggacaggatgtggtgccgagtaaacagcttcgcgaggagtcactgctctggctctgagtcacagctcctagcgacagctgcacagtgtttgtaaacaatgggcctcrcacccagccagsgcctgcccctacctagaaaggtgcctgtgggttgggttttgctagyctgggcttgtgtgtgtggccaggtgcattatcccaggccacccggcgtgctgggcagagcatcgtgggaccactggtaggtcgtgtgtcctgggagaagcctggggtcagggtcgtcgtaagcttcatgcacagtagctggaaatgtttgtgccatgtatggccctcactaggcccagctcctgaaggcagccagagttgcggtggggaggctgcaggtggagctcctccaactggcctcacccccaggccccagcgcctcggctgtccatggcagtcttcgttccaggcagtgacagtgatgtggcgcatcacgtggcggcctggccagcagggaacaaagaccctgctctcccccaggctggcggcagaggcagggccagggaccacgtgggtgggaggaggggtgcatggccctgctgctcccctcctgccagcaccacctcctcgggactcctgcatttctgcgtggcagctggtgctgctcctcctgcagcctgactgtgtcagcagtccctcgatggcctttccagcaagctcagtgcccactgccccgggtagccctgcccaccctggctccgaaaggaggagccccaggattaggccctgaggccaggctgacctgtgctggaggtgggggcaggggagatatgggggtaacaggcttgggaagctgggctggagtgggctattcaagaatagcacagaaagcttgtgtgagagatgcaaggccctgcagagggcctggtacccgggagctgcttgtccaagcaaaggcattagctcacaaacacaccagcagggtggcctggttccctgccacttccctactggtcccccacccccactatgaaagttgagcgcttctggccaggcacggtggctcacgcctgtaatcccagcattttgggaggccaaggcgggcggatctcgacgtcaggagtttgagaccatcctggccaacatgtaaaaccccatctctactaaaaatacaaaaattagctgggcgtggtgccgcatgcctgttatcccagctactcgggaggctgagacaggagactcgcttgaacccgggagtcggaggttgcagtgagccgagatggcgccactgcactccagcctgggtgacagagcgagactccgtctcaaacaaaaaaaaaagaaaaaaagaaagttgagcgcttctttccagggcctctttaarccccccacccaaccaaacatgcgcacactgtaggaaacaccttctcggccactgagcccttctacggggctrggctgcgaggtcacactttgcagacaaggaaaccgaggctcagggaaagccctccccaccccctcaaaccacgtggtaagctccctgttaaacctggagtggcagccgaaccacaccacacaatgcccacagtcacatggccaggcagtcagcaacaccggggtgagaggccgaggctggggacagcctcggatccctgctcggataccaacccctgccgcctgcctcacccagatcctgcctgtctgcacagggcgtctctcccgttaatagtgtgtacccagacagtgacctcttcgctggtcccctctcccgggaccgggcctgccttgcagtacccatctgtgtgtgcttctacatcagcaaacatttccaagctatctgctaggatccagttacaagccacactctgagcactgggcagaccccggactgccatctggaccttgctgccagggayggagtcaggctatggcactcctggcacaggggcagcatccaccaacattgatcaaatgtctgttatgtgcctggcaccggggcaggcatgtaaccctktggcacctgaactcctcaatccccactggaaatgatcattgcacatccgccaagcacggccatgagccgagcccatgctgagttcttgtggaatcctccagcgcccttgtgcccattttataaggagcaaactaaggcccagagatgctaaatcattggcccagggttccagagtccctggggatcagaatttcagtcctgggctgaccaattcacagcctggttggctctactgttcctcgaaggtcaaggttgagtcactgtgcgcaagagaggccagtggtgatgcctgactttcccaggggacagggccttggagcctggcacagaggaggaagtgtgccagatgaaaaagaacagggaatgggtggctggggcagggatggtgttgctgcattaagacaggggtgttggagaaggctgctctgactgggggccgagtcctgagaccaagggggaagaacatggttcccagcagaggacactggcagctggagttagtaggagggggctgtgggcaggtgaggacttgggattctcttctgggtgggacagaaatggtggagggattttagtggaggtgacttgttctggccacagggtgagtacagggaggtaggtttcagggcycccctgaaaccctctagctccatttctctgatgctcccccaccccagcccagcccacccccacatgcccacccacatcccctgagagtctccaccctgagggtggcagagctcccaggccctgaactgtctgctcagctgggtcccctaaggcccacaaagccaccggaagaggatgtgagatgctcagaggagcagggctgggagcgaggtgctgctggggcagtgtctgggcgggaagccgggccccagggcctgatgtgcctgtgggggcactccacagcccctgcccacaccctctcctccccgcctctgctgttctgctccctgccctgtgccctccacttgcagccagggactgggcatccacccggccaggttcccaggaaggtaaggaagtagctgagactcttggcctctgacttcgccctggcatctctgggctttggggttggggctctgagtgttctggcccccaggtcaggatggaaggagcgtctgcaagctttgcagagcagctggacagacacttttcctgtgagatcttgggcaagtccctgctctctctggggctcagtctttccacttgtcagacgggtgtgttggatgcgtcygatggcttccaatgtctggtttgcagcaaaatgagaaaaacagggacaaggtagtaagttgttgtattgttgtggtggtggtggtggttgtttacaactccagtagtcactctagtaaattattctaaaagccaaatgtactcatttcaagcctgcccttctttctgatggcagccctttcttgttacctttggtggtgttttttctgaatggtgggagtagtggtggtaatattattattttttaccaccctacttaatgaaacaaaccattggcatcccccacccctgcgcccagttaaaatgaaatcttgtggccgggtgcggtggctcacacctgtaatcttaccactttgggaggccaaggcaggtggatcacctgaggtcaggagttcgaaccagcctggccaacatggcaaaaccccatctctaataaaaatacaaaaaaattagccaagtggctgagtgtggtggctcaygcctgtaatcccagcactttgggaggctgaggcaggcatatcacgaggtcaggagtttgagaccagcctggccaaygtagtgaagccccatctctactaaaaatacaaaaattagctgggtgtggtggcatgcgcctgtagtcccagctacccaggaggctgaggcaggagaatcgcttgaacccgggaggcagaggtgcagtgagccgagaccatgccactgcactccagcctgggtgacagagtgagacgatgtctcmaaaaaaaattagccgagcatggtggcatgtgcctgtaatcccagatacctgggaggctgaggcaggagaatcacttgaaccgggaggtagaggttatagtgagccgaggtcgcaccactgcactccagcctgggcgacagagcgagattccatctcagggaaaaaaaaaaaaaaaaaagaagaaaggaaatctcgtgcctgggtgccagggatggaagagctcaggtctagggggcagggaagccttccagaacaagtgagtggggtctcctgcctgcctcccagtgcctctggctagactcacatccgcctggtggctctgctgaccgaaccctgttttgatttggttacttgtatctgtcacctttctggctctgtgtggtggtttccaggcccccgacacagggggaatgggagtggggacttggagaattaagggagaaagctaggctagcttggggcagcctctccactcrtcctcggctggcccatggcctggtacaagcgggaattcctggtcctgcctgtcacagcagcaggtatgacagccacgcgggtgacaccaggcccaggcactcgggtgctccactccactagggcacgcargcgacgagcacactggcagagggcctcccgcagggcccactccccacctggctctcgccccaccatggccygggaagcaggccaggtttgtgccaggcctgccgtgcccagggggaggaagggctctgtgttctttgcctgtgtctctgtggtgaccgccaggagaagggccgtcgcccgtcgtgccgctctccaaagcccgacaccttggctggcacctctgccagcaccggccaccaccgaggtgagtttccagggcaaccagtgcctctgccggggaggggctgggtgggtcaccgccgagccccaggcatgggagttgctttcccaggactccctttcttccctgccagaactggttggaggagtttggaactcacaggggagtcttcatctcccatctcgggtatgagagaggagactgggggtctgctctgctgctggtgcccgtgtgcacacgcttggcctccccagctgcccccagccccacgggtcagtccagggtggctgcgggctgtcctggcagctccgtccagagggtgcttcttggattaccaaggacttctgtgcactgcttcactgtctgctcccctgagaagcctgagagctggtgctatgacggttactgtccccattttactgatggagaaattgaggccccaggaggtraaactaaggctaggaagacacagagcaggcactggaacccgaatctgcactccagatcttaaaagagttccccaaacccacaggaaagaatggccccttggggctggctcatcccaaggccccctgtgctgtgacatttccagctggcactttgtggagcatttccaaggagtccgggrccaggatggcggctgaccaccctccaggaggggagatcatggatgccggggcccctcggggtgtgatgtgccccacctatcacagctgtgggatagacgttgctgccttgtgatcagggcccctgggcttggggacaggtactaggctgagactatgggaccctctgggcctttggtcccttcctcagccaggtgtgcccagcaccccccgcagcccctctgcgccctgtctcctcgcttccgtctgcctgctgcctccctctcccgctgtggtcctccggctcacttttgggtcttgggttcagtttccctctatgtcttcctctctcctctgcttccctccacttcggcctgtcacatgttgaattggtggcccctcgggggtggcagtgactcctcacagtgccaggcagcgagcactgcaggagtgggggacagctgtccgagcggcccccgatttgcagcccatggatgcatttatcacgtttgttcctctgcrtgcctccccctcaatatgccgggggtgtacccatttccaagggatgacagcagggccccacagcgagccccaggctgatccggagccctctgcatccccgtccagggccgtttgcactgctcccggcatcggcacaccttgttctggttgtgctgggacggcagcgccccgtgaggtcagagggttgctgtcacatctgccacccagtgtggtctcctggagatttcagtggttcggtgcttcgcttctcacctggccagctctgagttcagcctctcgcctgtggggacccctgcatcctggcggcagaaggaggaggaagaagccaccagaggttgccaggaacccagtggcaggggaggtggggctgagccaggcccgcccgctgtgccgggagttcccacgcgtggtccagctgcgtcacctcctgccaaggtgtgtgctcacccgcccacagagggccaccccaggacctaggcaggctaggaatggtgacgtcagtgttgggaaatgaccaaggagcgtgtccaggcctcacccttttcatgtcctccccaggctctaaatatagatcacaagagacagaaaggggtcagtgacctccacctgcccaacaggaggtgacaggttttccaccagggcctgacctgagtcagggtacctggctgccattcctcccggccttggccaagcccaggttggaaaaggtgatggccaaaggccacagtcacccagwcactgccctgtgcccagttcccgctctgaactgctgtgtgtccggcagcccccagaactgcaccccaggcccaaagcccactgtctggggccctgcgttaaggcaggcctgggtcccgacttgaaggtccacaggggcagcttttatgatctgcctctcaggtaccggccaaggatgtactggccaaggaatgggtggaaggagggacgcaccagccagacagaaggggcggcatgaagaaggagctgcagcagttctgctgagagggaacctggagtggggagctggggccacaccaagccagtggtcttctgcctgagggcagtggggggctttgcgggatcaagaccccactggccgcggtgtctgggtatgggagcagggagaagagggaccacagagattcagcctgaacacaccttttccctaaacgagacagctgctcaggggccrgagagtgacktaagatgcccaaggaatcgctcctcgcctccgtctgcctgctgcctccctctcccgctgtccctcgctgtggtcctcaggctcactcttggttcttgggctcagtttccatctgtgtgtccccctccrtctcttcctcctctgcttccctccacttcgggttgtcacatgttgaattggtggcccctccggggtggcagtgactccccagggtgtcgggcactgggcackgcgggagtgggggacagttgtcagagcrgtccccacacatgccctggctacagggggcagctgcagtcagcttccggcggcacttgggaacacagacccggtgtggtcaggtcacccagagttacaggagaagagggaaatgtgggtttttatgtgaagtcgcctgaccttttactgttggcttaaaattttaaaaacacttcgcaagccaaacaaaacacatgtgtgggygggatctggctgccagctgtcagttcacagcctgccttttaaagttcctctgcgagcagcgtcccgacttccgaaaggtctgtgcagccgtgctctccaggggcttgtggttgtagcccccaaggaaaggcaggtgcacgtcccggggggaggytgggaacctgggaaggctaggtgggggtgtgggggggcgtgagctggggcaggagggaggaagggatcaatgccgattcataagaaccccccacttccgggcagtgcttagtgatctcgagagtccttagttcctcccagcagaggctccaacygccaagcacagggttgtcattggccttgagtgtcaaacccacccaagttcacctggactgcccccagccatctctgatagccccatgtgggcatccggactcgggttctagctgcccacggcctcagtccccacagcagagcccccaaccccttttgtagtgaagatgccatcagtgacccctgtgcccacagagagtaatacaggaaacggtgagcctggcaggagtcactgcccggggtcagaagtttgtagccctctctggaggactgctgggagcctcagaggcatcagagggtgagtctcaagctgtgtcctttttcttctttttttgagacggagtcttgctttgtcgcccaggctggagtgcggtggtgcaatctcggctcactgcaacctccacctcccaggttcaagcgattctcctgcctcagcctcccaagtagctgggattacaggcacgcgtcaccatgccaggctaatttttttgtatttttagtagagaygaggttttaccacgttggccaggctggtcttgaactcctgacctcaagtgatccacccagctcaacctcccaaagtgctggaattacaggcgtgagccactgcgtctggccatttttcttcttataacttttattatggataattccaaatagacacaaaaatagagaaaatggcataaagacccccagctttcacgaccatcggtgcagggccactcttgttcacctctcactgccccactccctgcccgcccctggagatgtttacatgaatcccaggcatgtgatgccatccacagatagcccaagatgtaactctactagtgacggcaacaccattctcacacctaaaaagatgtctaatgtcatccaatatgtagcagtgttcagacaatccacatgtcttatagttgttttttttaaacagttgtcttgctgacatcatgatccaaaatccacacattgcatttgttagacgtctctgacccttcttttagtctagttycccctttctttttcctctgaaatgtatttgttgaagaaactgggttgtttgtcccatagaggttcccacagcctggatttgtggattgcacccttgtggtgtgttgaacatgtttctctgtcccctgtaatcccacaaatggcagttatatgcagaggcctgccttgatttaggtttgggttttgaggagaacactgtgagtggtgctgcgttcctccactggtgacacacgctgtcccaggatggccttgcccttggttagggtgtccccacagcttacaggaggcctcaggagagggtcttgcatgcaggaggcgtcccatgaatgccaaccccagttgctaacagtgtgaggcagagtcaggcccgcccgatctgagggcattgggcaacacatcctgtgcagggaactttatctgtgccttcattaggggggcatgtgtatctgtgtttctgtctctatgtgtgtgtatctgtgtctatgtctctatatctgtgtgtgtgtgtctgtgtctatctcaaacttgttttttccctttttgtggagaatggggtcttgctatgttgcccaggctggtctccaatttctgggctcaagaaatcctgcctctgcctccctaagctctgggttacaggcatgagccaccacacccagcctctgtgtctgtctctatgtctctgagtaggtatgtctctgtctgtgtgtctctatctctgcgtgtgtgtctctgttccaatgtctctgtgtgtgtgtctccgtctctaaatgtgtgtgcctgtgtctgtctctgtgcgtctgtgtctctgtgtctgtctctatgtgtgtgtgtgtgtgcctgtgtctctgtctctatgtgtctctgtgggtctgtgtgtgtgtctgtgtctctgtctctatgtatgtgtctctgtgtgtgtgtgtctgtgtctctgtctctatgtgtgtgtctgtgtgtgcatctctgtgtatctttgtgtctgtgtgtgtgtgtgtctgtgtctctgtctctctgtgtgtctctgtgtgtgcatctctgtgtatctttgtgtctctgtgtgtgtgtgtgtgtctgtgtctctgtctctatgtgtgtgtctctgtgtgtgcatctctgtgtatctttgtgtctctgtgtgtgtgtgtgtgtctgtgtctctgtctctatgtgtgtgtctctgtgtgcatctctgtgtatctttgtgtgtctgtgtgtgtgtgtgtgtgtctgtgtctctgtctctctgtgtgtgtctctgtgtgtgcatctctgtgtatctttgtgtctctgtgtgtgtgtgtgtctgtgtctctgtctctatgtgtgtgtctctgtgtgtgcatctctgtgtatctttgtgtctgtctgtgtgtgtgtgtctcatgtacagccagagcagtgatcaggcttcccagaagttgggaggtgagtcccaaaggtaggggaacaaggcaggaagaggaactttgtaaaaacagacaccggccagagggactggctaagtaacgccctcccccgccctggctcctgtagatgatatagtcagatgggagggagccaggccagccgcgttggggggtttagtgtgatgaattctttactcttcaccactccagcctccttggggccacccctcgccccagcacccaggaccttcaaggccagaatagtggtgattcctctatgtcctcatgagtcacttgtccttctgggctataaaacgggtgggcgcttgttcccaggcccatcactcagcgaaggagataaagagagcagaggagataaagtcagtggcaggcagcttctggactttcagtttcyggaggcattgggagcttggccccagaagaaagggatgggaggaggagcttagggccgagggcagtgtctcggtcacctctttgtggccctgtggggacctcctgcctcgaaatacgcctcacccacattaccctccctggccaaacggcttggaggcttcctaaacagcctctagggatctccatcccaaatcaaatctacccatcttgcttcttaaaaaaaaaacaaaaacaggctgggcgtagtgctcctgcctgtaatcccagctctttgggaggccgaggcgagcggttcacttgaggtcaggagttcaagatcagcctggccaacatggtgaaaccctgtctctacgaaaaatacagaactagctgggcatggtggcaggtgcctataatcccagctcctcgagaggctgaggcaggaaaatcacttgaccccaagaggcggaggccttagtgagccgagatcacaccactgcactccagcctgggtgacagtgagactgtctcaaaaacagcatttatcacatagagctgattattaaaatactgattttagaaattagaaattcagagaagtaaaatgaaaaccagtagagcttccacccagctgcaacttaccaccataatttttgtgaagtaggcccttctagtcgtgtgcacatgggggtcttgttctgaacggatgaactgccgcctcactccagtcacagtggaagtgtttcrtgggtgtctgaggattggcacttgggaagggggcaagatgtgctcgtggaatgtgctgtctggtcccgccctctcagtttacagatggagaaactgaggcccaatrgtacggaccagacctggggaggttggcatggccagggctgctggcagcaattgctggcctccatgaagactgaaggctgaggccagggcaggcccagtgatgrgtgaggcatgaggaagggtcccattcatycatccattctcctggccctgctgttaagccccaggctgtcttccttcctcactggcttccagaaagagtagttgaggatgtccctgtccctgcttccccttcagccccagcagccccacttccaccctgagaccagggatgtccaagccacaagcagccccagctgacaggccacgcagccatgtgctctgcccagcgttgtcactcttgatgccttcctccttgtcagatgcctctcagccccaaccttggtgccttccgctctcccccacctccctggcttcccctcctctgagggtgtctgtaaggggatagtgtggggctttgccccaaaaatggtagggccccactctctgaccctttcccccactgcacacacagccccacactcaggatttccarttgcactgacagggtcactgaacacatggtcagcctctccaaactccgcctgagcctgtagtcaggtgcaggtgctcagtgctgagtgcttcatgtccattacgtaatgtcatcctccccgcaactgtttgaggaagtcattttcactacccagattttccagatgaagaaacagtgaggctcagaggggttaagcaacttgtggaaggccacagagttggggagaggctttgctggaattcggggtagctgactccagggcggcttccccacacatgatcagcacgtacacatttcagccctacgcaacacacgcactgcagcagcgtgacacgcaaacggtgcctaaccggggtacccaaggccccacgacacacgtgacagccggtcctccgggagacccagccaacgcgcacccctcgacctccccggccccgccctctttgttcagaccccgcccctccaggctcccggtcccgccccgggtctgacctcggcgagggcggggccgcgggcgcgcgcacgcacgcgtccctcggactctccggttccgcccctccccggccccaccctcttcccctccggccccgccccccagcctgacatcagcagggccgggccgcgggctcacagcggtggcaaagcccagcmgcgcgggccgcgccgccgcccccgccgcgcgccgggccggccccgcgcccgcgctgcgagccttccatggtgcagcgcatgtgggccgaggcggccgggcctgctggcggcgccgagccgctgtttccgggctcccggcggagccgcagcgtgtgggacgccgtgcgcctggaggtgggcgtccccgacagctgcccggtggtgctgcacagcttcacgcagctagaccccgacctgccgcgcccggaggtgggtgagctggggcggtcgggcggggggtgcgtcggagcctccccacccgcggcagagctgggcaggtcggggcgagccccggacggggccgggcgatcccagcgggccgcctccctcctctctcctccataggtgggggtcggggccttctgcagaaatcagccagcagggtgggcagtgggggctgccgccgcgccccgtccaacagtagggaccacggctggggttttgcgcccctcaataccgttccagggcctgctgtcaccaaggccgctgcagcccaggtggacctttttctgcggcactgtccctgtttacatcggtggcctgtgccttatttcactcagttcccacccagggcccgcagcgcgtcgttagcctttacgatgcaggtgtggaacaagtggtcgggaaggccaaatcctagaatcctcagaggtgatgagaccataggggccttccagacagaccctacttggggcagatgtggatctggtgaccagggacatcggggctgctcagagcggggtggggggggggtcgggggatggggtggagcagcaggcctccaacacgtgggaccagatgtcctggtggtgaggggaggagggtggcccaggcccagggcgggcaagacttgtttctgcttaactggaaagagtgccaacaccctgaatcggtaaggactgggtaggattcagagaagggagtggtgtacctgtgatggatggaggggagggtgactaggtgagggcgggggcttgtttctcgtgtgccctgggtctctgggtggtgccatctgcctcccacctgactgctgctgactacacagcagagggagtggaatccagagatgcccccctcgccctgctctgcctgggcacagggcctgcacagaggccattcctggatcgggggctcagggcccatcagagctttggctgggctgcagccttcacagtgaacctcctgagtccccgtgcggcatcgtgttgccttgctgcgtctccagtcgcttcatggctttagactgtggcgcgttgtgattgctggcgattgttagcctgagtctcgtgcctcttggtgtcccggtacctagacagggcctggatgcgacttgtttctccgcccagtgttgggcagagctcttggtgggggaacaccacacgcctgagagaccctttcctcctgagcttggcagatggccggaccagacgtgttccctcaaccctcatctatccagggctctggtcctcattggcggctggagagggacccctgggagggtgggggtgggaggctgacaccagcccagcgctcatctggctttcattacctctggcagcagctcgggctttgtgtgctgggagggtccggcggagcgctcacagtggcygtgcaggttccctctctccgtccctgaggaactgagggagaggcagagctgagccccacccctgcctgggggtcttgtcttccctctctctggccctggcgctccttgcccagcctcagcactgagatccagacctcgactgctatttagaaatcaaaggggaagcttctggctgggtcaggaaaaccaggatcctggcaggagaggaggccactgccggaaactgaacacaatgaccatttaccaagggcccaagggagggggcggggaagtccctgtccctcctgccaacaccccccgtcctggggctggtttcctggtgtctatgtggcctgccagagctgacgctgcgcacttggtccctgtcctctctggaaaccaccagacagtttctgccttcccccgcatccctgtttccctacctagcttccacccggtgcttccctctgggctgccagatctcctcacatctgggcttccgcttatcttcccgattctaagccaagccaccaatgacccagcttggcctgcacagttcttgctttctggaggtgacctggtccgtgcccccatctctggacaggctgttgctttggccagacaaaaagtgcaggttgtgggccaccccctcacttcatctgccttagaccaaccctacagagtaggtgccaacaccaccttctaggaagctagggggtcagagaagggaagtctctgacctaaacacccgtgcagccagcaagggccgcagccaggatttaagcatgggctgtgttctctgtggcacctactgtgtgcaggagccaccaggagtcagaggaagcccaggcagcccagaagccctgaggtcaggtgagcagtagggaagcttatggctcagaggaaggcaaaagtgctttgggccacaggacgctggggagagctacctggaggaagcaagcccagaactggaccccacaggtttaagataacagctaataagagccagcaggttttggggaggtccttggctaagtaatttgcatcatctccttttggggtcaagactgttaagagctcacttgacagataaagtcactgaggcaacagaggtgaattagattgcacagagtgaccaagctggtcagtggcagggccaggattctgacccaaggcctgagggcagttgcaggtgggctggagtgaagagggcttctctgtattcacagggagcatctcccttcagcctcccgcgtcttcccactgtttgatctcttgatcacactgtgtgcaggtcttcggtttaatccccagggctcatgagcactttgacactgaagaccccaaggcaaagggcctgtccctgtgtgggtgtgtgtccctgcatgcatgtgtacagactgtggtcttccaggagagcttcctgggtgactctgaaggggcagcccccaggaccctcaggttcccctcttgctctactcgggagggtcccccagaagagggggaccaggctggctggtcctgggtctttgttccttctccaggcgggggatgctcaggcatgctggcctgtttcccgggaggctcaggaatggccctgggagatatcaagctgctcgttgccagagctggggtctgattcttaacctggaaattgggcatttccaggacctgtctgcgttgccaatgagaaaagagtggggagatttatcactggccctctgcaggcaggctctgaacgagccagtggagcggtttcaggaagctgcacccaggcagtcaaggactggttcccaagagctgctggttggccgcccagatggctcccatggcgtggtgccaccatgctgtggccacccagtcccagggttggacttccagccttgcaggcccagaatcactgtgttcccagatatacagcaacagcagagcagtgytccccatttgattgttaaggggcagacactgatgcmtgcagcctcatgcaggacaagctgagctttgagcagacccaattctcccagttccgcacaccttggctgcccacgggcgggggaggcagtgggatggcagcccaacagtggcttggcgggcggggcaggacacctgcgttggagggttttggcgttttcctccatggggaagcttgcatgctttggcagcctcccctgtagtcattcctggagacttttgtccatctcaaccgaggggcagggagcctgggctctggagagaagagagctatgctgggatgccagctcagccccctagcagatgtagacgtgctcctgagcctcagtttcctcatctgtaaaatggacatgatgccagctctcctgttagggttctggtgaggaccctcgagttagacaagagacctgaggagcagcctgcacagcacttggcacagtggacaggtagcagctgccacaatgaggttttctgattaggtgccaggggagcggcctgacccttccaagtgccctgggctcctcgggtgcgtcacctggcaccttcagcatggcacttccctggcctggtgtcttgtaggccttttgcccagggcacgtccacaaacctctcggagatgcaggtgctagaaagctggccctgccaccctcccctgcgaatttgctgtgtgacctgaggaaatccttcctgtctctggcccctcctccacatctgtgccacaaggggctggactctgctccaagcctgagaccatggcagaggcagcgccaggcctgggtgggtcccaacaggccagggttcaaatccctgttctggctgccacgtcctggctcctgacctgggcgagttcctctcaggctgtttccttgtccatcaggcagggcgttaggaggattaaacgtgatgggtgtccaaagggccttgcacccaggaagtgcccgcatgtgctgggcactgtagctggttaaagttggggctgccctgcacccccttgggaccagcccaccttcctcctcagctgccaccagccacgcccctcccgggcctggccctgtgttcacctgactgtcaggggctgggcgtggacagggaccctggatgcccaaggcttgcggctgacctggaggtctggttctccctcctcctgcttgaggcacgattttcccatcagtgagtagcagggcacaggccggcagggagggtttctggagagatgggccggcctttgcggggctcagcactggttggttcccagcctccactttctgaggccagggagcatcctggtgggcaggcaccgcgtgtcgtcccggtctgaggccgcctctgtgggctgccatgcccaggatcaggagtgtggcccacccacaccccgggctggcctcctgtcatcttgatgctttgtctgtgcgctggggatcagggttgggtccacccacctggagctggagggcaggcccgagggcaggagggtcacggacacgaggcccttgcgttccacctcccttgatggggctcatggtccgagctcatgacttgagaagtcctgggctctcacctctggctcagccagcacacgccccaccggctcctgtcctcgggcatgggtccccacctctgtaggacggagaagggcacagcagcgtgggccccgcactgtcgcaggagcctgggctctgtagagagcgagcagccttctgtgatgcgttttacgtttggcttctgtattggagcggaaagctgaagtcagaaagctgctcccacccactgggtttcagggtgactcagcctctctttacagtgtccctcggctaggtccctgagccttaggcaggcctcagacaagtttccctcaggtttttacagcccagcatccgtcgccggccccagggggatatgatgtcaggtgttgtccggtaccacgccatcaggtcccagtgccggtcaccgagctgtgtgcattctctcttgacccccactgttgcctgtgrcaggtagtgctgccctccccagatgacacaccaaggccgagggccaggggctgggcagagccagcgagagacagggagctgctgtctggtgggccagaactgtgaggtgctggcaggggggtggcaagcaccccggggtgacctctggtgactgggacctgagcagcagctcagaggggcttgggaggtcccccaggacaatctcacgcacacggaggctctgccgtgagcctttccacacacaggcccggggaggaccaggggcggagcaggccgaggtgcaggctagagccctctcctcactccgcttcagccctcagccaggtctccttgggaggggccggtgagttcctggagccatccatggggcagggggccactagctacggtttccaaggaaaggcgtctgagtccggagctgcaccagaaggctgatgctgggaggaggtgccgttggcctgagcggggagatggcagggctggggcaggccccgtagggttcctcaagaccctcactattctacccagagggagtctgggtttggcctgtggcttcctccttctgtcagccagggacacggcatcctgctggcctgtcactctgagaaggctgatcaggtgacacactcaccagacaccaccaggccctgtttcccatcctcatcttcagggctctgggctgtgtccctggagacattggggtgtgggggcccctgctcaccggggaccccatgccaccctcactgcactgacccaaatgttagaaggccagacagtgtgtttacaggcacagctgccgactgggtcccagagcccagggacatcagcatgcctgctaggggtgggacaggagtgtcccttgaggacacagccaagcacgtggtgttcttttctcctcctagcagtcagctcatagcggctgcctgggcacctgccctcaggggaaagcgttttctctgcatcagctgttcactaggccgttcctgctcctcccgctctgagctcccagcccggccagagtgccctggggcccaggcgctgcccagatgggctgtctgctaacagagtgacctagggtggcctgtgggtgctggaaccctgcctttcttgctgcagagggttctggggcagctgccagggctgttggctgctttctttctctgtcctgtgagggggcaagggatagaggccttactctgccactttgttcccagaccccagggcagctctctctggagcctgcacctccaccatctgagcagatggtttaaacagcccctgtactccacgtagctctatggtctggttccatgcctgctgctgctgtgacgggaagcgaccagagaagacaggccagctccacgcgggctagagcgtctccccgactgtgtgacagggtggcaactcccttaccccaagcatgcatggctctcagtgttgggcctgcatccttccccaccacccggctggcagaagagggccccccgggggtgggggaagggtgcagggatcacatgacaccaagcagggctgggccagctgctggcctgccagctcacggaggagccgctctctagacctgctcagggacagccgaggccacctggcttcagcccctcctggggattggcctgcctggggacacctctgtccagcaggcactgatggtgctcagccaggacctgggtgctgtgctgggctcccccagggttaatgtttagtcccctgtggcgggcttgtcctgcacgagatctcagagccactgccggtgacttggacactcaggatactgtctgcctcccagctggtccagatgtggctaaaatccctgggagagagagagactcccagctgagccaacggccttcacaggaggcagtctgggacccctgaggaggcccgggtggttgggggccctggtcgctgtaacctctaatgcttttcttttcaaaggaacaactttctaggcaggggagagatgtgtgagtcaggaaaaggggggtgagcgtatgtctcttttcctgtcagtggaagggccagacctcccctggcggggctgtttgtggggtgtgggtgtgagtgtgcctgtgggttccctgctaacttccaagaaatggggctggctctctgtccagaggcggtggcggtcaggagcccggcacaatgcccgcagctttcctgttgtacaaagcccagcgtgggaggcgacctcaggtcggaggaagtggacttccaggatggctcctgggcctctgagggtgcgcaggaggcaggaggccagggtcccgtccacagcatgctggacagtctacctggctcctgctggggttgagggaagggcctgagtcagcactgtctgccaggccttctctgagctccacgcctacctgggctggggcactgactgggcggttaatgaccctgggccaggccagtacctcttagctccttcctaacctctgaggttgatgtccttaaccccccggctcctctacccgctgcaagctcattccgtccctggacagagcaggtggcatagggggctgtgaggccgggggtaattgtggctaagtgacctaggccagcctgccaggtgggggaagtctgtctcctaagacaacggcctttccttactgcctggggccagatgcccccttcctgttccagtctaggcctgtggtttagggctctgtggaaccccagcatctgcctggataccagcaccgtcacctctcacacccgtcccctcacgtgatgatggtcagggaactgggaactcccattgcccaagcaggcacgagggcatgaatgagcagaggggaaggaagtggctgggatgtggctgtctggggtgccccacacctgcccagacctgggctgccaacgcaccagggctgggcccagaggagctgtgcgttcctgctaggtcagccagggccccccaggctgggtagaggaggggtgagtgtgaggatgcccatgggcctctggccctggggaggtagggggaccttctcttggggcatagccgcctggatgcagtcagccgtgtcagagccctggggtccctgcctcaccacttacccgaggcagcatgaccttggaccagttgttcctctctcagcctccatttacccatctgtgcaatggctgaataacagtcccctgtgtggaaggggatggcttgagggtgggtctgtcctgggcaggagcagaagccagttactaggggattggaagcctggtggactcatcataatcacgtcccaggtcgtggctrgccgggttggggaagtggagtgccrggacagtggcyctcgagctgtgatctcattccaccccaggctgtaggtctgtgcagccgccagtctgtgccctatctgggaaacaggttacacaggtgcatcccctgcacggtggccaggcaggcccttgacgtccccgcgcccggctgccgggcgttgtcttcacagagctccacgcaggagatcggtgaggagctgatcaacggagtcatctactccatctccctgcgcaaggtkcagctgcaccacggaggcaacaaggggcagcgctggctcggggtgagtgygctcggggtctccactgggagacgcagctggggatccctcccaggactttttcacttgagggcccccagttctgatcccaaaggaaacggccttcactcccttcccgacccccactgtccagcccaggcttaatcgggttttcatgtttgacctcccttccccgggtgtgcagccatcagcctcaccatcctccatgccttctcccagatgtgcacaccatctggagtagtggggctgtcttcacccaaggacaaaagggcttcaggctgttaggtctctgcaagttgccatctcccagaacacatccctggggttcctccaggttgagagccggggcctgactcagctgcataatattccagaagggaggctggagccactgccccagttcagctcctcatgrctgtggggccactgtgagtcctctgaggacacttcaacagtgctgcaggagccaggcgcagtggctcatgcctgtaatcccagcattttgggaggccaaggcaggaggattgcctaaggtcaggagtttgagaccagcctggccmacatggtgaaaccccatctctactaaaaatacaaaaattagccaagyatggtggtgtgtgcctgtaatcccaactacttgggaggctgagacatgagaattgcttcagcccaggasgctgaggttgcagtgagccgagatcacaccactgcactctagcctgggtgactgtctcaaaacaaaacaaaacagtgccacggggaagatgctgtgcgtcctaacgggccagtccctcccagcccctggataagcctctgtttcctcatctctagaatggggatattttgttagagctctcagatgacgctcttcccacagggcagctaccattactcagctaacaacggacctgaaggtgtcagtatttaaatcattcccgcacctcaaattctactttaaaaattttttcactcttttagagacagggtctcactctgtcacccaggctgccatgcagaggtatgatcatagctcacagcagccttgacctcctgggctcaagcgatcttctcacctcagttccccaggtagctgggaccaccacacctggctaattttgtattttttgtagagatggggttttgccatgttgcccaggctggtctcaaactcctgggctcaagcaatttgcccacctcagcctcccaaaatgctgggatgacaggcgtaagctactatgcctggccctggctaatttttaagttttgtaaacaatttttttgtagagctgggggatttcactttgttgcccaggctggtctcaaactcttggcttcaagtgatgctcccaccttggcctcccaaagtgccgggatgactgatgtgagccaccacacctggcctgaaattctacttttaaagctgataacctttttctgctagagatactcagtcctgcctcttgccacaagctgctgagggctcggggttccatctgagctccaggagattcgtgtgctgccactgactgtctgtccctcctctgtcccaccccagtatgagaatgagtcggccctgaacctttatgagacttgcaaggtgcggaccgtgaaggctggcacgctggagaagctggtrgagcacctggtgccagccttccagggcagcgacctctcctacgtcaccatcttcctgtgtacctatagagccttcaccaccacccaacaggtcctggacctgctgttcaaaaggtgagcatgagccctccactgcacagggtgcacaggggccctcgcccccacccccacctggctgcgggtcttggcaatgctgattcacctctctgagcctcgctttgctcatatgaaagagaaactggagtgctaagaggacctcatggggttktcaccakgcctgggcgggatgaggcgtggaaagtgctccctcaacgcctggccctgtagggaatgggctgcggggctgtggtgctcgtttttatgattttcctgtcccccatggggaagctctctgccccaagcctctcttgtatgtggccttgggcgaagcagttttcccacttgtcaaggagattccggattctatctgggggctgttggagggacccaaggggcgctcagatagctgggaaggagctggttgggacttattcattgaacaaatatatatgaagcacctactgtgtgctggcccttttctaggcatttaatataatttgatgaaaaaaagcaaaaaaaaaaatccctgccytcctgggcctccgtyctagtcggagagtcagacagtaacactagacgtcataagcaggtacggtagatgtgacgccctcacggcctcctctagatacggctgcatcctcccctattccgacgaggatggtggaccccaggaccaacttaaaaagtgagtgagctttgagccaagaggaagggaccctgtccccaccgaacagtgggagagtacatggggctggggccggagccggggctggctgggcagaaccctggctcccacacctcttgtggttcctgctagagggctggggtctgggggcttcgcctgcaggaagaaagacgaccgagagctgtggaggggtcctggggtggctggggctcggggcagcccccggcgggaactcatcccaccatagcctcatcccagctggccttggctcagtgggccctgatctaggggcccctggcaagaggtggggtgagcctctgctctcacattgcctcacccctcaatagtgagtgctcagygggcaggctgcaccccaccctctgggagaacaggattagtgggaagatgagacccacacacagctctgagagagtaaggcagctcaccagcactgagctacaagttgaggagccgccagggacctgcagatgcccggcaggaggaccgatccctcatggagtttacattccagcgaggagggggtgctgggagacatgcagagctgtgggcggggcttccttggaggaggggagaggtgttcgccactgaccaggggcctccttggttcttttagctggacagccaagggggcttgggccggggcaggtggccttcagatggacaggggccggctcaggagcccagcctggctcaggggagcccaggcctctgactctgctgccacccacctgtccccagtgccatctcctccatcctgggcacctggctggaccagtactcggaggatttctgtcaacctccggactttccctgcctcaagcagctggtggcctacgtgcagctcaacatgccaggctcagacctggagcgccgtgcccaccttctcctggcccagctggagcactcrgaacccattgaggcagagcctgagggtgaggaggactggggtgggtgccagagggtgaatgaggaggggtcggtgctgggccacacgaagaggaggctccagggtctggtgctgggtcaggggcccagrtkagcctcagaccacacaggcagggaccacaggcaggagagtggcctggtacaygttttgtgggttcggggagagaggcttctctggaagccggggctgttctgtgtctttggaaaggcacaggaaaggctggcatgttgttgaacttttctcctcttgcagctctgtcaccagtgccagctctaaaaccaactccagagctcgagctagctctaacaccagctcgagcacccagcccagtgccggctccagccccggagccagagccagctccaacaccagctccaggttcagagctagaagtagctccagcaccagctccggagctccagcaggctccagagccagctgtgggactagaatcggctccagcgccagctctggaactagagccagctccagaacaggatccagctccctcacaaactctagagctggagccagctccagcrccagttccatcattacagccttcctggccttcacctgtggttgcagagaaygggctgagtgaggagaagcctcacctcttggtgttccctccagatctggtggcagagcagtttacactgatggatgcggtgagcagctcagcttggcagggcaggggtgggcctgccttctggcagcatctgctgtcccagacctaccatttgctgatccagagctgaygttctggtcaaatcccagctctgctgctacacaccaagtaaccaggtcgttccttaaccccaagtcctcagtttacctctggacagtagagatgaggtcacccctatcctccagagtgactgygcagattctagatggaacagacaggaagctcagcaggcctggcctgtgggagcggagggtgctcaccaaggtgcatccatgggtcacccccatctgttcaggaggctcaccagcctcagcactcattaggcacttggtgtgtcctggagcctatggcagacactggacaaagcccttagttgtagcgcccacagcagatgtgcgtctggatggggagcagactgaggcrgggggayggggggtgggcaggcgtgagccgcctgttggagctggggcttggtgaggctgcgcgaggcggtgctcctcttcttcccaccagcgttctgtcccgggtcrcttgtgtgctgggcaccctgcatggacacgggataaaacccagagatccccacaaggctcaagctgcatcctcagcttccccagcaccagcccagactgctggggcaggaccaggtgacatttagcctcctccccaggaactgttcaagaaggtggtgccctaccactgcctgggctccatctggtcccagcgggacaagaagggcaaggagcacctggcgcccaccatccgcgccactgtcacccagttcaacagtgtggccaactgtgtcatcaccacctgcctcgggaaccgaagcacgaaagccccagacagggccagggtggtggagcactggatcgaggtggccagggtatgccagaggaggggcctgggcccccactttggcttcatctgttctcaggttgtggtctgcagtccaaggccctgtacrggccccagtctacccttcccaggggcatgctggccttgactctcccagcccactgcctggatgctcacgtcttccttacactctttccttgggttgagctaaaatcctcctgtcacccccgggtcgcaggcgtgccctctggggactccctgggtgtctgtctcattaggaggggaggcttggycaagggggactgaggccaggcaagctgggagctccagccccacctcatgcctcctgctcttcccgccccaggagtgccggatcctcaagaacttctcgtcactgtatgccatcctctckgccctgcagagcaactccatccaccgtctgaagaagaygtgggaagacgtttccaggtgggcatgcctctgtaggagctcctggtgcaccagggacctcccacagggctggcatcacccccttagtgagcccatgggaggccacaaaccctgagggcagggacccttcactgacctgagttggcagcagctctgcctcagagctcggcttcctaagctgtcagatggtgggttgagccacatcagagattttcaggtattcgtgttgtagccacagaaccctcatccaattgaaatcaaaacctttgtgccaggcgcaatggctaacgcctgtaatcccagctacttgggaggctgaggcaggagaatttcttggacccaggaggtagaggttgcaatgagtcgacatctggccactgcactccagcctgggtgactgaaactgtctccaaaaaaagaaaaaaacccctttggaaatagctgctcagtggaaacgggaatggggtcctgttgcaccaacatgaaggccccctccccagacctgcagagcgttagtgctctggggtaccctgtgtgctgcgttcaggcagtctggggtctttcagctctaaaataaaacggatttgcactcacacccctccctaccattcccagctttctctttccttctttgcccttctgacagggacagtttccggatctttcagaagctgtcagagatcttctcagatgagaacaactactcattgagccgggagctgctcatcaaggtggagtggcggcaggctggggcgggggctggggcgggggctggggcggggctggggctggggcgggggctggggcgggggctggggcggcgggcggtggcattcgcttcttgctgggaaagttcctttcccgtgtgcgtgaagggggaagagggatctgtttggcccctgggtgtttgagggacagggccccagttaattggacacagtaagggtagcagtggaggttccaggaggagtagatgggcatcaggaccagcaggcctctggcttcctcgccggtccctcctgctgggtgggaaggggatgcggctcctgcccccacaccggcccagtctgtccccgggaggccaggctcctgacgctacctctgtctgctctacacacccaaggagagggcagcctgcctaccccagggacaggagctgcaggggatgccaggggccaggtggccagacctgggaggcagatttggaggccccatgtggcttccctaccctgccccgagaagagacactgaccagagaaccctgtagaattcttcccatggcaccccattagctgtggcggataccccagatgactgaggagaactttcagtgactaatggattcacgaggcctcagagggagtcaagtgtcactgcctggtgcccctggcatacccggtcagtgaaatggcatctagggcccccctcctgcgtggacacacacagagttccctacaggggagcatcgcagggggctcctgggacacctgtccctctccctccrtggcacagctccactgggggccctggcatgcacgagaagcccagaggacggtaccctgatcagtgaccaaacgggtaaaggcagatggggcagagcctctggctaggacagaagagcctgttctgagtccctggggggcccagggcaagtcactgcccatctcagggccatagtttcctcatctagaaaatggaggaatgccagccctggggtgctgaccttatggaaggttcaagggagaaaggagtgtgcagccataacaggactgtagcgcagagtctctgaggccctgcgaggcaggtggagtttttttatttgtttagagaaggagtctcgctctgtctcccaggctggagtgcaatggcgtgatctcggctcactgcaatccccacctcctgggttcaagggattctcctgcctcagcttcccaagtagctgggattataggtgtgcaccaccaacccaggtaatttttgtattttttagtagagatggggtttcactgtgttggccaggctggtcttaaactcctgacctcaagtgatccacctgccttggccttccaaartgctgggattacaggcgtgagccaccgcaccatgcagcaggcggagttctcatccgcactttccagagggggaggcaggctcaggaaggccaggccaccggcccaggaccccacactagtgagtattgatacagggtcagccctggaacccgaccacactggcagcaccccaggtcagggtgcctgagggctgaggggatasggccttgctgaccctgtcctctaccctggcaggagggcacctccaagtttgccaccctggagatgaaccccaagagagcccagaaacggccgaaggagacggtgagagtgcccaaggccgcggaggggcagggggctggcctgggggtagggaggagggccctttcctctctagccacggtgcctatgggccccattagaggtagcctcctctggaccctagcagagccacacctggatcagctggtatctgggaagaccagctgcagccacgaaaggacaggcctggcagagccggctcaggcgggtgtggggctggggagggccaggggccacacgacttgggaacctggcatttcccagatgccagccagggagatggctagagggagtctggggtccagggagacagtgggccccaggaggcccccagaggtcccccagctgttccaagtgagaccagttggggctgggggctgagaaagccttcaggggaggggccttgctcatcytcctaccccaatgtcacagggcatcatccagggcaccgttccctacctgggcacgttcctcaccgacctggtgatgctggacactgccatgaaggactatctgtatgtgagtgtgccgggcggggctggagtagggcccgggaggagagaccttccctgagccctgggggctgggctgccacacctgtcccagcaatgagtaaacagctcagtgccctgctggtgacaccccagggctgcccaaacacagagctgcagcagggtttggctgagtgggacacagcccatccctcaggcagtgaccctgagcacagagggaagccaggccctcagcggtcaggcggcacgtggtggctgagcagggccttctcacccaaggcctcagtccattgtcctccgagagtgctggacaagaagtccccaagcctctgcccgcatgtccccttgccctggtgcccagcaccggcttcaatccaggggtgtgcgtgccctgccccctggtgggcactcttgatagtgcagcatgaggtggggagactgtaatggtcaaggggtcactttctgacggccattgggtgtccaccttccagggcagactcatcaactttgagaagaggaggaaggtaagcagctgcaggcagccctgacttggggaggggtggaaaacagacccaccagggtaggacatttcaactcctaccctctccttagattcatgggacatgggacatttggacacagagagaagggggtcccctcccactggagrgtgagggtaggaggttataatccaggaccacctcctggggagtggctgagcccaactttgagaacaggaaggcctggatgggagtagaggggrggaagggaccccaagaacaaagacccagagactggcccctgtgctgcccgggrggccttgtcaccgccctgtgcttccctctggccccaggagttcgaggtgatcgcccagatcaagctgctgcagtcggcctgcaacaactacagcatcgcgccagatgagcaatttggggcctggttccgggccgtggagcggctcagcgagactgagaggtgaggccggggsagcaaatggggacagtgggggcaggctgtcctagggggccagctccagagggccagcagctatgacccatggtcagcctcagcccctgttgcctgaggatggccggggcaccccgactccagcttctgggcaggtgctgggggaaggccggagcatggcccctggttgtcacaccactgcccctctgctcatagctacaacctgtcgtgcgagctggagcccccatcygagtcagccagcaacaccctcaggaccaagaagaacacagccattgtcaagcgctggagcgagtaagggcctggccaagggtggtaggggcagctgccttggggctcagaagcttcagggctgagcctgggctcagggagtcagggaggctggccctggaatcctaccctgctgctgactggccctgagactgggatgagtcccctcacctttttgggcctcagtttcctcctctgtgaaatggggtgatactaaatgctctcccagatggctgtggtgaatggagtactggcaactgtcccagcactttgcacagtccttgggcgcagggtgcagggrctrtggggttgggatgtgtccttggggagcccccttaactaagccaactcttcacccagccgccaggcccccagyactgagctcagtaccagtggcagctcccactccaagtcctgtgaccagctcaggtgtggcccctacctcagcagcggggacatcgctgacgcgctcagcgtgcactcggcyggctcctctagctccgacgtggaggagatcaacmtcagcttcgtcccggagtctcctgatggccaggaaaagaaggtgactgcctgcccttctccccaatatcctttcccatctccccactccaaatccatgcatggggccaggaagccctggatcctgaacacagcttctagaaggttccccatctggcagctggcctggggtgcccccacagggcagtgggatctgctgatcttaccgtctccctcagttctgggaatcagcctcacagtcatccccggagacctccggcatcagctcagcctccagcagcacctcgtcctcctcagcctccaccacgcccgtggctgccacacgcacccacaagcgctctgtctcagggctctgcaactccagctccgcgctgccgctctacaaccagcaggtgggcgactgctgtatcatccgcgtcagcctggacgtggacaatggcaacatgtacaagagcatcctggtaagccggcgggggtggcctgggtgcctccctccactggcggcaaatgcaccctgaacacagtgcaccatccctgccctyccggggtctaccttgtagttggcggggaaggacagatgtcagccaggtacagaaatgaagaaggtagtgatcagggacaaggctggcctgagggcagagggggaggaaaggagcagccgtgcaaagcycccaggagctgaaggggckgtgctgtaggggagrtgaggtcagggaagtatccagggcctggccacataggccctgagccctgccaggacctcgactttctcggggaggaagacaggagcaatgatggctggcttctctgtctggygtgggctggtaccagagccgcaggggtgttggttaggaggccgctgtggcaaccaggctgggagccctggaaggggccagcagggtcagagtctagacaggatttggagacagcagatgggaattgctcacagaatgggtttgcctgggggctctttcttcatcctccaggtgtcctgcgacagatgaaccatttgtaacccccaccctctgtaccccagccctgggtcaggtgccccattattcacacacgctcctgacccctcattgccaggagctagcatggttgtcattaagcagtcacctgtggccctatgtccgagttccgcctgtgctctggccctcagggtcaaggtagcaggggcctggcctatgctgaccacactgagcatcctggccggcccctcctttcttacctccagggcttggactagggactgtctgttccccaggctcagtgatgctgttatcctggaggggcaagtgcttctcaaggaagtgtgggaggagggaacagtctcttacaggagaagcagggtaggcactgctgggacagacccctcctcattccatggaggcctcacatggggaacagaaggayggaggcctcacttggggagtaggagaatgtgacaaggccctctccggacccagcacctggccagaggctgtgagtgcctgtgcttggtgctgaggggactccagagggtccttggccactgcactctgggggagccgctccagggtcttttcyctgatggtccatcccccgccgcgatgcaggtgaccagccaagataaggctccggctgtaatccgcaaggccatggacaaacacaacctggaggaggaggarccggaggactatgagctgctgcagattctctcagatgaccggagtaagtcagaagaccagagggcgatggcagagggggcaggtccacaccactccccagccccaggttggaagcctttggccccagaaaattcaccagcagagtgtgggtagacactgtggacagggcagccctggctgcccccattgtctgcttgctgtccccagcaaccactggacctccccagtgtgtgcccttccctaggcgtgaacaggcagttcaaagctcacatcagtgaggagcaaagagaaaaggcatttttcactgggacaggttagccacgtggcccactggaagggackctttctggctaagacaagaaaacatgtgctctacaaagaatggtgacagctgtggaccaaagtgtcaagtgttaaaatccatgagtgtgtgattctaaaagcagaacaggctactaggaggccaactcagtattctagaaactgggaaagtgtcaagaaccagtgcaggctcagagtggggtatcctgggcctggagacgctgggcaagctccttaagccctctgtgcttgtcttctcatcccccaaatggaaatgaaagtagccagtgtgttcatcatatatgtaaaaatctatatgtatgtatatatgtgtatatatatgcatgtatatgtgtgtgtatatatatgcatgtatatgtgtgtgtatatatatgcatgtatatataaagcatctatgtgcaccataaaagttaactataaatactatcatcgctgttttctttccagtgagctgaacaccacctcccaccattagcccagacagtaagcaatgactcctgtgatccctagaagttacagtctaaatcctctggcagcttcttgcaccatttcggttaggtgggcagggtaggcgggacccccatcttacagaaaaggaagactgaggcctagagaggttaaagatgacgaaaagccacacgatgtcggcaggagcacaaatcgagcccagctctggtttatagcaggctgtgggccagaggagatggtgggaaatggagccaaaaggaagtgcttgccgggtgccagggttcaaggagtacaggcctccctggaacgggcgccagagccctggggcaggcctgtcctttcctggtccttggatcccttgtcctgagtagggcaggattctgggaggtgacctggattctagaaagcctgttccaggtgggcagccagcactgcagtatgggcaggacggggtgaccctctgccagctcaggccaagccggggggttctggagtcagtccctgtttaaacaagagtcatcaggttttgtgaggacctcagcagagtctgtcctcaggcaggagtcattgagaggggtccttggagttctggagctgtattggaggggatctgaggtctgtggctcaagacagtccttgtatgggctctcaagcggtaggggtatcctgcagggcccccaggagcatccctgatcacccctctgcccctccccaccagagctgaagatccctgaaaacgccaacgtcttctatgccatgaactctacygccaactatgactttgtcctsaagaagcggaccttcaccaagggagtgaaggtcaagcacggagccagctccaccctccctcgcatgaagcagaaaggactcaagattgccaagggcatcttctgagggcatcctcccagggtctggctggctggtagccaagcacttatggaccagagtggcccaggccagctgggcgccttcctcccacctgccagcccagggtaccccagactccagtttcatcctgaacctctcccgctgctgggattgacgcctgccattggtcaggctgacctggcctcccgtggaccactcgctgccttaggtgccttctgctctctggaaccagaggactagctgacttttgccaaggagcagtgccaacgggcatggcatggtgccctgcctgcccccgggcrccacctctgtacacttccctgacaccttcccaggtgtgggtcactgccacctgtgcccatgggcaccccagagcacccactgtgaccactgcagttctctcatgcccacaggcactggcctgtgaccttcgcaggggtcccggcccctcccaccactctagcctttctcaggctgcaccaaagattccatcatcagggccaactgagagtgagggagtctcacccaccgcttaccccagccctcccctgggagcagagagagaaaccctcttcatggaccagactctgcacccggtgagtgaggacagtcccagctgagtcccatcgatgttgaatctcatgccactgcaagtgccattcaccactgcgtcctgggctttacgagaccatgcaagacgggggttagtgaggaaggaggatttggggtgggggtggggtgattgaatatttgtataaaaagcaaaaagaaaaaaaaaatgtttgtttactgattggggaggggcaatatttatttgttgtaaatagcaaatgctagacttgaatattatattaaaatcctgtttctactataccctggtcattacagttttgttctttcattacctgtcttaattaaaatgagatagagactctcacattccgtgtttaagtaaggacccttgcagggttatccagttattttatgcacaggaaaagccagccactcttctcagcacactgaaggaaacacaaaagtttacctttcatacagcagatgttccttttggcaccattaaactgggaaatgtgctgagacagccctcagaactcctgggactagagtttggaggtactttcacaaggcatagcaagaatttctgaaatttagctgtctttaaaagtaacatttgtggccaggcgtggtggctcatgcctgtaatcccagcactttgggaggccaaggcaggtggatcatgaggtcaggagatcgagaccatcctggctaacatggtgaaaccccatctctactaaaaataaaaaaaattagccaggcatggtgccaggcacctttaatcccagctattcgggaggctgacgcaagagaatcgcttgaacctgggaggcggaggttgcagggagccgagatcacgccactgtcctccagcccgggcaacagtgtgagactctgtctcaaaaaataataataataaagtaacatttgtgacaaaagatggcagagtaggaggccccagggttcagtttttgcacagaaacaacgattaagctggaaaaaaagaaaactatcagaataaactgttttgggactctggaacctggtcggacatagtcaccaggggaacacttggtgaagggagatgctgctgaactccaacagttaacaggatctccatcaagtcacaggctgaccaagagacaacagaacagaaacttcgtgactatacacaacaaggaatacaaatataagcctggcaaaaatacgaatataagcctggaaaagtcactatggacacagaagactgcatccttcaataagcaaaaaagcaattcctgaggagggagacaatctgatttccagagtcactgcattataatactcaatgttcagttctcaaaaaattacaaagaaacaaaaatatggctcattcacaggggaaaagaggatttaacagaagctatccttgaggaagctcagacattaaaattactagtcagagacattaaatcacttgtcctaaatatgcttgatgagctaaaggaaaccatggaaaataatgtatgagcaaatgggtgattagcaataaagggatagaaattataaaaaccaaccagaagctccggagctgaaaagtataactgagaagaaaaatgtactagagagattcaacagcagatttaagcaggcagaagaaagaatcagtgtactggaagataaggcaatagagattattctgtctagggaacagaaagaaaaaggaagaaaaatgaacagaactagaggttcttgtaggacaccattaaatgtaccaacatacatttaatgagagttcagaaaaggcagagattatttgaataatggtccagaacgtcccaaatttgatgaaagacataaatctccatatccaagaagctcaatgagtttcaaacaggataaactcagatccatacccaaatttattagtcaaattgtcaaaagacagaaaatcttgaaagcagcaagaagagattcatcatatacaagagatcctcaggattaacagctgatttctcatcagaaaccatggagtctagaaggtaataggatgacatatttaaagtgctgaaagaaggctgagcatggtggctcacacctgtaatcccagcactttgggaggccgtggtggacagatcatctgaagtcaggagttcgagaccaaactggccaacatggtgaaaccttgtctctactaaaaatacaaaaattagccaggcatggtggcacatacctatagtcccaactatttggaggctgagccaggagaatcgcttgaacccgggagacggaggttgcagtgagccaagatcgcaccactgccctccagcctgagcgacagagcaagactccgtctcaaaaaatattctcaaaataaagtgctgaaagaagaagcaaaacatcctttaaggatgaaggagaaattaagacattctcagataaaagttaagggagttttattagtagacctgccctacaataaatggtaaagggagtccttccagctaaaataaacactagacagtaacttgaagccatatgaaaaactaaagaacactggtagagataactaacaggtagttagcaaagccagtgttatttcactttggatttgtgtaactcatccttttttcttatgatttaaaggtaaaattcataaagctataaatccacattaatggaaacaatgtataaagatataatctgtgactgacagagggaagatgtgtaatagcagtgtatactacttaaattcaattggtattattgaaactagattgttatatgtttaagatgttacttgtaataccaaaagtaaccagtaagaaaataactaaaaagtatataggaaagcaaagaaaggatcaaaattgtacaaaagtaaatccgtaaaaagcagtagtggaggaattgaggaatgaaaatcataagacatacagaaaacaaacagctaaatggcagaagtaaaggttttctcattaattactataaatacaaatgggttaagttctccaattaaaaagcagagattgggccagatgcagtggcttacacctgtaatcccagcactttgggaggctgaggttggagatggcttgagccccggagtttgagaccagcatgggcaacacggtgagattctatctctacagaaaaattttaaaattagccaggcatggtgatgtgcatctgtggtcccagctctcaagaggctgatgtgggaagatcgcttaagcccgggaggtcaaggctgtagtgagctgtgatcctgccaatgcactccagcctggacaacagagcaagagcaagaccctgtctcaggaaaaaaaaaaaaaaaaaaaaaaagatgggcagaatggatttttttagaactttgtctatctatatgctgtatagactttttttttttgagatggtgtttcactcttcacccacgctggagtgaagtggcacgatcttggctcactgccacttgccccctgggcaagtctcccaagtagctgggattataggcacccactatcacacccagctaattttgtatttttagtagagacagggttttgccacgttggccaggctggtctcaaactcctgacctcaggtgacctgtccgccttggcctcccaaagtgctaggattacaggtgtgagccactatgcccagcctgtagagacaaattttattttattttgaggtggaatctcactctgtcgcttaggctggagtgcagtgatgcaatctcagctcactgcaaactccacctcccaggttcaagcaattgtcctgcctcagcctcctgagtagctgggattacaggtgtctaccaccacacctggctaatttttttttgtgtgtttttggtagagacagggttttaccatgttggccaggctggttttgaactcctgacctcaagtgacccacccactttggcctcccaaagtgctaggattacaggcgtgagctactgcacccggctgagacaaattttgaatacaaagctacaaaaaagttgaaagtaaaatgttggaaaaagttattccatgaaaatagtatattttaacaatggctatagtattatcagacaaaatagattttaagtcaaaaccgtaacaagacaaggtcagtatacactgacaaaagctgcaacttctcaagatacaacaattgtatccatacacacacttaaaacacccaaaatgtatgaagcaaaaattgatataattaaatgagaaatacacaattggagatttcaatacctcatttccaataatggataagaacaaccaaacagaagatctataaggaaagaggatttgagcaactctataaaccaattagactgagcagacatatacacaacacacaaaccagcaacaacagactacacattattgtcaagtgtacatggaacattttccaggatagaccatatgttaggccataaagtaagtcttaatttttttttttaagacggagttttgctcttgttgcccaggctggagtgcaatggtgcagtcttggctcactgcaacttccacctcccaggttcaagtgcttctcctgcctcagcctcccgagtaggtgggattacagcacccgccaccacacccggctaatttttgtatttttagtagagatggagttttaccatgttaagcaggttggtcttgaactcctgacctcaggtgatctccctgcctcggcttcccaaagtgctgggattacaggcatgagccactgcacccagcaataaatttttaaaacgaaattatacaaagtatcattccaattacaataggataaaattataaatccatagcagaagaaaaactggaacactcatgaatatgtggaagttaatgcactctcttctttttcacgtcagatgggtaacgtgccgacgtaacagggtttgagggtgacacatctcacgcatgtgcatgaacacccaatcatcattgttcatcaactacaaaaggatcttaacactcttcccctccccgactccagacggagtcttgctccatcgcccaggctggggtgccgtggcacratctcagctcactgcaacctccacctccaaggttcaagcaattctcctgtctcagcctcctgagtagctaggattacaggtgtgcaccaccacagctggttaatttttatatattttttaatagagatggggtttcaccattttggccagcctggtcttgaactcctgacctcatgatccacctgcctcagcctcccaaagtgctgggattacaggcgtgagccaccgtgcccaggcttaacacactcttaaacaaccaatgggtctaaaaggaagtcacragggaaattagaagacaccttgagacaaaacaaaaacacaacataccaaaacttacagcatgcggtgaaatcgaaagcagtgcttgggggaaatttatagctgtaaacgactacattaaaaaagcagaaagatctcaaatcaataatttatccgcacacatttaggaattagaaaaagagcgaactaaacccaaagctagcagaatgaaggaaataataaagattacagcagagataaacaaaatagagaatagaaaaatagagaaaatcagcaaaaccaaaaactggttatttctaaagaacaaaattgacaatactttagatgaacaaagaagagacaagactcaaattactaaaatttggaatgaaagtgggaacattcctaccaactttacacaaataaaaaggatgagaagataatgctttataagagaatgcaccattgcatgccagcaacatacagtggaatattattcagtcataaaaaggccaggtgcaatggctcatgcctgtaatcccagcactttgggaggccaaggtgggtggatcacttgaggtcagaagttcaagaccagtctgaccaacatggtaaaaccccatctctactaaaaatacaaaattagccgggtatggtgatgagcacctgtaatcccagctacttgggaggccgaggcaggagtattgcttaaacccgggaggcagaggttgcattgagccgggattgtgccactacactccagcctgggcaacaagagggaaactccgcttcttaaaaaaaaaaaaaaaaaaaaggtatggtatgcccacacatgctacaacatggatgaactttgaaaacattacaattccacttatgagaaatatctccaaaaggcaaattcatggagacagaaaggatagaggctaccaggggttagagggaggggaaatgaggagttagctaatggatatagagcttctatttggggtgatgaaaaa

SEQ ID NO: 6875 - DNA, 74648 bp, Homo sapiens
ttattcttgggaaactagaaattacttatatgaaatcttctaatttgaatgtgttggttcatcattaaaaattggtagcattatgtgagttttaaaacaaagaaaacacccacatctgtgggctaggtttgcctcctgacctctgttttatcattatgccagtggctgggaactgggagatccaggcagatgtcctggaagtcacagccttcaagaccaggtctggttgaaaggacaggtcttgagtakgtggagagggtggcagggagtggacctgccctctggccccacgatctcttcattccttcccccatctttgcctggggaattcccccagccttccagcctccatctccgtcactgcctccaggcagccctccctgaccccagctatataagctgcttctctcttccttttcccctctccagcagcctctacgctctcccagctctcggacagcgggcagactctaagygaggacagtggtgtggatgctggcgaggcagaggccagcgccccaggccgaggaaggcagtcggygtccaccaagagcaggagtagcaaggagctgcctcggaamgagaggcccacagatggggccaacaaaccggtgagccaggaggaggaggatgcagagggctgagaggaacacgggccccaggcacagaatgggaggtcccgggaccagggctcagcttggcaagtgaccacaaagggaggtagtgagctccctataactggagggatttggacgtcctggaggagcactggattaggaatctggaggcccagtttcagctctgcctttgcactgacactaggggctgaggctgagattggtcttgggaatctttaagctcctctcagttttgacatggccaggtggctgagacagtcttcggagtcaggcttcgattcaagtcctgatgccaccaccagacagccttaggcaagctccttaacctcctgagcctcggggattttggtgaggattaaagagccaagaacacaagtgcttggcttagtgcgttgcacacctgaggctcccgacacagggctggagcctgagctctgctgacccagggtggtgtcacggcccggcccagccccctggccaggcctgccaactgcgaaggcctcagtggtgtccttcctaatacccacagcctggacttctggagcccacrtccactctggtccgtgtgaagaaaagtgcggccaccctgggcatcgccatcgagggtggcgccaacacccgccagcccctgcctaggattgtcactattcaggtatgtccccaggggccccacttgccatctctccctacccctgaaaggccctttctcagcatctccagggttttgcgactcccatgggtaacacggcactcaagggcagacctaggcttatgtcacctttgctcttccgggcctcagctttcctaatccgagaagtggacactcagattgtagctgcctgcttggcagtgttgggactgacccagttggtggtcaaagccaggcctgtctaacccttgggcaccccatgccctgtgtctcctccctgcagagaggcggctcagctcacaactgtgggcagctcaaggtgggccacgtgattctggaagtgaatgggctgacgcttcggggcaaggagcaccgggaggccgcccgcattatcgccgaggccttcaagactaaggaccgtgactacattgactttctggtcactgagttcaatgtgatgctctagaggccaaggcctgagggcctcccaccactgcccagcccctggtcccagtccctttccaccgttggcttcatcaagctccttgcggggttggggctgcatggccagggtggcaggaagacatcccccctccatcccagcccactggaccagaactgggagaggaagagagcaggacaaggcagacagaaggtcaggtcaggaactggtgctgtactgggtacacagtaggcgcccaggacaagtgggttgcaagacaggaagaaaggaaaaggaagggcagagtgctggtttctccaggttgggttgggggcactgctgtcccccctccagctaggacccagcccatccccagatgcctgagcctttgtccaaagtgaggtcactcgagaattcatggacacggcccccagtcagggggcatcttgcaagacctttagtgccacaaataagcatcgagcacctccccattcacacccccattcctcctggctccttatcccccatggtgtttattatttatttccctccccatgcccctggggaccccaaggccccagcttccctctgcacccccagcctatcccagaggccttgcaggtgaccagcagtgtcattgtatttatatacagagcttatgactttaatttttcaataaagaaatctgaacaaggttagacgtcagcgtgctgtgtggtttacctgggtggctggggtttccatgtggggaggggtgggcaggacaggtgggggcagtcagagcaccacagaccaccaccccgactgcccgcatggctccaattgggatacacggtggggcgtgcaggggtgcttgagccacactcacatcttggagcctcttaattgaaggcttgaaggcaaaacttgactatttacagataatatttttagattaaaacccacaagtatattatgaggcagaatgcacaatgtgcatgaatgttttaaatctcagatgcagcccattcctttccagaagctgccttggagataaggatttgtacccaatcaatcgtcaagaagtgccctcagggcagaccagcaaggaagtggggaagcaggacagggaaggggaggaagccaagcgaaggtgagatttcaggcaaagtctgcagaaggcagcttcagcctgatcccaggaggatcccagggcgtacactaggcctagagttgtctccactcaaggccagagggctggactttgatgcctgtcagtctttagacaaagcctacagagagaggccataaattcccaatcacttcctgctctctacctatgtgggtcaagctgttccagtagcctaggacagcgggtgtcagagcaaaacatatgggatgggctcggaggaaaaggttgcaaacatggtctactgtacggcctcagtcccggccccagtgcttattccttctgtcctcaatatttgtctggaagatggaagagtttgagaaatcctgctttgtccagttctgtgtccagagttctgccagaggtgggttagggacagttggttccatgctcttgtcccagatcctgttcttggctgtccttgttctctttccagcctgggcagaccacctgagacctgagccatggattcccctgaggcagctggtgtttcagaaggcacccctgccatcccctgacagggtgctgttgaccctctgcagggaatgaccctcccacctagcagcaggagggcttcrttaggcctcagatctcctggcattcaactccaaagcttgtgtggtcatgggcaagtaattttacctctctgagcctctagttccccatctataaaatgggtttggtaggctaaataatggctcccaaagatacccagattcaaatccctggaactttggaatgttactttatatggcaaatgggattttgcggacatgattaaagtcttgacatggggtggacccagtataatcaccaggctcttataaatgggaagcagagaaagatgttaacagaagaagacaaggtgtgtgatgatggaaacaggttgctgcagtgatgtgctgtgacgatgaaggaagggaccacgagctgaggaatgtagacagccactagaagcagagaaaggcaaggcagtgggttctcccctcaagagcctccagaagaaagctgccctactgtcacctggacctgaagcccagagactcatttcagacttctgccctctgtaagagaaggtatttgtgccgttttaatttgttacagtagccataggaaactaacaatggagctgccacccccagcagctgttagtcacagccccatgtctgtacttggaaggagtaggacaggaatgagtttctggacttgttgcttctggaattcctgggcctgactctgaggctgtagcccattgagtgtatgggttcccctcccagtagaacttttaacctaaaaacattcctttgcaagtggtcttagaaaggtccagttagttgtccaaagtcacacagctaaggaggacaagtttggacccacagctgccttaagcctgggtctgctctttcctgcacctgtcctggtgtcttttgaagggcccagtgtggtaggctaaggcagcttcaagtactgggagagtggggggagggttgtcagaggtccatcctggccacatgtacctgtgaccctgacatttttactcatgatgccaaagtgggggttggggggaatggagtctcagggtctgcttctcccttgctggagaatgctgggcaggttacacaatgcaccaagcctcggtttccccattctgttcaagagtcaggaccgccatgctgctcaaacccagaaaaacacttcacttccatgacctgtgtggaaaaacaccttgggcccttcctacactgacattccagggccagagcccagaaggattagctaaaatgtttgcccctttcacagagcaggcccttagtgggtagaagctgctgctaaacttactactaaatatgtgtctagggagtagcaggcaacctggggaactggcaagtgctttctacctggaggaaaaattccaaagcattcaactttggatgcagctggatgagggaccttgggcaagtctcttcttgcatcaggacttattaaccctcttgtgttaatagggtcggtcaaggtgctctttaaattagtaccactgatttatttctgacgggcctgccattatgtttatttatttactctcaacaaccgcataagatgtgggtatgaatcccatttgcctgaggctcactggcagcaagtggcagagctggggcaaagagcccaggtgagttggacaccgtgcatccttcaaggtgtgtgtgtggtggacaaggtatgatgtctgtgctgcactcacagcgggaccttggaaaagttcttgtccgtcttcgggctgggtttccatgcttgcctgatggggagttggacaagaatatacttgggggcggtggtgataatacctacctacctcataggagacgactgaacagcagaagagcttccaacaggtctgacccataatttgtgatcaagaaaagtttattattactgttactaagcaggccgtttcagccatggaagtttgtgatttcctcctcactgtggctctgtgcgatcttttttttttcttttttcttttttctttctttttttttttgatggagccttgctctgtcgcccaggctggagtgcagtgacgcaatcttggctcaccgcaacctccgcctcccaagttcaagcgattctcgtgcctcagcctcccaagtagctgggattacagatatgcgccaccacgcccagctaatttttgtagttttagtagagactggtgggggtggggggacggtcaccatgttggccaggctagtctcgaactcctgacctcaggtgatctgcccggcctcccaaagtgctgggattacaggcgtgagccactctgtgcgatcttgcgtaaatgccttaccctccgcagaccgggcctcgatctccgggtctgcggtggggctgattgcagtaggcacacacagcctcccaggtctgagattttcatcctgcagcagggtttgcgctccctatgtccgagttcctgggggcgggccgtggcggcggcctttcggtgattggtgcgctcccagaggccccgccccccccgggccgccccctgctgtcgcgggcgggcctcagggattatgcaaaggagccaccgccccgccccgcgcccggattggaggcctttgtttgccgctcaactccaggaaaccacccgcgctcggcggccgccagcaggtgagactcggggaggggctcgcggggcgtccggggtggtccctgtccctcgttgggactcagtttctccgtcgggagaatggggagggagagtggacagcgccagtgggctccgttccactgggacggcgctgctttcggtcttttccacgtggaaaccccacgcgcacggggaaggagacgcatcaccgctccgggaatgggagggagccctggacgggcggtatgggccccagtccaaaccgtgccggccgcggggttcctcagtctccaccctccggcctcagtctccacctctgcacaatgggggcgttggctttttctctttccagctggggctggtggcagggaggggaggggtcccgggggagctcgggggtgggccttggcggggcctcgggctgtgtttgggctggaggcgtggcccgggttgctgtggttactggggaggtgaggctttctgtctgggatttgtgtgagattcgttcacccagcaacaatccgcgcagcctggcggccctcggagccgcgcgcgcttcccggacgcctaacgcaagtttcttttcctctttttgtcgcgggggggaaggtagaacaagggccagtgtcgggtaggcagccctgacaatggtaggaactgaacgggctgcaaaaataagtccagttccctcttggtacacctgcggaggagaatgaggtccagagagggggcgcgactggcccaagggtgcacagcagggaggcgcagagctgggctctccccagtgtgatggggctggcacaggcagaaccagagtctgcttgctgcgtgaccttagacgacacttccaaagctcctttcccgggcttttgttgaaagaaatgacggattggagtccatcattacctatgtttaaagacctgcttctgagatagtcggaagggaaaattgctgataacaaacctgggctatgttggagcagagagaagctgagacaggctgcagtgaaaagagacattgttcctgtcctctagaacagaaggagaagaaatgggctggaactgaagcatgaaagactaaagttagatacatacagggacttcccaaacgacttttccaggcgccttctctggaattggtgggttttatttgggggctgttttgttaataaaacaatggctgcccatctgttagagagggcctaagtctggtttacttactaacaaacaggggagcggaacctatggtgttttgggactctgggtttattcctggggcagtcgtctcacagttcttctgcaggagggaggcgatgtccacgtggggcctttgcctcctaaagtccagccggtttgcatttaaaacatgtsattggggctgtttgttgcaaggggatttcatcagctcccaccgtcctgcagactctgccagaggcgctaggataggggtttccagagagactgggaatggtcccagctacagggccgtcatactgagagggtgttttggaaattggtgcacaacatggacacttcagtttccccccgtgggggcgtggagaaggaaaagtatttttaaagcattcacatccccagtcgaattcctggtcctttttatgtttcctcagtcctggaaggtgggaatgatctggagaccaggagtaagaagacctgagtttagatccccagcctggattcagttctgagtgcctcagttttcccttccacaaaatgaggttggtaatgcccactttaccaccattttttttttctttttttttttgagatggagtctagctctgtctccaggctggagtgcagtggcgcgatctcggctcacgggaacatctgccgcccaggttcaagcgattctcctgcctcagcctcctgagtagctgggatcacaggcgtgtgccactacacctggctaatttttgtatttttagtagaratggggtttcaccatgttggccgggatggtctcgatttcctgacctcatgatcctcccacctcggcctcctgaagtgctgggattacaggcgtgagccaccgcgcccatctactttaccaccattttaaggcttgagtgaggtggcatcataagaaacttttgctcagtccacattctaaataaatgaggaaactgaggctcaaagaaaggaaggaataatgacaacaataataccattggtattattagctaatatcataggtaatatttattgagtgcgacattctagccrctgtgccagggcttttactgcaagaagtgaggtttgggagggcaggagctcttatctgttttgtcaccattgttattccctagtgtctacctagtacagagccctacacagagtaggtgctcaaaacattgktgttgatcatctagattatatcagttacgtgatgttgtcgaagtgggtgttattgttgtccctcttgtacagatagaaagcctgargttcagagaggtaaagccacttgacgagagtcacacagcttctcactggtgttagcgcatccttactttggggtgtgcagggtgtgctggtgtcagctcgggagagtggattgtgcccatctcttcccagtgcagcattcagtgatatcaatagcttgaaattggcatggccaatttcagtaagggtatttaacaccatcaaaattagtaaccaccacaaatcagggctttttcttactttttttttttttttttttttttaaagacagctgcaggtgaagggtgttgggggatggaagaccagccttgcttctgcttggcagcctggagttgggggctttttggcagagccaagtggagccaggccagaaggcctgcgccccactgcagctcccctaaagtatgcgatttgggaagaaaccctttatgagatggcttttgtagtgtacggtgtgagttatgcagtgcagcagcccctgacttgggaacaggttggtatgagcctgaattccaggccaaaatgtctggcctttaacctgaaagtgacaggagccacggatggtcgttaagcaggggaaaaacctgacaggatggtgccctaagatttgtcattgtgccaagggattggggggtaagtcagggtgggtgatagggaagaggtgcggcagttggccaggggagccaggaggctaacagaagctcctcattttctgagtgtgtcctgcgtacaaacacattatcttgttactttacacatgcatgcctgagggaaggagaagcctctgtctgtagatgaggatatcagagaagttctgaaacaaaacagcaaagggctgatctacccaggcttcctgcccccaaagtctcacattctcactcctccctccctcctgcaccccagcttgctgttccatcttggctctgggcttccttgccaaatgtcaggcgaactccagctccattgccgagtgagaccttctgcgcccagtgccgctcccacaccagcccctaggtccttgccagcattctccccccagcccccccactgccagctcagctttttctggggaaggagcctgggatcagggccagagtgggatgtccagctgtcagtctcctcggggtcttgggaccacagccaaggaccaggactgaggaggggaggtctcagggtctaagaggcacactcagtcccccactaaggattcatctggaggataatgctttatttgtgggtacagacccaactgtgccttaacatgctgtgtgactttgggcaagttgtgtaacctctctgaacctttcttcatctgttaaatgcctaattatttatgaggatccaatccagcaacacatgccatgcctccaaatgcaaaaagtggctgaggctgggcgctgattgcttcctttccttttagtgattttcatgtgttcccacatgttgcataatggctgtattgcagaaaacaacatattgtattagagtttaaacagaggaggagaaggtgtgggggttacagaatgttataggatgtcagagctgtaaagggcctcaaagaacccaacgatacatttcgcctttcacaggaggggcaactgaagacggaggtgcccaaggtcagaaggaagcaccacacagaggtgaggtggtattcgtttgttttgtttttaagaatagtacrtgttcatttcattcttatttttaaagcaactgttatatttgaaaaatacccaaaaggaaaaatggtaaacttccctatcaaaaaaacttgcctataattctactacctagtgataatgattgtaaactttttttttttttaattgagacagtttcactgtcatcgcctaggctggagtggggtggcacgatcttggctcactgcaacctctgcctcccaggttgaggcagytctcctgcctcagtctcccgagtagctgggattacaggtgcacgtcaccacacccagctaatttttgtatttttagtagagacggggtttcgccatgttgaccaggctggtctcgaactcctgacctcaggtgatcctcccgcctcagcctcccaaaatgctgggattacaggtgtgagccacggcrcatggcctgttgtaaacattttaaagcatgtctttctctttcttttgctttctctctctttctttttcctatcctgtctccttcctttcttcctcctcctcttcctccatattttactsttttttttttaagtggactcaaactagatatatattattttataactggcttgtccacttaacataacaaaatttttacattatttgatattcttcaatagcatgactgttaacggcagctaatawtattcctttgagtggaactatcacaatttctttcaatgatcacctgttacgggacactgctattgtttccaaccattttacctattgcaagtttcagttgcaaagtgattaagatcacactgtccagggccgggcacggtggctcacgcctgtaatcccagcactttgggaggccgaggcgggtggatcacgaggtcaggagatcgagaccatcctggctaacacagtgaaaccctgtctctactaaaaatmcaaaaaaaaaaaaaaaattagctgggcgtggtggcaggtgcctgtaattgcagctactcaggaggctgaggcaggagaatggcatgaacccgggaggcggagcttgcagtgagctgagatcgcgccactgccctccagcctgggcaacagagcgagactccatctccaaaaaaaaaaaaaaaaaaagattatactgtccagattcaaacagcttggttcaaaccagcttcctcacctataaaataaaatgggcatcataatttttccctccttggattagtatgaggattaaataatgagatctgagtccatggaaaggcttttataaggtatttgacacataataggtgttcagtatagttttgctgttagcagtcccttcctggcacgtgcacggtttgtttgactctttgaaaagagcatgaatttgaatttatgtatgtgttttcctcaatatggccacaccctcctcataacccttatctcagttggctgagaaggggctgtttgttctgctccttaactactcagagtgaggacagagtttctagctgggtcagtgagccctggaactggtttaagggtcgcagggaagagggtcacagggaaatgtcagcacctccctccacttgggaaaactgcttctccctttttgtgtccaggactcatcgctagacctggggttgatattgtggaagctgtggatgaggaaaattaaactcagtcctgcagggagcaggttgtagggcgtttcacggaaaaggcaaggccatttatttgtgaacagtcattctgtgccagctgggcactggggccaagaacttttggcacatagtctcatccgtcatcccaagaacccagtaaaataattattggtccatgttacagatgtggaatctgggattcagagaggttaagcagcttgcccaaggccacacagcttccaagggagaacatggagttctctgtttgcccacaaagcccatgtgccttaacacctgtgctctgcagcctcctgtctgcatggcatttctgcctgggtgggcaaatggaataaagaatccaggaggtttagcattagaagataatctctgataacctcagagacaatctcattaagccgcaggttccaaagctcagagaaaggaaggtgcttattcctggtcactcaggctggaacttggttctctacttccctagccaggcttcatcatttcttcttggttcactctggaaatcctcacctgcctcctctttccctcagactccctgtggatttttttttttttttttttgacaagcgtcttactctgttgcccaggctggagcgcagtgacatgatctcggttcactgcaacctccgcctcccaggttcaagtgattcttgtgcctcaggctcgtgggaagggctggcagggttctgcagacacagccatgcacatgactgttgctggtaaaagggtgaaagtcatcaagccctggcagtaggagtaagaggttttttttgttgtttttgtttttggtgttttttttttttttttttttgagacagagtcttgctctgttgcccaggctggagtgcaatggtgcaatctcgactcactgcaacctccgcctcccaggttcaagtgattgtcctgcctcagcctcccaagtattacagggaggattacaggcacctgccaccacacctggctaatttttrtatttttagtagaggtggggtttcatcatgttgcccaggctggtgtcgaactcctgacctcaggtgatccgcccacctcagcctcccaaagtgctgggattacaggcgtgagccactgcacctggccaggagtcagaggtttttgttgttgtttcttttctgggtgaccaggaacgaatctcttctcttctcttctctgggcctcagtgtcctcacctatacaatggaataatactcgtgttctccccacttaaacgttctgttcttgagcatctagtgctataaaggagaagaaagcattttgggaaaccaaaaggctctgtgtggaaccagggcctcactataaaattggaacattggctttgtgaattgcaattagttggtaagaagctccactctcgattttattgtgcacagrtattaattatctctgcgggctgcaatgttgtgagcaccaagcttggttattagaagccaggtctttgtgtgtttgaaactctactgcagctcatcacctttgtgaccttgggcaagctgcttgggctctaggggcctctgtttacccaactgtgaaatggggttgtcacatcagcctcattgggttgttatgagggctatgagtcaggcttgggcaagtagctaggttgagtggatcatccaggatatatttattgtatttctattgkatatcagggcctgtgtgctgggtcctggggatatgatgatgagagcctcacagagctcccaactgagtgaagagacagatgttaatcaaataatcacatatgaaatatagttccaaatggggagtccccaaggagggcacgctggagctgacatctggaggttgcctagaagttaacagggaaaagaagtgggactgggtgaggggaggagcaggacacatctgtcccaggaaaagcaaggaggcctgtatggcaggagcatgctgagcaagggcagagagggtggtgggagaagaggctgcagcagcggccagcttgtggagtttcatcttctttctcagagccatagtagctagctgtgcgtctgaagcatggaagggtcttgtttggaacttttatcttggaagaccacatcggtgcagtgtggggaacagattagtggaccctagagctttccaggcaaggccgatccagggacccacgtggggatgcagaaacggggacagattctggtgaaatttaggaaatgaaatcactgggagttgacgatggattggttatgggatgtaagggaaaaggaagtgtccagggtcacagttgattctcagtgtgtacctgggtgaaagatgggccaaactaaggaggggtgggtttggagggtggcaatactaggagctcagtcttagacatgctgcttcggtttggtagaatttggcctgtgggtggggacagtgatccaagagggggcagtgcatgagcaaaggcagggaggagggttggtcatgcttgggggtgcaaggaaatggaacagactgcactgcaggcggttctccttggtgttaggtggctgcccctgagatgggtttggggttatccaggggccacaggctatgcccagcaatggcagccacctgggttaatgctgcctgggttaatgaccagggagggagggtgagtgagtgacagggtgtcaggggagcccgccycttgcacaatggcacacatggcctccagagctgatagggaggggcctcattagggtttggctctgctccatgtggggctgggggctacagggagagccctgccacccagatgtgggtaaaaggcaggaaaggggatagaggggtgggcgattaccaggatgagggctcctggttctagccctggctacgccagatattyacaagctgaccttgggaacgtccactcattcattcattcattcattcacagaacacattcatcagccataaacagtgtgccaggcttcaggaaagatattaagatctagcctttagaggagaccagagacttatacctaagtagcagcaatagttgtagtagcaataataaaatagctcaatacatgactgtgttctggctcccccgctctacccttggtaggcatcatgtcattgaatctttatagcagcccctgtggggtggctactcttcttatccctgttttacagatgaagaaactgaggcttagagacgtgaagcytcaaaggtcagggccagcaggagatggggctgggatttgaacccaggtccacagtgactctgagatttttttctctcctacatgggtggttcccaaatctggctgcttatcagaattacctggagggctttttggacaatacagaggcctgttttttttcctctttctttttgtttcctgactcagagtctctgggtcctgggtggggccagtgttgggagcctcttgtgctcctgtgcccscttttctgtgaagctcctgcttctcccgcttgactcgctctgccccgggtacacaggccttgctgttctcagggaaagcccgctggctcccccaccttggcctttccacttgccctcccagaacactctgccccaaaccttcttgtggcttgcttttgacccctcttccttccagtgccttatttgaatgtcacctcctcatagagaccttcctgaccgtcctataacccttctcctccaacccattactcttggccccatgtgttctctaccagggccagtcacctgggacacttaaaatgtctgatgcccagagactgactctgttggcctggggtgagccccaggcttcagtgccacctggcctgggacacggatcgtcacccagtctcattgttcacagctctctccttgaaattatacatgtgcttgcttattgtccatgtctctgctagagtggagagcaggggactggcctgtcttsggccctgccatattcccaggtgatttaaaagcacccgccacacagtaggagctcagtgagtacctacgaatgaaggaatgggatggtggggcttgaggaaagayagctcgactgaccatcaggatcgatctgttcccaacatctggtgaacccttggagggttcttacaacaagggaaagtttacctgatccgccaggttcacacctccatgctgccccgaacatcccactctggctgcaggaccacctcggggtgaggacggtgggttgagatggcaggaatcaccacggtctccctgagattcaggttgcacattggcagagtcagagctggaagggcaggagtggtgttgagtctgagctctcaccgtgcacatgggccctgaggcctagtgagggaaggagcctcggctaaggtcaggccgtggttgaagagggcctagagggtaggagctacagcatgctgtgtgaccttggccaagcctctgaccttctctgtgctttagtctccccatctgtacctgcagggcctgggctgagatgatcccaagcccaggacgtcaggagtttgttccctgagtcctttcctgggcagcgctgactgcggagggcttgcaaggggttaagctcctccagctcttgctctgcacgcagacaaaccccctccttctgacaaacacttgtaggaaatcaggctgggcgcttcctgccgaggcgaggcggcctcaaccacggcaggggcggggagaggtrgggagcgatgctggtctgtgagcagcagcttgggctggcagaacggcctggaggtgggccagggcgcaatggagacagggggctccctgggtttggaacaaagaattcacaggcaggtcccctgaaactgggtcggcaggacggtggtggagcccgagagaggtaagggattggaacggaggagggcccgggaggccgctttccttctggacgggccagtcacagactctcygggacagtccaggcagccggaccagcccagccaggaagttgcagctgctggagctgcaccgcttttctcttggcttaggggatcccggcctccagggcaagggtggatttaaggaggatttcgtcaagcctcaggatgctagattccagtcctagctctgattctgatctcttgtgaacttgggtaggcgggtccatctctgtgcctggggtgtcgtcgtctgcacctggagagttagtgtccttggttgctaaggggtctcagagacgatgcaggcatgggcagcaggccaggaggcagcgacggcgccggggggtggtccctattgaaggagtggccccttatgccagctgcgtaagagcaaggagaggagccaaggacagtccgaggaccagcagacccagctcagctcttgaggatggcaagaccagagctggcaacagccagggcaccgtttctctttctcctcggcctctgctgctggagcgggctgggggcagggaggacacagagagggagtggctggtgcttccttgtgggactagagtccacacagctggtgggaaccccttgagaacagcaagtctgtgccctgccagcaggtgggtgggggtatggttgagcctttttggaaggtctggttactgatttgrggggtggtcttccttccccatctccctgacacatctgacagccttggtttcagagttgcggtaccccagctttgaatcctctgtctgcgcttcctggctgtgaggtcttgtgagagcaggccatgtctctgtgcctcagtgtcttcatctgggaggtgtcagggtgtgggtgggggtagaagcagggtggcaccctggmcagctctggctggatgggaaggggctgcagagggcacggggaggctgtgcgggctgcgtagctgtgctggcaaaggagagcctgggcgtctgggcagttctgagggattgagccataaagggaagggtccctggctgtggaatgactgagcgggcggagaagccctgtgtgggtggtggggaagaagagtccatcccacccaggaactgaagatagacacctcaggggtctgttagacccttgagagagcaggggcagtggcggcttgggtgtaagaaggagatgtgcagaaggagggtgcagtggctgctacttccttgtggggccagtttctccagggatggcggggaccctgaactccatagccctccccagctcacactgctggagtcttcaccaaaccccactcactgccttttaggagcagccctgctgccctaacgagggctggctggaacaactctgcctttatctggcatgcagggacacctgcccatagctctccttcaaggtcaggccatactttcagacctacgtgcctttgcctccgtgctgttcccgctgcctggaatgccctccccagtcttctcccccaaatcctcattgtttctcaagcccaccttaaagcttcctttggtaacacttctgtattgtactaccccccaccgtttaaaatcttggaacacttttactcttttctatattctttgcatcttacgtagcgcctggtatatagtaggaagtcatagggcttttttaaaaagttaatttgcgcccactgggtgctmagtatgtatctttgtactttgaaatgtgacctcagggaggaggagagaggttaacagttctgaggctgttgcycttagaagctgagtcaatcagggacttcaragctctttgagtcccataccctgcctcccaacccaccctagcagggtgatatccccttgcgatatcaagagcaggtggtactttctctattttacagtgaggaaaatgcaagcccagctatacacagtgagtaacagcagccaggactagcacctgtctcctgatgcccagcctgcttctctatcacagcatcrtcccagcctgaggttggcaggtagttggcactaacgtgtgtttgttgactgactagctgactggccagttctggggctttgtggtgaggagggccatggctcgcatggaaggcagaggcctggctcaggaaaggctcactggtttaggcgcctgggggcaagtgcraaactctagtcagtcactgcagctgcctctgacgtgcaccttcccctggttacagtgagatttctgccacgactgagtcatcccagaagacaggatgttcctctttgtgcacccagagggctctgtgattgggcaggctgctctgtggcagagctagaaaaaaagccctttaaaaagtcaaaaaaccgcacacctcccccggccccttcctcagcagaggcttcagaatcagaaaagcaacagctaaattgtagcctcttctccacctgccataacagcaggagccaggaggcctagtgaacttcaaagggcaggccctgcctgaggccctggtttaaaatgcagattcctgggccctatcccagggccactgagtcaggctctctgcaggttgtttcaggaaactgcacgcttagaggattcttaagcacactgaagcttaagatccctggcagggatttccaagaagggtacaggccctgcagaaggtatgagaagcaaggattagagcttctatttaaaatatagttgaccagctgggtgggtggctcatgcttgtaatcccagcacatagggaggccgaggcaggaggatcatttgaaacaaggagttcaaaaccagcctgggcaacgtggcaaaaccccatctcgacaaaaaaaaatttttaaaattagccaggcatggtggcgcatacctgtggtcttagctactcaggaggccgaggtgggaggatcgcttgagcccaggtggtcaaggctacagtgagctctgattgccattgtactccagcctgggtaacagtgagaccctgtctcaataaaataaaatacagttgatccttgaataatacaggggttaggagtgcctcatgcagtcaaaaatctgcttataacttttaactcccccaaaactttatcaatagcctgctattgactggaagctttgctgataacataaacagttggttaatgcatattttctgtcttatatgtattatgtactgttttcttacaataaagtaagccagagaaaagaaaatgttattaaggaaatcataaggaagagaaaatytacttactttcattaagtggaagtggatcatcataaaggcctacatccttgtcatcttcacattgaggaggaggagttaagggggagattgatctactgtcttaggggtggcagaggcagaagaaaattcacatataggtagacctgtgtggttcaaactgtcattaagggtcacctgtatatattttctttttcctttttatttttagtagagacaggcttttgccacgttgcccaagctggtctcaaactcctgagctcaagtgatctgcccacctcggcctcccaaagtgctgggattgcaggtgtgagccgctgtacctggcccattttcgattgcatctttttagaagatcacttttgaaaatactctttccaatacatgtaatatattagcgtgatgtgttcgagcaaatatatttttactgatggattgtgtgattaaaaaaatattggggtaccactaggccagaattgacagttgcaaatcttgctgtggcaggaagtagctgggtgatcttagccaaattctaccctcatgtttgtaggagggcagattgagaatttaaaagtaaagcttcaacccaggctggcgccgagtgggctcttcacatgtggtagggactgtggggctggaggacaatacacagggtgatctggaggaaattgtagggctctgcatttgggggtagagaggaagactgggcggggacagaggatagaagccccgaacacccatccacagagcaggagtcgcagccaaggagggaagaatggtattccctgcacctccctcctccagcccttgagaagtcagcctttcccgggctgcactgttccctggggaactttstgtccaaaaatagttgcctgctgacttttctcagccacacaaatcaagcaggatccaagtgttcatgaggataaagggacaaacacagaccttctgtcctgggaggcctggagtcatactgccttcaacacagcatgcaggggagaaagcccagactgtgggccaggaggctgactttcacccctgccttgtcctgacccctgtgtggctttaggcaaggcctctcccctctctggatcccagtttccccatctgtggaagaaggcctttgtgtgagctgctctgggggccgctgcactgatgggctgcagttctctgaaccctccatggcagggagctccctgggggaccgtgcccactctgggtcagctttgcacttcctgggcctggctcagtgctggcatagaggaagcgcttagggaaatagcaggagcgtcagaaggaagaggcaaaaggagatgagagggagaaggaaagagggaaagaaggagagggttgagggaaggcagcggaggagcccttctctggctaccctgttcctgcagcagccgcctgacgggtcccccgtgtggccagcctccctggttcattctcccagagcagcccaaggggaacttttaaaccacacctctgatgggctttccctgtgttcaataccccagccatcggcggcgaaaccactcccaggtccaggaaagcccctggtaggcttgctccccgcccccagctcgcctcactcctcactcggaaggcgttttctttaaattgaggtgaaattcacataacataaaactaaccatttttaggtaaacagttcagtgacatttagtatattcacagtgttgtgtaactgccacctccatctagttgcaaaacattttcatcacttcagaaggaaatcccatacccagcaagcatttagtgcccgctctcctctcccccagcccctggcaaataccagcctgctttcactctccaaggagttaccttgcctggatatttcctatccatagaatcacactatatgtgacctttgtcgcatctttcacttagcataatgtttttgaggttcatctatactgtagcatgtgttgggacttcatgccttttcatttgagcacctgtttttcaattatgttgggtacaggaatgctacctttttttttttttttttccttttgagacagggtctcactttgttgcccaggctggagtgcagtggcgctgtcatggctcactgcagcttcracctcccgggcttaagtgatcctcccacctcgacctctggagtagctgggactgcaggtgtgcacaattacacctggctaatttttcgtagagacaaggttttaccatgttgcccaggctggtctcgaactcctagactcaagtgatccactcgcctcagcctcccaaagtgctgggattataggcgtgagctctcctacctggcctggaatgcttttttcatcatcctcccccacctctcaatctgaattcttaccccagtgaggtcagagaggattcttggaggarccrgcttctaaactgggatcaccagacttccctggcctgtgtcagggcagcccccgtgcctcctccagcacatctcacctggatttgtagttgcctggtgatcgtctgcttcctcctgggccatcagttctcccatgagcagggcctgtgccccatgcccacacgaagagccagtacgcagtaacactagctagcatgcattcaacacctgttcgttggtgcactggccactgggctcctcatcctgtgtctcatctagtttataaaaccctggagggggccgggcatggtggctcacacctgtaatcccagcactttgggaggccaaggcgggtggatcacaaggtcaggagttcgagaccagcctcgccaatacagtgaaactaaaaaatacaaaaattagccgggtgtggtggcgtgcacctgtagtcccagctactcaggaggctgaggcaggagaattgcttgaacctgggagacggaggttgcagtgagccgagattgtgccactgcactccagcctgggcaacagagtgagactgtgtctcaaaaaaaaaaaaaaaaaaaaaaaccctggagagagagaggaattattatcccagctttattgatgaagaaaatgaaggcagagtgacttgcccaaggtgacacagcttcgggaggacacaaccaggagttgaactggggctaattccagagttcctgctggtaacttcttgttccgaataaaagaggggatcaggattgattaatgttctctcttgaatgtgtccctgacagggcacaggcaggatggccgatgstgacaggaaccagcggtgactctggggcccctggcagcagmtctgtctcctgaagatgaagtggcccaggtgaagcccaggccagccccaatggccagctcggagactgagatccgctgggctgagcctggcctggggaagggcccccagcggcggcgctgggcctgggccgaggacaagagggatgtggatagaagtagttcacaaagctgggaagaagagagactctttcccaatgccaccagccccgagctcctagaggacttccgcctggcccagcagcacctgccgcccctggagtgggacccacacccgcagcccgatgggcatcaggattccgagtcaggagagacttcgggagaaggtgagactgacacccctccccctacagtggtgtcctgtccccaaaacatcacacgttcttttttttttttttttttytgagacagagtcttgcttcattgccaggctggagtgcagtggcacgatctcggctcactacagcctctgcctcctgggttcaagcgattctcttgcctcagcgtcccgagtagctgggattacaggcatgcgccaccatgcccggttgtatttttttttttttyttttttagtagagacggggtttcaccatgttggccaggatggtctcwatctcttgacctcgtgatccgcccgcctcggcctcccaaagtgctgggattacaggcataagcccggccatcacacattcttccagggaggaagggagtggacgctgcttcagcattttcaattaaattctacaaagtctgtaattaaaaatttttaaagatttaaattgtatacataataccattcattgcagaacaaccggaaagtataagcacaaaattaggtaaaatttaaaattactcattgtcccactccatcccctgataaccactgttttccatatgtgtagatatgcaaatgtaatgtgaataaggaacagtattctacatgcttccttgtaacctgctttttggttaacttaatagatgtgaacattttcgtagttcatcaaatcctctcccacaagtgattcctagacttccatggatattccatggttaattggccagtctcctactgctgggcgttttagtagtttctagattttgctgttataaataatgcagtgatgaatgtcattaatatatctttgcacacttgatttgatcatatctttggtaatttgaattacttagtcccggggttatgtccatttttgactttattttttttttttagtgaggcagagtcttgctctgttgcccaggctggagtgcagtggcatgatcatggctcactgcagcctcgacctttctggctcaatcaatcctcagaactcagcctcccgaggagctgggactacaggtgcwtgccaccacacccagctaatttttgtattttttgtagagacagggtctcacagtgttgcccaggctggtctcaaactcctggcctgaagtgagcctctcaccttggcctcccaaaatgctgggattacagatgygagccgtcatgcctggacatttttaaggttttttaaaatcccaattagcaatgggaacgttggcatttcttgttttctacaatagctgtgttctggttgcatccagaccaacttagactgaattcctagctttgcttagcaagttccttctgcctgaatcttgctttttccatctataaaatgagaggaatcatatcgtggagaatagtaagagctgaatatatggtaactattgcacttagattatgagcaagatgcccctgttttagggtcctgtgactcccgcaggctggtgtggttggtagagaagcctcctctggtagtggattgtgccattactcaaagtttcacacacctgatctgctcaaagtgggcactgcccactgaggagccatttctgagctctctctccagcaggggatggtgactgagatgcactgggtcgacagggcagaggcatctcttcctggggtcacatggtaaccccctgctatgatgtaacagctgctaccttgtcctgtgcctttactatgtgccaggcacagggctgggcagggtctggccctctcttgttccctcctcaccaccctctgtcaggtaggaggaactatcctcaagtttgactatggattgccagagaggtcagcagcttgcccgtggccccagtgaggggtgwtaggagccagrattgaacccagggctccctagctccaaagcccaggccccttcacccctagtacgtgacccctagtggtggaagcaaactcacctgcatggctggggcctgggtcctaggtccagggaaccactgggtgatctttggcaacttacgtaacctccctgggcttcaagtatgctgctgtaagcaagagtaacttgctgaaggacatgttaagtggttaagagacgtagaggcatcaagggtaggggaaagagcatggaggaacagagagtgcgacaaaggtgcatctgcctgaacagagagtctatgcctggtggtacccaaactatgtctcatgaaactttggacttatccctgaggtcaacacggggtctagagcagagtgggtgctccataaacaatgactgcatggatggtggttagatgcatggatgaatggacaggtgggtgatgaatgggtgcatgggtgggtagatggatggatgttgggaggaaggatggcgggatagatgggtgggtagatggataaatatttcttgagtacccactatgtaataattacaataactatctatttcctgggggctttatataccttatcttcctctctccctccttccttccctctcttcctcactcacctcccttttctccttccttctgtttagtcaacaaatagtgtcaggtaccggcactgcaaatataatcatgaacaaaacagagagcatccttggcttcatagaacttgcagtgtagtgggcgagacaaatgtcaatgaaacaactgcacaaataaatggaaaactgctgctatgataagtgttacaaagtagagggagccagtcctatgagggcctgtaaaagggagaacttgacctagtcagggagagctaagtcttccttgaggaggcagaggttgagcgaacgcctgaaggacagataggagttaactaggccaaggaggggagagaatccctcggcagagggatgcgcacatgcgtagcccccatggtgggaggagcgttgtgtgcacatagcaggagcagggggagcttgaggggccatggagagagatggatcaggagagctaatggggccggggtggcagcgaccttaggaccatagtgaaggttctgcttttcttccacaggaagacatggatgagttttcagatgtgggatgtgggtgaggatagaggagatggttaggtggctactgactgcagttagccagatgagaggatgggacgcgagctaaggtagtggtggtagacttcagagcagtagatgagtttgcgatctttataggaggtcccattggacaggaccaagtgacagaatggattcagggggtyagagggagagagatggcaaagatgcctcccagccttctggcctgtatgcrtagaggggatggtgttgccgtctgctgagatgggagacactggagggaccatccaccgggtttgggtttgagtttgagtttgaaggacctctgagataatcagatcaggtatcagacaagcacttggctaagtctaccaccaccttgggattctttccatccccacgtgatgaggaaatggaagccagagagttgaagtgacttagggtaagttacaaggtgggtgcagagctggtatatgctaagaagtgaatggcctgtctttccagaggctgaagcagaggatgtggacagcccagcaagttcccatgagcctcttgcctggctyccccagcagggccgtcagctggacatgactgaagaggagccagatgggaccctcggaagtctggaggttgaggaggctggagagagctcctcaaggttggggtatgaggctggtctcagcttggaaggccatggaaacaccagccccatggctcttgggcatggtcaggccaggggctgggtggcttctggcgaacaagccagtggggacaaactttctgaacattccgaggtcaacccatccgttgaactcagcccggcaaggtcctggagcagtgggacagtgagcctcgaccaccctagtgacagccttgattctacctgggaaggagagaccgatggcccccagcccactgccctggcagaaaccttgccagagggccccagccaccacctcctaagcccagatggcagaactggaggcagtgttgctcgggcaacccccatggaattccaggactcctcagctcccccrgcccagagtccgcagcatgccacagatagatggagragagaaacgaccagattcttctgccctcagcccaaggaacacatctggaagcagacaaagacgtcacctaagccactcccttcccgattcattggctccatcagccccctgaatccccagcccaggccaacgcggcagggcaggccgctgcccagacagggagccactctggctggccgctcctcttctaatgcccccaagtatggccgggggcagttgaactacccactccctgatttctccaaggtagggccccgggtgagattccccaaagatgagagctaccgtccccccaagtccagaagccacaacaggaagcctcaggcccctgccaggcccctcatcttcaagtctccagctgagattgtgcaggaggtgctgttgagcagtggagaagcagccctggcaaaggacacgcctcctgcccaccctatcaccagggtaccccaagaatttcagacgcctgagcaagccactgagctggtccatcagctccaggttagtgggactcatggctgtggatgtgtcaccaaggcccctgttggcttggggtggaggctaattggggtggggaggcctggagtagaggctggctggggtggagaggcctgggatagagcctggctggggtgggaagccctaggacggaggctggtggggtggggaggcctggggtggaggctggctagggtgggaagccctgggatggaggccagtggggtggggaggcctggggtggggagccctggggtagagcctggtggggtggggaggcctggggtggaggctggctggggtaggaagccctgggatagaggctggtggggtggggaggcctggggtggaggctggctggggtaggaagccctgggatagaggctggtggggtggggaggcctggggtggaggctggctgaggtggagagccctgggatagaggctggtggggtggggaggcctggggtrgaggctggcttgggcaggaagccctggggtagaggctggctgcggtagggaggcctggggtttgggccaggaactccctgctggtggagggagggtgtacctggagccctgagatacacccaagccctttgctcaaaaagaccagtgattgtactcgtgtttcaaggatgatctgtttgcttcttttcaacttctgctataaaaaaattaaaacatatacaagagagaagatcgtagaatacactcccatgtacctaccccccgcatccacaattagcagccccgaaaacctttctcgcctgtggccttacctctcccctattcacccccactagattattttgaagcaaaatttcaggcatccaatccttttatctaaaaatgtgttagtgtgtgtatgtctaaagataaagaccttatattaaacataaccacataccatggtcacctaaatgttaacaccaggtccttaaatatgaacaaatatcacacccgcattcagatctctctgtgtctcataaatggcttattcgttcccgtccatgggcctcaggatccaaacatggcttgtatattgcatttggtgcctttcaagtctgtcctctccctttgtctttttctttctttctttcttgcatttactttttcagatctcttttactctcttagtccgtcctccttcttacttctgccgtgcaattcatttgttgcggaaatcagtctgtcctgcagagtcgtccgcagtctgggctttgctgatgtgctgtggtctcttttcatgcgtcccattgtcctctttttcttgaatattgttaggttttgagctagaggctttggtggtctggaggagaaacatgaccatttcccytccagaccatgagctccacgggcgtggggagttttggcaagagcacgtgagtgcctccttcagtaagcacaggatgcctgctgctctcttgttggtgattttgacagcctctgatggtcattgtcttgggctagtctttcatttgaggtgacaaagtggtagtatgctaatgctctcattcctgcattaattgctggaaatatgctaaaaagtaaaagtgtccctcatcaactacttggttaccaagttcttgttcctatgggaagggccagcgagatgttccgttctgtccttttactgttaccgttactgacccataatggtacttacttagttaccgacccgttttcagaaggagtcagttcctcacatccttcaaaggtgacatgcttttccttttttcctgcaatgacttgtttttataaagttctttggacttgtttaagataagtgactctgagtaggtggaacagtgattttaagtcttctatttctctgccatgggactcttgggtgattcattcaattagccattgaaaatcaggtacttcttaagcacatgcttcttaaacaccgacagtgcagcagggggaaagaaagatatgggcctcaccccacagagccaaccggtgggcagggcatttggagaaataaaacagtggcagccatctgcgacatgggttatgtatcaaggtaaaccagccagaggccctcagtctagacccgttgtcatgggggtagaagagttgtcccactgccctctcatgctccagaacttgaacgtggtgggtctgtgttgcacacaagcctgaagattgctcagctcggatcccaccattgaatgctttcctctcaggaacccagaagcccttatggaagggggtttgctatcagggtctcccagcaaggaggggttcattgtgtgcctgcgcatgtgaccgtgttgctcccgctttctgcaggaagactaccacaggctcctcaccaagtacgctgaggccgagaacaccattgaccagctacgcctcggggccaaggtaccaggccgggatggggtggaggcatgggcccaagtccccgaggaggtgacacttttccatagtcctagagaaaggccactgcctcctccatctactgaggccctggagatagtggaacgccagttttyttytaccccaaggtccctctgtgaccttgggcagtgaccttgccttccctgggcttttttttttttttttttttttgagtcagggtcttgctctgtcacctaggctggagtgcagtggcatggtcgtaacttactgcaatctcaacctcctgggctcaagggatcctcttgcttcagcctccctggtagctgggaatgcaggcagtcatcactattccctgctaattttttttttttcaatgttttgtagagacggggtcttactttgttgcccaagctggtcttgaactcctgggctcaagtgatcctcctgcctcagcctcccaaagtgctgctgggattacaggcctgagctaccatgagcccaggaatttcatgagaatctctctccttctagatgggttctggagtaagaccacctgggttcgactcctggctccattgctaaccagctgtgtgaccttaaggacgttacttgggctctgtgagcctcaaaagagtaacacagaatttctgctcagcccctggtgcttgttttttgggcctgaatcttcctggatcacacctttgcctttctccctccccaccacctcaccacagcctctcccctcccctgaacagcagtatggggcaggaggagagcagagggggaacccaccaccccagcccccaccccgtcttcggaggaggctgtgaattctgcaccttcctcttttctgagtgaggcaggaagtgggacctgtgcggcccctcgtggcttcctgcttttgctgtgccctcctcttgcctcatcaggcagcagtagaggaggatgtgggagctgaggtgcagagatgcagatgccccagtgcctccccctgtcatgctccaggaccctgcccctgccacagctgctgctctcaatgtcgagaggcacttccggggcaggtgggcggaggccactgtggtgaggaaatggaagggggcctgttctaggaccaggaccccccccccccccgctgcgtccccacacctgctgcctggcacaggcaggacccttccctcttggcctcatcgggcacatctgtaaaagaggggctaatcagacttcctcctgggagccaagcaggctccttccagctttctgaaccactgagccagatccagggttggaagagacgggggagttgggaaagggagggaaggggctttgttaggtcatcctctctggggaaaccacattcccatggctgcagactccaagtaggtccaaggagaaaggaactggtcatcagacccaaacacttgggcttccccgtttggcagattgggaaactggggctcccgttgggataggggcctctgaaggtcatggagtggcgggggctggaggcgtggagcgtctgcaccctccctcctcccttccttcctcctgcactcgtttaagggcatgagtcagtatacagaaagcatttacctggcactaggcaggcactttgtaagagttagggaatattataaaggtgtttactgccaggcctcttgtgtgccagccacagtgacaggcgggggtggacacgggggagcacagctggggtatctcctctcgtgggtgctcccttgacccagtaggactcagggtcccccccatgtgtagtcaccctgccctggccagcacccagacccctggctcatgtgtgtgagggtgtcacaggagaggccagaaatggttctgtgccagctcactcactcccgctttctggaaaaatgattgcttggcccgagggctctgctccctcccccaacccctctctcagcctcaagaagtgtgagcaccattcagggctctaccggaaggaagcaggatgatactatcatctcctgcccaaccccatctcacagctgccctgaaggaacagtacayggcaggcttgcagctcctatgtgcagaagagaacacagagccccggaacagggaggggattcactctgggtccatggggcttgaggggagctgagattccagctggccagtgcctcactccatctggacctctgtgcactctaccccraaggctggagagaccccaggatggtcttctgctcagaacccacgagttcagaggcagtcctcagaacccaccgagccatttcactctgctcagagcccacgggggagggctggacccacctgggagggagccgcgctggggatgttgcgctggacacccaggctaggcatggtgggtaggtggacagcaatggatggggacccataggaaggagattgacattcactgagcagcaacaggtatcccaccccagcttcagggtcatatttgagcccctccacacacacaccaaggcacagccaggtggaatggtttgctcaacatcccacagctggtgcaacaggcaaagctgggactgaaacctacatctccctgattccagaacaggtgtttctttcctcatgcctgggtaagccctggcactcaggccctggcactgggtgtggagacaggcatagggatgaggtggattgatgactgttwtagtaataagaatggtcataggtgatgtttatggaccactctcttaaataatttgcagttggggaagctgaggcacagagaggttaaataacttgaccaagatcattcaacaagtaggtgccagagcaggagttggaactcggcagcctagctctgaagcccacgagtgacaccacactctagcagaactagacttggtagttgcgggatctgcagctggggaggcctggcccaggaacaccgatgggtctggagccttggggttggggcaggaccagggagcccagctgtggggcagggagccaggactggtcaggagtcactggtgggctctgttctctacactggcctctggccagggtttatagtgatctcactgcatttgctgccatgttgccacctcccccccagcccctgttcctccatctcagctgaagagggatctggaagagctgaggtgaccagaaattacccaagaaggaattacggagatgatgtaaaaccacctcttttcagtgtgttctgatggctgcaagttggtctagaagcccctgggtggggatggggggagggggaggcttctgtatgcagatgagttggggaaacattttcctctctctcttcctcctcccctccctccccattcataaagcccattagcattttaaaggctgagagaaatccatctgtgcagagaatattcatttgtttaacccaatgtttcccaaattcactagtcctcccttcacagaatcctgattcacctttcacagaatcccccragggagtgaatccagccttggggagcacccgggacaccctggctgtgtccagagagaccagccctgggagggcctggccggagcagctgcagctgccacccccacccccaccgccactccccacctcatcgctctgcctggrcatctgctcaggttttgggcttctctgcttcaaactccttatcggtccctgaaacaaaagggcttcctggcttccctggcccatccccattccctgtcactccctaggtggggcctgaggctgagagaggggtctggggagggaaacatgtcagagggctgggcctcccctgggatttgggtcacctcaggagaggggtgctgataggaaaggcccccacaggggagtctgagcagatggctgaggggattattaaaatccagctttgttctcatctggggaggctgggcctgaaagagggggaggcggcggggaccatgccacacttggagttgatttttcggctacagccgggacctatacagcttaagcaagagagcctgcttgcctgggggccagggagccccttccaccaggcccaccctaaactgctcattcctgaccttggtgcagtgggggcagttaagataaccccccaacatcatgatgagcaaatcccactaaggggtgttgcttttccacgggcctgtctccatggtggctgtgcagataatgatggtgatgacgataacggtgatggtgataatggtgatggttacgatgatgacggtgatggttatgatgatgacggtaatggtaaaaatggtgatgatggtggtggtaatagtgatggtgttggtgataatggtgatagtgatggtgatggtaatgatggtgaatgatggtgatggtaatagtgattgttatggtgctgacggtgatgatggtggtggtaatgacagtggtggtgatgatgctgatggtgatgatgctgatggtgatgctaatgatggtagtggtgatgacggtggtggtgaagataatggtgatgaatgtcagggtggtggccactatttattgagcacttattttgtgcgcagagaggttattaaaccaactaggactcagaggtgtgctgtggtagagcctagacaggaacctgggctctagctgcagagcccacatgctaagccagagttggcaaactttctctgtaaagggccagattgtgacaatgtttggctttgtggagcatatagtctctgtcacaactactcaactctgccaccagagtgtgaaagcagccatagacaacacataaacaaacaggcatggctgtgttcaataaaaccttctttacaaaaacagaacatagttctctcaactctgctttaagctgttgaacagcctgtggtttccctctgctttccagcttcaagaggccttccttggtcacctgcctgactccagactgctccctcaccaactgggctggctgccatgttaaatccatcctcaaatgatagagatccgctaccaatggcagattagtttgtttacttgctggttcactcattcattcgaatagctattagttgctattattatcagtataataattattagaaatgcttatatttgttaagaaataattrtatgttatatggtatattaattatgatataattataacacacattattaataaaaaattackgttaataggagaaccataggtgttggggtcagatagagcagtgttgtgatcctcatccaaggacttatcagctggggattttgagtaactgacttaataacctctctgtgtctcagttttttcttctatataatgggctgttggggtccccacmctgtcttcctttcaggactgccattaagagtaaatgaaaaggcatgcagttcttcacctgtgtttggcctagccaagggctgcactgaaagatggtatttattactacagggcatgtgtgttgagctcctgaatgaagatgaggcgtttcaggtgggtttgcccctaccctgacttggctgtgctgtgcctccctgcttccacaggtgaacctgttctctgacccaccccagcccaaccacagcatccacacrggaatggtgccccaggggaccaaggtcttgtccttcaccatcccacagcccygctctgcagagtggtggccgggcccggccgaggacccccaggcctctgcggcctcaggtgagtccgggagaagagctgcagctggaggctccttctgcctgggattctgctctgtgggactgacttggttcaccctggggatggcgctggcctcaggccaggggaaggagggaggcaaggccccaccctgggcactttgactcaaaagggtcagagatgtggaaagtgtcctgctttgatccacagcagcctgggggcagccctggccctgccacttggcatcttggtgaccctgggtgagttgaaaacatagagcattgtccctggggagcccatatctcagccaggccctgtgctaagccttgacacatgtgacctcacttaatccccacaataacccgctgaggtgtgcactgttgtcacacccatgacagccaaggggaccaattggagaggtgaggacacgctgaagttcatacagctatggaggggaagtgtctggattggaactcacgtctccctgtgtgagagcccacgctgttgactgggaacccagaggcctagcgtagctctgctccagccaaccatgtggcctggggcagatctggaccttgttctcccttgtaaatgggggacaatgttctacccagcccacttcctggggctgatgtgaagatcgcacatggtgactgagctataacttgatgatggaggtggtggctttgacgttcagcctcagtccttcagctcctggaaggactgttcttggccccagctttcagcagttgtgtattccagggtggccatcagctcgaggagacttgagcccctcctcgcttaccagcatgcccaccstggggtggcttccggagaaccgggacatctctgaggaccagtcctcagcagagcagacccaggcactggcttctcaggccagccagttcctggccaaggtgagtggactcccagctttgcccccgagagacttaactcacctggagaacacagaacctctgcctgcttgggtgagaggcactctgggagtctcacttgtcattcccctgcctctgcaccgagttaactcagccatccccaaaacatgagcccctccctggttttagaggccacacagctccagcctcctccttgtcaccagtgctaggtctcacccccctttttggcawtgcatctcatccaaatccctccacttgtgcttggaagtgtctctaggctggctcccgggaaactctgagctctttcaggattctggaagggtaacagaatctccactctaccttttcctcttcaggataagttgcctcactttcttagttcattttattaaataaatcaattcctagttacttctcaagggtcttcgtatcttcatsaaacagtccaagtaaccgtgaattgtttgcaggtctgtttataactgtacattggctttattccagaagtggtttaaagcaccttatgaaaatacatacgttttagccacattctgaaaacagaagtgagaaaactggggcagagaggaagtaagggtagaaaaaaataaaatacgtggagtgagtaaataaaatgttctgttggaccctaagcacattagagtcacacatttagctttgagcttcctagttgccaatgccaaaagagaaatgcaatagttacatgcactaccatgcycataaaacaaattctttcagaagcaccaccattttattcttcccttcccttccctcctctcctctcctctcccttcccctctcctcttctcttctctcctcccctcccctcctctcctcttccctcccctcccatctctccttctttcccttgctttactgaaatataattcacataccatgcggttgactcatttaaagtgtttgcttgcttcagcggtttttagtatatttgcagttctgccactatcaccacagtcagttttagaacattttcatcacgcactaagaaacctcatctgtattaggcagtcactccccatcccctctttccccagcctccgtcggctgctcttctgcttcctgtctttataggcttgcctattgtggatgtctcatagcaatagattcacgcaatatttgtcctgtgtctgacatctgtcacttaccatgatgttttcaaagttaatccttgttggagtagcacatacaagtacttcatttcttttcttcttttttttttttttttgagacagagtctcactctgttgcccaggctggagtgcagtggtgcagtcttggctcactgcaacctccgcttcccgggttcaagcaattctcctgcctcaagcctccctagaagctgagattacaggcacgcgccaccatgcctggctaatttttgtatttttagtagagatggggtttcaccatgttggccaggctggtcttgagctcctgacctcaggtgatatgcctgcctcggcctcccaaagtgctgggattacaggcttcgtttccttttgccaccaccattcttggttccgtagccggagacacatttcttcttcgtcctatatgttgtccacaaaataaagcaatgtcaaatcatcacactgagcaggagctggggccttagctgacccctcatgtctagtgctgcacggtccaattcagaagctgctggccacatgtgactgttgagtacttgacatgggctgctctgaattgagacgtgctgtgggtatgaaacacatgccagatttcagagacttagaaatataaagtgtctccctatttttttagtattgattacatgttgaaatgatatttggggctaaataaaatataaaaattaattttacctgtttctttttacattctcaatgtggctatgagaaaattatagatggtgtagctcacattatagttctattttatatattataaaattatgtaatatgattatataatatacatttctatatttcacactgatctagagctttcttaaaaccgaaccttacatcatcccttgcctttttttgtaattaaacttttttgagcaggtaatagatgcccatgataaggacctttgcacagtacagagggcatattgagcaaaaactaaatctttcctccaacccatgcaaaaatgttcaatgcacacacttgcatttatagaaatggctgcataagctactgtaccttgactttttgaagtcttaaatttgaatatttatttttgggtaggcaacgaattcacattgttcagatttcaaaggatgcraaggacatgtagtagaaaaatctacttctcattcctgtcttccagccacccagttctccttcccagaagcaattcatattttagtttcttgaattcctctagagatagtatatcgtatataagcaatgtatttatcgttttcctttttactctccacatattctatacagatggtagcataccgtaaacattgccctgtaccttgatttgacactgaaaaataggtcttggaggcattaatagctcagaacatacacgtgtgccttcctcttgttgatggctgaatactattccaccgacaggcatttaggcaatttcttgtcccctccctactgttcatgctgcagtaaatatcctgactcattagtcttgatgcacatgagtgacttgctttgttgtcagtaaattcctgcaggtttcacttcaatttttctcaaggctaccatgcctggggctggtggtagaagctgttcccagcacccacstctccatgcttggcagaaaccccacatcctgaggacggacccagctcctcttaccaaggcatagatgtggctgggtgtgggagtctacaggactggattaatggagcatatttccttcccctcccaatgtccaggtggagtcctttgaaagactgatacaggcaggacgtctcatgccccaggaccaagtcaaggtactgcccaattcaggagccacccatggaactgccagacaaccactgtctcccatgactctgtctctgaagccttctttgctgcaagacagaaaagagaatcccagacacagggtctcttttagagcaaacagttcctgagtagcttcccatgataacgatcattatttcacaatagttacccattattaagcaaggatggttgtgtacagggactgtggtaaaccctagagtatgttattttatttggtcatcatcaaaacccagtgaagcagttacatttatcaccctcatttaaccaggatggaactgaagctcagaggggtgactcaaaggccccacagctagtaggcaggagaacctggagccaggtctgtctctctttcaaatccagggtcataatcactgccctgcactactttccacaaattatcctgcctctcagcaagcagaaaaaggccttttcttttttatcgcctttaaacaaaattacaaaatagttgccaaaagtttggaaaccctgttaaaaaaartgggggctggaggggagaccctttatagagtcctattggtgtatatcctttggaatttggagttttagataacggtggtcataaatacaatttagattcctgctgcatcagccagggtcccattaagggacaggtggggctctcaagtctgggagtgtaggcgtcaaaggagagaactgtcagcaaaggtgtgggcagcatcaggggacccaacaaagactgaggaatccccrggtagtagcattagccgggagctgtgcccactctcaagtctctctcttcccaccctgtgatctctcataggtccctcccactagacagacccaaccagaagccagcaggtagacagccctgatgctcaaagcacagagcagggtgggagaggagctgagagaaggtctggagaggcaaattcaaaacacctagtttctaaaaaaatgttatggcaggatatttcctgtgtggttacatagatgtcatgtacattttccaatcacaaaatgtgtcatatgtatcatgtaatatcatccagtggatgaccaaggaccttataaactaaaaccattcatttttttgctctctgttctaatccccccatatacagggaagttgagagctgtcagaagattagatgtgaccagggaatgggttttaggttgtgcttggcttctgtctctcctcagagttgagtgggatgtggatggtagtaagacagtgataccaaccccaattcctgcagctttagccatgtattacctgtgatcctcctatgggagcctagcagaattgctaggaccatgagctctggggccagagggcctgggcccacatcctgtctctacaactcactcactccatgaccttcatcaacttaagtgacctccctgtgcctcagtttcatcctttttaaatgaagatgataaatcacccctctcattatgattatattgaagattaaataaatgcaaagtgctttagcccagagcctcaatgctcagtaaacattctcaataatgtgatggtgatgataacattatcggtgtcgatagtctataaggatttggggaaagrgtggctaattttctgaagcccacagttttgcaaatcaagaatgaggatccagagtctctcatgtaaagggtccttatggagataatagtgagagtgtatttgacactgtgacagctatgacagtttgtggtacattggggtccttgtaagtctatgcaggaagggctggtgccctctggagctggtgccaagtctctgagttgtgtctctgttgtgccagcctgatggcagagagcttgaccacggcagctctccagggcaggcagcctccagagatctcaacctcagcctgtatcttgcatgaacccaggggcccaggtgcatcccatggcctcccgcaagctgtctcatccactgtgtcttcagggacaggccccgcggggactgagcactcaagtcttcctggcctggtctggtttcagggcttccagcggctgaaggctgcccacgcggccctagaggaggagtacctgaaggcttgtcgggagcaacaccctgcccagcygcttgccggctccaaggggacgcctggaagatttgatcctcgcaggtacctgctggggtggaaggcctggaaggacagatgggatgggcccctggggtccctcagtctccaggagggaggcactttgtccttataatttgtacacgggkaatagagagaaatcttatcctaattagtatacatatccaaatggtggcacgatcaaaagctgwgatttgagtccctttggacccacgtgctgagaagatgccttgaaacccttattggatgatggggaaactgaggctagatgggggtgggatttctctaatgtcccacagcctgtggatggcagaggggacttgggctgagacctcctgattcccaatggaaccttctttcatcttgcttattttgagttctcaccatcatctaaaggcygatattaaatggaccctaagggggcatcccctggagtctctgctctgatactctgttcctggacctgcctgatgtagctgccatcttgggctcctggtggtaatgtttctgcattccagggagctggaggcagagatataccgtctgggaagctgcctggaagagctgaaggaacacatagaccagacccagcaagagcctgagccgcccgggtcagactcagctctggacagcaccccagccctgccctgcctycatcagccaaygcacctgcctgctccttctggacaagcccccatgccagccatcaagacctcctgccctgaggtacctcttggctcaaccatattgggctgttccctcgtgcattcatttcttcgttaattcatttcttcaatacgtattacatatttatgaagtgtgtgccatatgccagtgtgtgccaaatatgtaaatattacatatttatgaagtgtgtgccatgtaccatgacacatggtagggattcagtgggatgggaggtggcagggaaggtggcgtctaccttcacagagttttctktagagttgaactggttacagtgatttagttataattttggtcagtgcactgaaggagaattatggggttctgtgagagtagcaggagtaacatgactgagtttgaggaggaggtcagagaagctttccctgaagaagtcatgtttaaatgagacctgagactaagtaggaattactagagacagaaagagaaaacccatccagcagggaaaacagcttgtgcaaaggccctgtggctagagtatgggaagagaaargaaaaatagtctgagatgtggctggagaggcaggcaggggccccatgatgtaggggcttgtgggtcaygtagagagcatggccttaaactctgctggattttctggcaggggatgacataagatgacttgtgggtaggccagtctgaggctggggaggtggcagggcaaatggagaagcatgtgtggacttaagagaggttgggaaggtatgtttgagtggacttggagtggccgtgagagggaggaagggagacacggatggctccaggtttctagcttgtagtactgcatggataatggggtgaaacctagacaagagccctacacaaaaggggctttgtagaaggctgtctggcccacaccacaaccccttgagagacaatcactatctccgttttgcaggcgagcaaattgagtgtagtgcgttcacacagatgacagtagtggggtctctatgcctcccaactcctgttgcctgtgctgcaaagacttgtctgttgaggatgggagcaggaaagagagcctggcatgctgggtagggtgggacactggtaggacatccctgacagctgaggtcatgctggccctatggtttggggaaaatcttgtgctgtgctctggcctagagggtaggaaaactctaccaggtgccactacacrcttgaatggggagaaaacctgagtacaatatcttaagggaccctcatgctcctgcagttgaargtattgcagggggctggggtggccatgctggaatggatgggggtcaggagagttractctggcaggaaatctaggtttaaatctcaactctgctccttgtttctgttgactttgggcaaatcatttgagcgtgagttacctgtctataaaatggkttgtaataatcgtaggtactggtgggattgttgtgacatggtatctgtatggtgcctggcacacagcaggtgctcaattcatggcagccagtatcgaagaccacacagcccagtctccatagtttacacatacataaaagggtggtgggcttagtgagtctaatgtgcttcttaccccgcagcccacagctcgagcctggcaggaggtaagtgcttaaaagtggtgtttaactatctgctgaatctctgtctgtccatctttctgaccccagcctgctaccaccactgccgccgccagcactggcccctgcccattgcacgtaaatgtggaggtgagctctggcaacagtgaggtggaggacaggccacaggaccccctggcccgactcaggcacaaggagctgcagatggarcaagtttaccatggcctcatggagcggtgagtgccacctggacctgaccagggtgtctggccagcagctggatcttggctgtcccccactgggcagaggtcatgcccctctgtgtgttcttctgcaggtacctcagtgtgaagtctctcccagaagccatgagaatggaggaggaggaagaaggagaggaggaggaggaggaagaggggggaggtgactccctggaagttgatggggtggctgcaactccagggaaagcagaggccaccagggtcctcccaaggcagtgcccggtgcaggctgagaaaagtcatggggctcccctggagtaagtcactgagcctttcctgcagaatgtttgkttccaccctaaaaccacagggatgatcactgtcagagtgaataagacagcgcttcacagtttagacatggcytacctgtcctgcctcttcaagtgtggaatgtataccactgatagcccttgaaatgattttgggtagtgtgggacatgattttcagtaggacacatgcagtattaaagaacattattctcagctgggcacagtggctcatgcctgtaatcccagcattgagggaggccaaggcaggtggatcacttgagtccaggagttcaagactagcctgagcaaaacggcaaagccccatctcaacaagaaatacaaaaattagccaggcatggtggtacacgcctatagccctagctatttgggaggctgaagcaggtgaatctcttgagcccaggaggcggaggttgcagtgagctgagatcgggccactgcactccagcctgggtgatagtgtgagaccctgtctcaaaaaaaaaaaaagaaaaaagaatatcattctctttttctgtctctgaccttctaatgatgccaaggagaaagtctcagttagtgctgtggtgtcttttttatttttctttttttgtactttaagttttagggtacacgtgcacaacgtgcaggtttgttacatatgtatacatgtgccatgttggtgtgctgcacccattaactcgtcatttaacattaggtatatctcctaatgctatccctccccccaccccacaacagcccccggtgtgtgatgttccccttcctgtgtccatttgttttcattgttcaattsccacctatgagtaagaacatgcggtgtttggttttttgtccttgtgatagtttactgagagctgtggtgtctttaatgcctctcttgaacttctgtggaaaaagagagagagagacagtatgagagcacacaaggcctagagcatttagcaggcaagtggatctatctagtatatgataatattcaggtttcttatatttatcctcaaagttagtttctgtttgtcacatgacacactgatcttctgttttgaatagtgatctaaaatctttggagtagatggaagtttatggaaatgactgaaatagggaaggtggtatgcaaactccttaagtctgggaaatgctgctttaacatttcctctttggtgttgggtgggttttgttggcatccatattttatagttgagaaaagtgaggttgagagaggggaagtgccttgccctaggtcacacagctagaaggtggcagaaccaggctgggcagccagggatgtctgactccagagcttgtgccctgggctgcttggctcccaggacaggccaacccctgcgtcagggctgcctggcagaactcaaggatggtcttctcttcccatgccagggaggccacggagaagatggtatctatgaagccaccaggtttccaggcatccctggctagagacgggcacatgtcaggcctgggcaaggctgaggcagcccctccaggccctggygtgccaccccaccctccaggcaccaagtccgcagcatcccaccaaagtagtatgaccagcctggagggaagcggcatctctgagcgccttccacagaagcctttgcaccgaggcggtgggccccacctggaggtaagtctccacatgggggaatgggcccagaacctcagggtcattcctgggtcttctcaactttctgcttctgggtctttccttgtgctattccttcttggaatacttgctgctcctgtccctgccagccacaatcccacctgacatgcaggacttatgctcagtgtcaccccccaaacctgtccctcttccggagctcttgttcctcctctgagagcttgcaacccattgcttatacttctctgagcctgcccatcacagctggagagactagttctatgctctttagagtagacatcactgctgcaaagtcacaggccactatggaaatgtgactgtcatagaataatgcatatatatgcatgcatgtgcacttatgcacaaacacacacacacacacacacttctgtagtcctaacgagcccatggtcaggattctctgcactagacatgaactcagcgagggcaggcacctgtgttgctctgtttgtgttctctgtgccgtgtgttaaacccagcgggtaggacctgtacatatttgatggtctcgtttttccaatgccttgggcctgagcatttccactgtcagataagaccatagtattccaggcctaagccaggagacactggaaataaggctttctccctctccccttgctagtccttgtccatggccttgtctctcccaagggctctggctgccacccctcagggaggcagcacttgctgagggtcctcctggggtgcagagtccctgctggtagccagattcttgtgctgaggcctgagagcctgagagccctcactcctgggcctggctgttgggagctgggccagcaaccctggggtgtgagcctctgggaggtgaggccaggccacgatttgggaagggcttcccagtgtgccytggacacattcctcagacataaagggatactgcctctttcaggagacctggatggcrtccccagagacagacagtggctttgtgggctcagaaacaagcagagtttcacccctcacccagactccagagcaccggctctcccacatcaggtatcccgggatcccgccattgtcccrtcagtgccacattcctgggacagcctgggaatcacagtgcctgtgatggcccagaataagagaggatggtctgtccattcgtaggscctcatttcatcccctaaccgtgatttcttgttcctgtgttatggacagaggaaacagagcttcagagaggggagtaactagtccagcctcacatagctaattagcgacagactgggaaattcatttttgttgagcaaatgaatggatgaatgaataaaaactacagggagggcactgtgaggtgaacagaagacaagggcaaagggcactcagggtggctacatggaacccaaagggaagggagaaggcggaggggacaggggtgaagagtggagggatggagcctccaaagctgggtgcaggcccttcaggaggcccacatggcaacccaagggtgcatgcaaaggaaggattagaaatcctatttctcttttatgtattctacacataaactgagctttattattttgcatattgggttggccagtgaacagtttacaaagaattgggcatctaatgtgtgtgtgtccttggaaatattgtaccacccgagatgcaaagttacaaagggtgggagcttattgggttagcatgtggaggggctcagatgctgccgcctgagtgtctcactctgtgtgacccctgtgtgtcccttcctccacggtcccccagcacagcaggaacattagcccagccctttgctgcatctgtgcccagggatggagcttcctaccccaaggccaggggttctctgattcccagaagagccacagagcccagcacaccccggagccaagcacagaggtacctctccagcccaagtgggcctctccggcagagggcacccaacttcagcctggagcggacactggcagccgagatgggtgagtgcaggagtctgacttggacagaactgcatgggttgaaaaatcaaatagaaaaacttgcagaaccctttaggatatgacatattagccaggttcattgtactgaaatttgaaattacagataaygtggacaaaagggaacaaaagaaaaaaaaatactctggaaaccatcagtgctgacgttttggtgtagaacctgtgagctgttctctgtgccgatataaatgtgtgtttgtttacacatactgtcatgcactgcatagcaacgttttgttcaacgacagacagcgtgcacggcggtggtcccataagattttcatggagctgaaaattcctttggttgcgatgttgcagtcattgcagagcaacacttcactcacatgtttgtggtgatgctggtggaaacaaacctactgcgctgccggtcacatgaaagtacagtcccagccgggtgcagcggctcgtgcctgtaatcccagcactttgggaggccgaggcgggtggatcacctgaggtcaggagttcgagacgagcctggccaacgtggtgaaaccccgtctctactaaaaatacaaaaaattagccaggcatggtggcaggtgcctgtaatcctagctacttgggaggctgaggcaggagaattgcttgaacccgggaggtggaagttgcagtgagctgcaatcgtgccattgcactccagcctgggtgacagagcaagactctgtatcaaaaaaaaaaaaaaaagtacagtacaggccgggcatggtggctcatgcctgtaatctcagcactttgggaggccaaggtgggaggatcacttaaggccaggatcacctgtggccaacatgacaaaaccccatctctattaaaaatacaaaaattagccaggtgtggtggcttacgactgtaatcccagctactcaggaggctgaggcatgagaattgcttgaacccaggaggcggaggcagaggtttcagtgagccaagatcgcaccactgcacaccagcctgggtgacagagcaagactctgtctcaaaaaaaaaaaaaaaaagtaccgtatagcacctacgattatgtacagtacctaatacttgataactaatgactctgttactggtttatgtatttactatactttttatcattattttagagtgtatttcttctacttattttaaaaatgttaactattttttttttttttttttgagacagagtctcgctctttcacccaggccagactgcagtggcacaatctcggctcactgcaagctctgcctcccaggttcacgccattctcctgcctcagcctcccaagtagctgggactacaggcgcccaccaccatgcctggctaattttttgtatttttagtagagacggggtttcaccgtgttagccaagatggtctcgatctcctgacctcgtgatccgccctcctcagcctcccaaagtgctgggattacaggcgtgagccaccgcgcccagcctaaaaatgttaactattaaatagcctcaggtagtccttcgagaggtattccagaagaaggtgttgttatcacagatgacagtgctattattgccccagaagaacaagatgtggcggtagaagacagggatattgatgaccctgaccctatacaggcctaggctaatgtgtgtgtgtgtctgtgatgtgtgtgtgtttgtcttagtttctaacagaaaagtttttaaagttttttaaaaaaaagttaaaaatagaaaaaagcttataaggatatcaagaaagaaaatattttttactttacaatgtatttttaagttaaatgttattacaaaagagtcaaaaggttaaaaaccatttaaaaagcttataaagtaaaaatgttactgtaagttaaacttgattaattattgaagaaaaaacttttgtataaatgttgtaaatttagcctaagtgtatggtgtttataaagtctacagcagtgtacagtaatgtcctaggccttcacattcactcaccactcactcactgactcacccagagcaacttccagtcctgcgagctccattcatggtaaggaccctttacaggtgtaccatttttaaaatcttttataccatatttttatggtctgttttctatgtttagatacacaaatacttaccattgtgttacagatacctacagtattcagcaggcaatgttgtagaggtttgtagcctacaataatgggctattccatctacctcacatatgtaataggtgtgggtaatctatgatgtttgtgacatggtgaaacagaataacaatgtgtttctgggagcttatacccaatattaagtgatgcgtgactatacttaaaacagaaatgaggctgggcacggtggctcacgcctgtaatcctaacactttgggaggctgaggcgggtggatcacctgaggtcagaagctcaagaccagcctggccaacatggcaaaaccccatctccactaaaaatacaaaaattagccagacgtggtggctggcacctaaaatcccagctactcaggaggctgaggcaggagaatggcttaaacccgggggcggaggttgcagtgagctgagattgcgccacttcacttcagcctgggcgaaagagcaaaactccatctcaaaaaacataaaaaaaaaaaacaaaaaataagatcattttatatgtgaatatttggcgacctccttttttcactaaattgtactataaacactttccatgtctatgaaatctatatgtgattcagtttttgacctttagaaatacacatgaattatttattgaaattaaaaaccaccaaaaagaacttaaattgatgagtttttacaaggtgaacagacaccaagaaactcagtatgatctgaaccccagaacctcactgaagtcccatttagtcactacctgcttcccaaacataaccactgttctgacttctgacacctcagattagctttgcctaaaaggttcatctttttttttttttgagatggagtctcgctctgttgtccaggctggagtgcaatggkgcactctctgctcactgcaacatccacctcccgggttcaagagattctcctgcctcagcctcctgagaagctgggattataggcacgcgccaccacgcctggctaatttttgtatttttagtggatatggggtttcaccatgttggtcaggctggtctcgaactcctgaccttgtgacccgcccgcctcggcctcccaaagtgctgggattaccggcatgagccaccacgcccagctggttcattattttaaaaacgtttttaattaaactttttttttttgagatggagtctcactctgtcccccaggctggtatgtagtggtacgatctcagctcactgcaacctccaccactcaggttcaagtgattctccagcctcagcctcgckagtagctgggactacaggtatgcaccactgcgtccagctaatttttgtatttttagtagaaatgggtttcaccatgttggccaggctagtctcaaactcctgacctcaagtgatccgcccgcctcagcctcccaaagtgctgggattataggtgtgagccgccacgcccggcctttaattaaactttttatttggagataattgtagattcacatgcagttataagaaataatacacagagatcccatgtgcctttactcagttttccccagtgagactatcttgcaaaactgtagtacaatgtcacagccagatgttgacattgatgcagtcaagatacagaacgttccatcaccacaaggagcctcatgctaccctttcataggcacacccacttccctcctgcccccagcctgtccttaacccctggtaagcactaatctgttctccatttctataattttatcatttcaagaatgttctataaatagaatcatatactatgtaaccttttgggaytggcttttcactcagcataattctctggagatttatctagattattctgtgtattaatagttagctcctttatatattgctgagtagtattccaagggtttcattgcttttattttttatttatttctttattgtttttgagacagggtcttgctctgtcacccaggctgcagtgcagtgtcgccattatggctcactgcagccttgtcctccctggccyaagcgatcctcctgcttcagcctcccaagtagctgggaccaaaggggcatacttccacatccagctaatttttttatatatataatttttttttttttttgcaaagatggggtctttctatattacctaggctagactcaaacttctgggcgcaagcaatcctcccgtctcagcctcccagagtgctgggattacaggcgtgagccaccatgtctggccagttcattgcttttaatgcaggggmcggattagtggtttttaacctttggtcacccatccctttgggagattcgttaaaagttattaatgctctccccagaaacatgcatacgtggaaagaggtgactataatttcagaggaggctctgaagccagccccacaaaaacatggtgagaaggtgatcaagtcttgaggaacccaagtgaagaagtgattaattctttgcaggggaagttcctgaagactcggatggtgtcatggtgggtgggaggaggggttctggttagaaacagcggggcaggcccagctcagcaccccacactcccagcaaaatctagatcttctggtttggaggtcagtgtgggtcawtggcctcatcaggaacttcctttgtgaccttgaactaggcaccrtctcttcacttcccccatcattccacctgcacaagtgtgagcttggaagttctctctgcttaaactcactttgggttctctctctgcctccctagcggttcctggctcagagtttgaggggcacaaacggatttctgaacagccccttcccaacaagacaatcagcccacccccagcccccgcccctgcygctgcgcctctaccctgtggaccaacrgagaccatccccagcttcctgctcaccagggcagggcgagagtaagttagacacttggatcctggggattcaagctcatcatacagacgggagcgtgatgcgacgtgttagcaggtggaggtggagacctgcccagctcacacagatggtggtggtaggagcagacggacccaggtgtcctgcctcccagttcccagcgtttctgtgggacctcattgatctagacatcgaggacacacttctccagccagtggaatatgacctaaagattcacctttctggtgctgacacttmtsccctctctctccatcatctcttttccgagaaaagcctgtcctttctagggctatcttttctgcaatttgmccattgattgtatggaccaagaagctactgccttctgagtttttcttttctttttttggttcgtgtgcattttttctactaagaaagttccacttccttggttgaacagaaatggtaaaatcgcttggtcagttctctcacacctcctcttagttgcttttggccagtgatcacttacacrcccttgctggagtgggtgtctgtcccgggatgcgctggggagactgctcggtggtggcccagccaaggtttctttggctcgaacaggcatgaggctgtcatgttgcctacgtgcaaagttgtgtccagctgctggtgtttggcttccttgtctgagtttagtaagtctacccctgcagcctcccctgacatcagtggaggaattagaggcttgtttgtctagggtatgccaggccttgggaatacaatagtggacaagactctatcctaggcctcttaaagcttaccatcttgtaggatgaacagacaaagaaacaggcagtagtgccctccattgtgataaataccatgatggcagaggactaaaggactgtgggagcacagcgaaggagcatctggtccggttagaggcttcagggagggcttcctggaggaagtggtatctcagcagacatcagaaggaagagagatagaagagtatcttcagtggagggaatggcatgtgcaaagtcctaaaggtgagagagtgcccatcaccttggaggagctaaacggtcagccagatcctctagtgtgagggggtggagtgttgagcagtaaaggaagagaggggtagagaggagagacctatgggagatcctacaggrcctgaaggccatgggtaaggggagacattcactgcrtattccatgagtgcacaaaggctgagaggacagggaaggggattttaagcagggacgtagcgtaggcaggtttatgttttagagttctctggccaccggcagggtgagaacggagaccaagagactgctgagaaggctgccacatccaggagagagatgatggggactgggttctcggggagggcccctacagaggggaagaagggattcatttgggaagaggtattttggaagttgggcccaygagacttggtaactaattaacttcagggatgttcagggaaggaggggatctagagtgactcagagttctgtctggctagtcaggtagatgctgctgccatgtgcagagacagggragtaagtttgcagagaaagatgaatgttaagtgcctgctggcactcagtaagaaactaaagagttacatcagagagactgagatacccaagtggctgactcacgcccccggcctggtaagtctttttttttagtgccttctgactaggaggcggagctctccatttcaggagttaactgggggtggggagatgtcactctccagtagccaccgcccacacttgccctcgtggctttgcctcagaaacaccagcaagcgtctccctggggattaccaagggaacccactgccctcagacacacacactcagcgctggggcacagccaggaagaggcctccactccttctgacacagtcatctgagcgctcatgtctgctggaggcggcaccaggggatactcacccaggagtccaggggccaccaggcaagaacggccccagtgggaattcccaccccagaagccagaccaagtagatgtggagcctgcatccgcctggagggtggctttgctgagcctggctctaacgctgctccgtggttgagggggtcttgtggggaggggtatctgggtaggattgtctgctgcggtgtcagcaatgcccacaaaacaagaccctgaagatgcagggactgattggagagaaacacagacaggatttactccctcagtgctggtggctggaggttggaccatgttgggggtttcaccaggatttactatagtcttgcagacagcttccagcctgctcttagtcagccctcccggttcaggtggtgctaggaagcatcgaggtgtctccctgtcygctctccactcacagcgctttattctgctccgtctcagagcccagatccactgcagtactgtttcctgagcatccacaaggtgcagggcctcaggggttataagacaggaagcccgcttctttcttgtctgctggcggctcactgtctgtgtggggagatggtggacaagcatcttctgccaggtctggagagatgggcttgcacagtggtagggagaggagctgggcctggacagagagtgaaggttggtattttatggcagaactgtagctagggccctctctatgctgcatccttgtctccatctcgagaatttgtcactggtgttcctgaacagccactcagaccccatgtgttaggaagagaaaacttcaaagaaaagttctgttttgttcactgcacagggacatgaactcagaaaggtgtcaagttgtgtagcaagaaaagtgtcgcacaggaaagttctagaatcgtttgacagcagagatagaccctgtgcctgctgtgaagggacaaaggctgccgcatcctggcatactcgggtggctgcagctctgttcctcatgcctctgttctttgtttctgtctccactccaaccccagycaggccatctgtgagctgcaagaagaggtgtcccggcttcgtctgcggctggaagacagcctgcaccrgccactccagggcagcccgrcacrcccagcatctgcctttgaccgccccgcccggacccgcggccrgccagcagactccccagccacctggggctcccattatggcaggtgggtgacctcaaaactcccacctctgtcctggtggcagctacagaagatagtcttggctggcctctggctctccccagacatatggactcaggcactgccacatccctctctcactcattcattcattcactgttgagcttgttcactgtgcagtatttgatgcacaaaagaatatataaacctctatgttaataataaagaataggccgggcgcagtggctcatgcctgtaatccagcactttgggaggccgaggcgggmagatgacgagttcaggagttcgaaaccagcctgaccaacatggtgaaaccctgtctctactaaaaacacaaaaattagctgggcgtggtggtgtgcgcctgtaatcccagctactcaggaggctgaggcaggagaattgcttgaacccaggaggcggaggttgcagtgagctgagattgtgccactgcactccagcctgggcaacagagagaggctctgtctcaaaataataataataataataaagaataatacaatgaatatccctagacccaccacccaaccaaagagttagaacattgccagsatgccttcactctcacccattaattcggtgtttrttcatttatgacaatgacataaaatcagctggcttcttttgagtctatgggagggcacttgatgaagggttttatgaacattttctcattaatctttttataaccctctgaggtaattgctgttaktatccccacttgacagatgaggaaactgaggatcagagaggcgcagagccattttctgtgaaactgacttcagagtctggctttgacttctatactctcttccttccatcgtgttagaagcatttctccaggttgaacttctcacaaataacctttaaaggccacacaaaacctcatccaatgacatcatcwctctttccttttgctagtaaatccacagagagattgcctggtgagcctagaggtgaagagcagattgtccctccaggaaggcagcgagccaggtcttcctcagtgcctcgrgaggtgctccgactgtccctgagtaagtgaccacctgcaaaggctgatttccagaggccacagtctgagcatgttggctcagtggtcagggaccacagcaacagtattcaaggaaacttggagaagggtttttgtgcatctgttttaggatattatagtgctgtgaagcacagagcacttctaaagtcctgcacacctactgcgtgtagggtgtctgtaagggctttgtagctgctgtcttgcttaacctccactgcaagatggtcatattatccacatttcacagataagggcgctgaagcccartgagcgcaggggatgtgctaaaggatcagggctctggagtcagtagccgggatcagcgagctcccctccacttgtccttggccgagttgtttacctgctctgagcagttaaagggacagctcaccatgtagttataacagtgtccacatcgtgggattgctgtgaaggtgcccaacacggcacacacasagcrtctagactagcgcttggcacgggggcagggttctggaaatgccagctgttactcctaagggggagactggggattaaaacccaggcatccaccccagagcctaaactcatggcatacccactccttgagaaatgtgacccccaccccttgccccctctgatgccccactttttctaccccaggttcagaatctgagctgccctccctaccactgttctctgagaagagcaagaccaccaaggacagtccacaggcagctcgggatggaaagagaggggtgggcagtgctggatggccagacagggtcaccttccggggccaatacacaggtaggtcaggagggagggccrggatgggtgcagctcctggtgtcagcgggggctcctctgttatgagaagccctttccatatacccagtgggccattcaaatatcattttctatcagttctgtgatatgaaaaccagcagggagcattgcctccatgaatctcggtgcacttgttcattcattcattcattcattcattcagcaaacactttctgatgcttcccctttgccagggcccatgcttggttctgggaagtctgttcagctggtcaatcctaaagaagttctgatcacctgtgcttttccggctcggagcatacagggtggacactgaattggatgtcccatttgcacctggcttccttcaggttctcatttccagagggcccctgtgtctcaggaaacaggacctggcacagagtaaagacttgagatgacacatggtagcatttcaagtgcttataacattaacacaaaaatatgggttgggtgtggtggctcacacctctaatcccagcactttgggaggccgaggtgggagaatcacctgagatcagtagttcaagaccagcctggccaatgtgacaaaaccccgtttctactaaacatgcaaaaaaaattagctgggtgtggtggygggtgcctgtaatcccagctatttgggaggctgaggcacaagaatctcttgaacccaggaggcagaggttgcagtgagccaagatcatgccattgcactccagcctgggtgacagtgagactccgtctcaaaaatacataaatatatatatatatatatatatatggatatggttctcaccttcatgaatctgactgtagcagagaagatgataaccaataggtaattatagtaaaggcatcatctctcacagacaccttgcagaagagggagggctgctgacctcagattctggggacaaggcaagaggccagaggcacattctgctccatggaccataacgagggagtggacagaggccaaggagttagaaacgacagtagcaggaacacctccaagctcaccggacaatctctctgtggacttactagcaaaaggaaagagatgatatcattggatgaggttttctgtagcctttaaaggtgatcttaacccttaawagtgagcttaacctggagaaatgcttccaacacaatgagaggaagagagtatagaagtcaaaaccaaagactctgaagtcagtctcacagaaaatggctctgagcctctctgaccctcagattcctcatctgtcgcgtcgggaaaataagagcaattacgttcagctccacatacacaaagccagaacagcacaggagggaaatgagatgatgagaccgctccacagtggcttcaggtgtcacccagaaggccttatttgaaactcaggggtgggtaaggcaggaggtggtggggctgggtgaggaggccacagtccgcccagctttctcataacatcaactgctttccatctgccaggcactgggcggagcacgacacggatacggccccgttcagttctcccaacaagcctgtgaaatgggcgctatgtttatccccatgttacagccgctcagagcatggggagaaaacaccactgacccygtgcccgagccattcagaaccaaaccagcaagtcggggtgtggggaatagcatcacttgttcatttcttaytgttgctttgcttatcatttcttcctggcctgctttcaaatcctgacttagcctgggtgtgttggttgctactggatgtcagctggttctaggatctgagatgaaacagaataggagtctggagaaagcttacaataaacagacacaaagatgttcggtgacgtatatgtgtgtatgtgtgtcatacttaaatatgtacatattttacacatgatgtgtgtatgcacactcacygtgtgcacacgtgagagagagacagaractattaaaaccatttggaggaagaggagatcattattccagaatcttsctctrttttgcatccatccacagggctgatactgacagttctggtttctttccccaggccacgaataccatgttctgtcccctaaggcggtcccaaaaggcaatggcacagtctcctgtccccactgccggcccattaggacccaggatgcgggtaaggaatggcacctggaaaactggcccaggcagctgtggctgcagcttcttgccctcaggggagtgtgtacttgacaagatctggcctgccctgaacttagcagtgggttatagggacagaccagggaagaggatttttctgggtgtcctgccgtcacatctgttgcttcaggtgctgctgcctgaagccaccctccttgatttaagaagttcctgaagggtcctgataggtggcctccaggcagcaggggacctggcatcagtgattatgtcttattctcccctccatcctcccttcacccctcatactttcccccaagtccacaggagtggcagagagagcagtggcccgataatccaggcaatgggttctagtcccagttctgccactgacttgctgtgtgaccttaggccagttccttgacttctctgtacctcagtcaccacatctataatgaaaggattggaagagatggtctctaggacttttcaagcaatagtgatgataatgactgatgataatgagctgccatttattaagtccctctctgtagagggtgtcatgttaagggttttgcataaattaatcctcacagttctatgaactaagtactgcagtactattacgtccattttatagacaaggacaccaaggctcagagagatkaagtaacttgcccaagggcacacagcttacaagtggtagaagcaggatttgaacccaggtctttgtgactccagagtcccaccttttcaccactatgctcttcctgtgctagtgttagagtcctgacaggcctctccgttcatgcctgcatkcattcattcattcattcattcattcatcacttacccctatggggccctgggccccgtccccaaggaacacacaacaaagcagagtggccaaagctggggtaggggagcacgagtggggctggggggtgcctgactctgccggggtgggtgggagggcttcccagagggagtggtggttgagccaaggcctgaaagagaaacagaccagccctggaactcacccaggtgtggcattggggatgtatgtgggaagagaacaatggcacccactctcctcctgttcccttttgcctctactgacccccctggttccccaggggactgttctgggccactcccacatggagaatggctctgtctcactgtggttggggcggggggttgggctgcatttgggagagcccgggcttaggatccaaggaccactgcttcccagctctgagacccttggcaaattacttgacgtcttggacccttaatttccccatctgtaaagtgggggagtgaggacagtggctagcccagtggcttgttggatttgataaaataatgcaggaaggcccttagcagagggcctggctcactaaatgcttgctctcactgtcatggttgttgtcaatgtcatcacccagatggaggcagcttgtcccctccgcagtgggtcccgaggagagctcagtgctgcagaaggcctgcatgggggctcytgatctgatgatttagatgtaatcctcccctgacatctcttcctcctcttctaggtggtgctgtcacaggggacccactgggaccgcctcccgctgatacccttcagtgtcccctgtgtggtcaagttgggtctcccccagaggcagatggtccaggctcagccacctctggtagggacaaatactgtttcttctcttagccagaccctcagctctccttgaccagggttattagacctgggtgagtttaactggagcagctgttgttccagtctgggacagagcaactggggcagaggatttgttccccaaagagagacctccccracatggagtctcacagggtagggcctgtccagctctcataggggaagggctgggtggaccctccatctttggctggatctgccaagtggtcagactctgtctctctgtgctrttccctccctgataggggcagagaaggccaccacgaggagaaaagcaycttcaactcccagccccaagcagaggagcaagcaggcggggtcgtcgccacgcccaccccccggactgtggtrtctggcaacagcgcccccagcaccagcccctccagcctttgcctacatctcctcggttcccrtcatgccttatccacctgccgctgtgtaagagccttcattctgaccttcccagcctctttctatagatcactgaatatgttagcattcagacctgggtggggcagctgagatgcagtatactcctcctgtgttttatccctgcgtggataacatgcagtaggagcccaacactcatatagtcactcaacaaagccaacactcatataggcactcaacaaacccatgtaccaaggagagtgctcggccctgggacccagcagtgaaggggactagcaagagggccctgccctctkggagcttataactttgtggagactgagaatcctaaccatcttccattttccttatgggttttctccgcaagtaagtgatgagcactgggttttttttaatagactttattttttaggacagttttagatttatagggaaattgagcagatagtccagagagattcccacaatcctcctcactcctgcacaaacagtttcccctattattaatatcttacaataatgtggcacattggccacgttagtgaagcaatatccatacattattggtaacygaagttcgtagttccttcaggccgttttcctccaaagtcctgtctctgttccaggatcccatccacgatcccatgtggtatgcgattgccatgcctccttacgccccctcggctgtgacagatcctcagaccttccttgtttttgatgacctggacatctctggggagtcctggtcgggaatattgtaggactttttgcacagattctggacgtaacatcagtcaagccaggagaggcagggcagccgagacagaagtggcttgggtttggagttggccagagctaccgtggagtcccatctgccccctagtagcactgtggccttggcaaactaacttcctctcagagcctccacttccccatctgttaaatggaggaagagtctcaaccacgtacttaatcctgtgcgtgaggattaagtgtggcacgtggcaggaaccaaatgagaagtgtgtggagtttgtggtgccatttggtcacgtgctcattgctgagcaaacagtagcttcgccatcacagagaatgttgctattgctcagtgttgtcactagtaggaagaagaaggagtaaaagtgggttcaacatgataggattgtgcagggacaaaagcccagtccccagaagtaggaaacctgtcttcttgtctcagctgtcagcagctacttctctgcctgcttcccctgctgtgaaatgagtcgattgggactggatgtcttcagtggctgtgttgccagaagcctgggtgtgtaggcagtgagggcctgcgtcactgtgagggctggtgcttggtggagcagggacccaaggcgccatccagccctggtcctctattcggggaccaggcctataaatgtgcttttaaaaattttttatgtatatgtgttttctgagacagggtctggctttgtcgcccaggctggagtgcagtggcgccatcttggctcactgcaacccccatctccaagattcaagctattctcatgcctcctcctctcaagtagctgggaatacaatagygtgccaccacacccggctaatttttttggtatttttggtagagatgggtttcgccatgttggccaggctggtcttgacctcctggcctcaggtgatctgcccgcattggcctcccaaagcactggcattacaaggtgtagccaccgcgcccggtatgtaaatttgctttcttgctgccctctcagctgagtctaagcaagtcgytaaggaatcttccactccagcagagatgagaaccaatgctgcatgctcagacctccagcagacacgggggaaagcgcctgccagtgttccaactcattgatcgggaaaggttttgcccagaatttggtgaccccacggtagccatggagtctttacttctcctgaggccccatttcacattcttccaggctcaggcctgtgggcagaactcaccaggttgctgtttccaactcaggatgggcgggttatacctatgcctcagtttccttctctgcgaaatgggttgtgctgaggattgaatgaattaatgcatggaaagcccatagtacatagaagttgccaataatgatggtgcttctaatgctgctagaatttgcgctggtgacaccctgaaatttctccagctgctggtcagcaggactgaacgggcccagtggttgagaccagtgtagtttggaaagcggagtgggcctgtgctgccccctgctgggcagccgtcccatagcccctgcagccgagactttccagcccagagggactttttcagtgttggccctagggagagttttgggtaactttcaggccaagttggtcatcaaattaacagaaggtgggggtgtatgaaaacccagcccagacagtccctacttttacaatggttcgatttatgatttttcgactttacagcgggtttataggggcataaccccatcgtaatttgaggagcctctgtagttacttacaccagacggtccctagaggagggagtgcaggctgctgttttggggatgcaagaagccygttcatacagttcagattattttatcagcatctgctgcttgccaattagcacacattagatatgtggggagagtcgggcccaggtgtgaacccatggctgccccttccagctgtctgactctgggtcttaggagctcacgtttatggagcacttaccggagccaggcagtgccagctttttacctgaattttccatcagctctaagctgagaggttgctaactgtggtcgttttaggtgggaaaacagaggccttgcaaagtgacttagcttgtccagagtcccatgagtagcccagcagaatgactgggatttggggcagggctccagggcctgagctgctaaggctggtgcattctactgcctcctgaatcacttagcttctctgagctccgctttgctcatctgtaaaawaaagataaaggcaccaactggtacatgggtaccaaagatgaggatgccagccctgggctaggcactgggtttaactgttggaggaactgtcagactgttttccacagtggctccaccatttacattcccaccagcagtgctgaggattccagtttctccacattcttgtcaacacttgttgctatctgtcctttttgatgttagagggtgtgcagtggtttcactttgcatttcctgatggctaaggatatgcatcttttcatgtacgtattgtccatttgaatagctcctttggagaaatgtctgtttggatcatctgtttctacacactgtataacaatgcaagttagacagcaggggctcaggaataaagccagagtttacagtgtgccaagcaagatgccaatgaatgactctgctgcgtcctcctaaacttattcctgatttaggtccatgcttctttatctccctcctccaccacacacaccctttatttaacagtgctgaggccacaccccctcttgcccactgctggtttccttgaaccctaaacttagtggccctgatggatgccattgtcacctcttagggaaatccgtgcttcatctcaatgggcttgtcagcccattcccacagcactttaaaacaacacctcacattcctataggactgggctaggaaggatgctcttctacccacttcccaggacatggggccagaccctcccactcctgcagaatccctattattattattattwctattattaattattaattattgcctttctccagcaccccttgcttggcaaatggaacccccagatattcttccatgagggggttttgctatcaagcctagggtgatcctggcctycccaagatccggctccaagaagattgcaggagtccatgttttcttgtcccactgtaaccccagagcctggcacgctggctggcatgtactagatgggcagtaaatcagatgaacaggtagattgaacttcctgtccttgaacacctgttctgggtcaggcactcatgttgttatcttccttcatctttctaagaaatccctggatgtgtgcccattattcccattttagaggtaaagaaactgagacccagagagtaggagccactggcccagctgggatttagaagggggttgaccccacacacggtgctcctcggcttgtccccagccctccccatgtgtaacgagcccactcacttctctcctcaggtactatgcgcctgcaggacctacctcagcccaaccagctgccaagtggccgcccacagcctctcccccaccagcccggagacaccggcactccatccagctcgacctgggcgacctagaggagctcaacaaggccctgagccgggccgtgcaggctgccgagagcgtccgctctaccaccaggcagatgagaagctcgctgtcagccgacctgcgccaggctcacagcctgcggggctcctgcctcttctgacttcactgggggcccagaggcagatgggtgggtgggtgggcaggtggcctgccaggccaggagtgggctggagctgctgaggcccagaaggcccgcatagttcctcaccaggagggtctccctccagcacaggtcccgcctgctcagtccctgtgctttccaagtggagggggtgtcagctyggtcaccaagagaagtgacttcccaggagcaccagtcccctcacagaggtgctgtgagcgaggcctccttcggtccaggcagaacctcaggcagtctctcctggtcctgcatgtgtgcaactccagctaataataggtattttatatacagatggacagatatttttttaaactggggagttttcctgatcttgggtcctctttagggggccagacaagaaaggcctacggtttctggagcaaacctgtcccccacctgtgaccagtcactctggggcaagcatcactgggaagggcatagccggagacctttctcctagtgactggtagtcagtggggcattttaggatgtcagggccccagggtgacatgtgtccagcttttctatggcagcagaggcctttccctcagacaagctacaaagtgcccaggatgccatccaccatggtccccttcagtacctcacgcatggtccccagcttctcctaggatcccagtggcrtttatcagtggccagctacctgccaggcccgggctggggcacggtctgyggccatgaggccaggccgcctcccgcacccctaccccgtggcagcagcatacctctgcatttctggaatgtgtgtgcatcaatgatgtttgtatatttgaggcatttaaaaatctattttcgttacgagggcaaatgaagaatgaatattgatcttaaaaaaagaaaagaagacaaaaaaaatacccaaagccatccgtgtctctgctgtatgtcattaacttttgccttcaatgtcaagtttatggggtggtaggtttgatgcccagccaagccctttcccaggggacctgttgggtgctctgcctgcctccctctggtggcttctgtttctccagttttccccctttgcctatctcagaaccataaatctttcaactgcggagggccttgaggtggggctgcctagccaagtcccttttgactgaggccagagatgtaaatgaggcacacagcaagttgctgtctacaagagtatgcacctggactctccagtgctcctttctttcttttttttttcttttttctttttctttttttttttttttgagactgagttttgctctggttgcccaggctggggtacagtggtggaatctcggctcactgcaacctccgcctcccgggttcaagtgattctcttgcctcagcctcccgagtagctgggattacaggcatgcaccaccacgtctggctaattttgtatttttagtagagacagggtttctccatgttggtcgggctgatcttgcactcccagcctcaggtgatccacccacctcagcctcccaaattgctgggattacaggcgtgagccatggcgcccagccttccagtactttcaatagcaaacagcacctgccatttagggagcacctgctagaccctgattccggtgctaagcactgggcattgtctgcttcacacagtccatgtgctaaccctcaggaccctcactctgccccccttttactgatgaggagagtggggttccaatgggccatctgcccaaactggtttgggagagaacctggatttaaactcacattggtctgacccaaagtccacattctttgttatgtgtgttttttgcttcctctacctccatgattctttttctcttgacctctggtttcttcctcacgtggcttttycttccatgttccccacttctcgtctcccttgcttctccctgctctgcccatcatgactcatttctgtttcatttttcagcggatcctcctgagtatggttgaaaatggtgtctcactgaaagtaacactgaaatggacaaacttcctgtaggttctgagccttcagttccaggacattgtgggaccccagaggctgtcctgtccacttgccttctgaggacatcagctcggtgtccccagcctccgtgctgtgggcacagctgtggtttgggtgctgagcaaaggatgctgtagtcttggccctgtggagcttggctgttgggacaggaggtacaaaggggagtggtgcctgtggacacaggactagaccccaggacatcagggcctcgggctcatggtcctatcaccctggatggtatacgcagctgcacacgtggaattgctcaaacaattcaggcccaacttttctgccacggaaggggtgctgcttccctcacgtaacaagaggctgtcaatcacgagcacccaggttggggtgaggccggccctttgtggcttgtgccactgagtgggctgtgcctcgggcttggctccacctcagggctccacatttgcaggatgtcagctgatttccagggaccagcctcacccttacgtgttatctccttcttctgggtctcccaggtgagcaccctaagaacacgtccatggagacacccagcccctctggcctgggccccaagccctctgcatcaccccagcccttccctgccctgccctgtcctggcccaggcaaccgcctcttgcctagttgcccacagcagccttcactcaggccttcctgcctccagcctggtccccacaacgtgcctcccccgatggccatggtaatactggaataaggtccttgtgataggcaccacatgcctgaactctccccaccccatccaccttgtatttgtctgttctcacattgctataaagaactacctgagactgggtagtttatgaaaaaaagaggtttaattgactcacagttccgcaggcttcagaggaagcatggctgggaggcctcaggaaacttacaatcatggtggaaggcaaagaggaagcaagtcccttcttcacaagacagcaggagagacagagcgaagggggaggtgctacacacttttaaacaatgagaccttgtgagaaacagcacctgggaggtggggctaaaccattagaaaccagccccgtgatacaatcacctcccagcaggacccgcctccaacacatggggctgaaaattccatgtgagattcgggtggggacagagccaaacaatatcacacctccactcctgtttagggtcttctgcctcaaggttactcaaatgcatcctctcatttccttgcttgcagcagaaacagaaaaggatttttttttatgactagttgaagttttattacaatcttgctattaggagaaaggccttacagtagtctcagtttagaaattcacatttgtttgcttgtattgttttaaatggacacataatgtacatatttatggggaactgtgtgataatgttcccaacacaaagaaatggtaaatgtttgaggtggtggaaatgaccccgatttgatcatcacacattgtacacagaacagcaggttgtattatgctcctcatctttctagattggttcagatgccccttctaggaagccttcccagattttcgccctgcagaagaaaatgtcttcccacagtgctgggctcccacagcactcggtgcctgtcatcctccatcctggcacgtgtggggctcttcccaccagggacagcgtcttatccagtgcccagccagggttgaactcagggcaggcttcagaatgaatgaatgaacaaatgactaacagcttagctgttccaaacacagaagctttattgatgcaagtgagggaaaaagctgaggtacacatgtcgggttggaggggcaggatggcccccaagtctctgtcctgatccaaggctgtgtcctgctaggattccccctcctcctgtttcctctccttctcgtgctgcttctccagtggctcacacttatcctagaaggcagcggggaattggggtgagggagaagcagaggcatggggacagggtgggaggtcttccrgggagagggcagaatgagctctggcctgtggaaccagctcaaccagggctccaaccctggcactgtcacttcccagctgggtgatcttgggcaagtcattttctgtctctgaacctcagcttacttgcctctaccatgggagctcagacccttaagaaccactggcatttactgagcacatagtacctgcagggcccttatgctgcagctcctgaattcctcacaaccaccactactatgcagatgatgtaactgaggagcagggtggccttgggacccattcgaggctccctagccagacagtggaggtgccaggctgtggatcaagtgagctgactacagtggttgcgttcataagccctgtcccaggatcctggggctggggatggggcaggaggtagttcacatccctggtggtcatctcaggtggcaaatggaaggaattgtttttctttgaatagtcatggaagtactgcatgtatatattttaaaaattggaaccagctcatcggtgctgtgatttcacaggtattagggcacagggccacaccaacacaagtcttccaaacacaggtttaaagaaaagtgttaaggagctcattatacagtaattttcatttgtagcaaaaatcgggatggtgactgtggccgtgctgcagtgtgggtgacattgaaaaccacagtatcaattccccactgcacgggtattaaaaatgagyggggagtggaggtggggtgaaagcctggggtttgggacgcgtctgtaggtggtaactccccgcattacgtcccctccaattgccaatcccccaaccccgtggctcacgctgttccctcctgttagctttcaggtcctccctggtttcacagggacttctccctcctgggctctcatccaccacccctgggcctctgtagagctcagctgtccctacagtgaggcaggtgcctaaaagcagaagatctgcctagctgtgcagccttgcctggcagctttcctgctctgggcctctggggctgcccaagttgggccatggacaaggtgggcactgtccaatcccttgcgtttacctttttccagtcggtgtacatgacatctgacctgggaatgcacaagcagtcgagagcttcgtagaactctcccagttgctccttggtcgtctctggcttgtcagctgcagggggagcaaggagactgactggggacatggtggggcccggcgggaggccagggagggctggggttctaggggccagcccaggggtgggtgaatggggggtgaggcctgagaggggcatgagtttggggctgctaagcatgcctaccatagaaagacagcccccagttcttctcatcgtccaggtaggaaccaaacatcaaggtcttggtgtccctaaggaacagcaggtgagcaacatgttctcggcctccctctggaagagaaaaagagcctctgggtgagaacatgggatggcacaatggtgcctgtcttacaggtgaggagtcctaggtgtgtccggggccacaaagcccatcagtgaaggcccgggtctcctttgggccaccgtgtgcccagcccctgctgcgtgcccagctccacgccaagcactttctgtacatgagatctcaggagcctcacacagactgtggctgtcagggcctttctccccgttttacagaggaggaaaatgaggcccagagaggaggctcgggatgctaaatgatgtcagttcagctccatcagctccctgccatgtgccacctctgcggtgatgggggacatagttgaaggtaccacctctccaacatacaggcttctaccattggtttgcaaaggatcttaaagagggcgtgagagagaggcagatctgaagccagcctggagttccaattctagttctaattataagctgtgtgaccttggggaaactatttgaggtctctgttcttatgtttcctcatctaattctctcagtgtcttcttagggattttttctgagcacgtggtaagagctcaaaaatgttagtggttatttctctgtgcccaaagcctccagggctctacatccagcccccaccttatgctggcctgccctgttcccacggtgaaccctcctgcctgagggctggccctcaccgtatctggagacggtcccattctcccgctggacattcaggtaactggagttatagaagcactggttctggctaaagtcaaccagaaggcggaagaaaaacagtaatgttatcgaggagaagtggccaatcgcccatcacagtcccggggcaagagtctggtggagattaaagccarccctcccggttccacccatgggaaggccaaggccaggaagaaggagggacttgctcaggtcttctggccagaagctgagatgggggtgcattggaatgggggctctcaccgggtctggtactctctgagaaagatcgtgtcctctgtcttgttgggggtaaagtaaaagaaggttgcttggatctcctgaaccgacttattgtactcctcgtttcgaaaggccgatgcgatataaaaccacttgccagtgatctggggagaaggggggagctggtgatgggggcttgatgctgaatctttgactgtcagctgggaggagactcaggcagatctctccctgattttgcagatggggagatgaggcccctggtgggcagtgcgcatgcaggagctcaccctgaggatcagtcattgccccccaggcagcccctccaggcccagcacagaaccgtcctccgtgaaggactctgcagtgaggcttctgtgtttggaggcagggggtgcctccagagtcccctgggctggtgagaatttcaccctggggacccagaagagaaaaaggcagagctgggagtgggggtgcgaccacagccagcaggtaaagggaagcccagagaagggaggcagctgcccatgtgctcaggacagggctagcccaggcactcacccggtccagggtggcgttggtgatgggcaccggtactaggttggcacacaatgggatctgggcttccagcagaggtaggaggctcaggactgtaagaacccaggacagcgccatactgagaccaggaggcacgtggagccaggcagtgctggtggctgcagggtgcagtcacctttataataa

SEQ ID NO: 6876 - DNA, 414295 bp, Homo sapiens
  misc_feature (1)...(414295): n = A,T,C or G, or insertion/deletion polymorphism (see Tables 1-2)
taatgaagtacttctgtaataaaatacttgtatttaatataaaaatcaaatgtaaatgtaaaacataaaaatttaattgaaaattatttaaaatgtaaaaaaaaattcacattgagacaaaaggataagatggataattaataatagtgggaacaatttgaagataatctgtattgagtgcttgcctgtgggccagatacattgttacgagcttcacgtgcaatatctcacatgcttggtaacaacaataagatattcatgctatgattatcattgttttcagatgaggaaactgaggggtgaagagtttaagtcgtctgcccaaaactagcagtgggagagtgatgcagccaggatttaaacccaggtagcccaaatacrgcatctacaatctatctcaaatctatggcatcacagatgagctggtgtccacctttccctgaaggagttgaaggagcttttatagaagaagtgatatctgaactggaccttagagagtaagtaaaattctgccagataaagaatatgtaaaagtgttagtccagcctgagatttgtgtgcaagggcagagtcgggaaaggccactacgtgcttgcaggaatgcctcatgggcataagttgctggcgtgtgggtgtagtgggggttgggtagagggagaggtatgagctggggacggggtggctgaaaaaagaggttggtagtagaggaatccaaatatatttttgaaatggaataagggttgttatatttttaattttctttttattaccaaccaaacaagcagcagtgatggagtgatggagtttgattatgtgtccttcagtttagtagttaagattttatctttaagcaactggaagtcatcagcggttttaaaggagaagaatgacatcatcagcacctttttttagaaggatcactctggcagcggtgtgaagaaagggcttggattgggagtgatgggtgtcatcaaggttggttagcaggattctgaaatatgcatgaaaagacagtgaggacagtggacagtgaggacagagaggcaggcccacatttgagaggcaggcattcctgagttgggagcaaaagggcttggtgattaatttaatgcgggtggttgaggaggaaggaagaattgaagatgactgagatttctagtttagaaacctgagtaattggggaatgtcattaactgaaataggagtggaaggaaggaaatcatcctatgtgaggcctaccagaagctttacatatgttatttaatcttaaataaacctataatgaaaaaattaacatgcccattttgcagataagaaaagtgagattcagtgaggtaaagtagcttgcccaaggtcacacaactactaagagctggaatgtgaaataaggtcttactccagtgcccctattctttccatgatagtaggggactttatgctttgtacctctttgtacctttctacactctaataataattttagtttggaaaaataggactgaagctcaatgggaaggtagaccatggaaacatggtcctcccaggaatagtgcagtatgaagagagattaaaggattgccctaatgacattaaggcccagagcagcactgttgaatacaattttttgcagtgatgcaaatgctttttacttacattatccaatacagtagtcattaggccatatgctactgagcacttgaaatgtggctagtatgaaagaggaaccgaagagttaattctaactgattttaagtgatttcagattaaataagcatatgtggctagtgactgccatattggatggtttaggactagagaaaccagtcaggcgtagagggttcatcagagaagaggccttgctggtacccctgaaaaatcactcgatatttgatcatctgcctcatacctctgggtaatattggtcctatatttggggaccataatttattagctagcaaaaggttttttcctagtgtggactacaaacttattttactatgttttatctttaggagagtaagtacaatactccctctcctttcttatctgagaatcattatagtcattttctctgtatttacatttttccatacatagtattatttaagagctcaagctccaggaaaactgcctgggttcaaatcccagttctgccaatgaatattttgtgccttgagttagctgcttcacatttgcaagcctcactttccctatccataaaatagggataataatagtgcttcatttatagggtagttgtgaggattgagttaaataacctatggaaaatgcttagccagtatctggcacatgctaaatagtcagtaagagttagctattctaaaactagtaccgtgtgacagtgtgtattttgtacctctgcattttgacatttactcaactctatttttgcttcaatagaaggtgttcctccagatctctgtcagaacattccaaaaagaaattcattcctcaagataagaaggtagacagagttttgaagaattagattttatcttattgcaggcatgagttttgagttgttttttatttcactttgattactaaattgttaaagtatttaaaatcattacagaagaaaatcatgaccgtgatattttgttgtgatcattaaaattcccttggtttaagctcaaaycgttgcacatataccacacaatcaaataataatactagaagttcttaatgttggcacagaagatttcttgatgttttgtagttatactgttttttttgttttgttttgagatgaggtcttgctgtgtggctcaggctggagtgcagtggctattcacaggcaagatcctactgcaactttgaacgtccagcctcatgtaccctcttgcctcagcctccccagtagctggtactacaggcttgggccactgcacctgactcatacctgtttaattgaaatatttaattcctagactctggctattcaatgccacttagaagtggctggatatttgttgatcatggactatttaaagactaatgacgtcacaggaacaagtaataggatcccttttgttgtcacctattttgtattttgtaatctttggattgtaaaactgcattgtaatatagtattgcactccctacggtgtttgtgcaaaaaacatttttttttccccattagattggaattttgagaaatctggcttcaagtgccagttctgcctttggtttgtctaaataaagaagtcatttatttctctgggccacagagaggtaaatgtcatctgtaaagtctaagagttgatcttgatttgattctagaatggtcttgaggtatccttccaaataaaattccttggatctgcctccttcccccaactccctaggaggacctttggccttaagggacttaagagaggtcagttttatctactgttcacagcgtttacttccatgctttaaaaaacatgctcttggaatattcttggatatttcatttccttggaaaacaattaatgggtgagtcagcatgaagaaaaaaacccactcacaatagatataaaaattgcatgaagtggtgaaacgagaaatgattttctttgtaaactgaaatgatgaggtatgcagaaaccaattacgtatttataaaatgagcgcgcggtgggaaagctttatgtagcaaagctaaagtgctgttacatatttagcaagacagagggcatggagattcctctccatactgccttaaaactgctgttaaacgttcctttcagtgagagagacaatgtgttgggaggcggacgaaggaaggaagcaagggaagggtcaaagccttccctccggccccgatcagtcccctctgtaaattcataattaagggaatttcctcctgcagctgcgcaacgcttggtggccgtttcgacgtcactgtcagggcatttcagggattttgtgtgcccaggcagtgacttcccgacttctccggcgtatccccgacggggcgcagaacaccgcccgtggcgaagtcgggccgggggagtttgggaacccgtccccgggagctcagcggccagaggagggcgcggaagtgtttcctgggtgagcgcggcagccggacccgtttccggaaggctgattgcatcaggtgtggagcagggcgcctcctcggcccaacctggcggcctctgcgcctgcgcgcgccgccccgccccgccccgccgccgcggactccaccgcgggttttcctctccgtcgggaagagaccgacctgggaggggcaggctccgctcacctaccccggacccccgagagagagcggggtggccaggccgggttccggggatctgaggggagctgtgaggtccgggaatagagtgccttggaaagaggacccgtctgcaaggttggaggctggtcgatctccgctcctgacgggagtggtggtcttgggctggtttccttgcctctttggccttgaagatcacagactaagaaccacaggctctccagttcagagagcctgtattttccccaagaggtctactgtggccctcgactgtccttggtccacggacgtgttaggtggatcttggggtgcagagactcagtcccaagagtaaacacttttcatgaatttatagggatttctctgtgacagtattgtttttatgttgtaggaaggagggacatgattgctggcctccagctcggtctgagggagataattgttaattggagaggttattggagtgcaaaagtcagaaaccaccttccacaaggcagcccccctcccatcccttcgtaacaacctcactgagtctgcatgagggtccctctatacactctattcgcaccttgtgcatttccctcccagcactctacctgtttgaaataaccgttttgagtgattatttgataggtgtctgtcacccggccggactataaattccatgaaagcaggggcctgggcttttaaattcaccactatcctcaggcctagtacaagacctcgtggatccttaataaactcatgtaggaaagaataaagtaatgcccaccccactgcatagagtcctcataggaagaatcacgtgagtttttaattcgagatccttggtaggactgtgtgtgtgtgtgtgtatgggtagggttctctaaagtgtatagtcctcacaccagcagcatcagcatcccatgggaacttgttagatatacagatgcttgggccccaccacatatctacccattcagagacacagattgggactcagggatttgtacttcagcaaaccctccaggcgattctgatccaggctccagtttgacaaccgctgccctggtgaagagcaatcctaaggatactttggggatgtcattcacagcgtctggggcagagcacggtttaccgtttactgagactcgactcttatcagggctttgtttgcacgcttacaattagagttatagataatattattggcaatggaaaggaaaacctccttttcctctccggcagttgtatttctcccctgatattatcttgtgatttccggatcaaagaagagtgtgtgtgcggcatatgcctgggggtggggataggaggtagaaggaaggagaaggtgtcgcctacaacttgcagttagcctgggtgggtgtgggcagctctcctgtggggacattttcctattgcaagggaatgctggcgtgtgggagaaaagccagggctaaggtaacccaactgccttttggtgcagacagacaccagccacacggaggggatacccgggctgcactgcacgtcctgcctttgggtcttactgggggacccattgcctccctgcgtgttcccaggcgattggggagggtgcctcccgcaggccctgccgcctccacctgcaggggtcgccctgggagcgcggcccgcctccttctgcccggcccccaccccccggccccgcctttctcccattcggccccctccccgccgggtccctccagccttccctcgcgcagccgctgccaaagcctggagaagtggaatctcgtcagcgccgctccctgcgcgggactcgcggarcggcactgagcatgctcagttgccggarcccgttctggtctcaagtaggaagctagtgcgctgtaaccgcatctgatctgggcgctccgggaagggcgagactggagcagagccgctgggcgccggagccgaggcgagcgccgcgcgcaccactggtgagsccagctttcttccttgcctttgccccggattccggggcagcacgagagtgctggggaaacacccgggtagcggcagcagcgtgcggcgagcggctgcgggttcccccggcggcttctcctctgctcccggccccggggctccgcggccactgctgcccgctcagccgcagccacacctgcagcagctgccgcggcatctgcagcggggcgcctgctgcggagtccygtgcgccctgcgcccgcgccgcarggccagtggcacggcgactgcgggctcactctccttgacttccrtccctcccgcttcccggcgccctctttccctcagcagccccggcttggcagggcctggggcgggggagaccgggttggaggcggtgcgcccgggtggggactgcagaggggaaaagtgagggtgggcgcctgcgggaagagcgcacacccccttgtcctggcaccggcctccgctgtgccgctcggctgtctctcctgggcggcagcgcgctcctgccggggagttggagccggggttggcttctccacgaggggttcagaggccagcccatgagacatgaaaggggggaaaagttccttttccccctcggtggcagagagagcgtttaactagaaaatggctgtgcataggggaccgactccaggaaactggccactgggacccgaaagcccctgcgctgcccaccgggcggaatggagggtggtacgctagaaatgacatttgtgcggcgagaacagagctggacggagggaaggatgctgagacccatagaaacaatgaaaggtggtcttcacgtcggtgaagtggtgtagactacgggttcggggcaaacagccgagggagcatgggactagaattcaaaaaaataaattaatttggataaatcatatgtggagttgtcaccgaccgttctgtagtcaagttctgcgcggttttagagccacgactgtcacagacgtttttggatggattgagtggttgaggagggttaaaattgagaggagaataaggtcagtgtcggaagctccaactgggctctcggaggggacagtttgtttaagtccctcagtcactggctttacattgtgtctaattacttacgtgaaatacccaaaggattatcataaaatgatgccatcggtggtgtttgaattccaaggaatgaggaaactttgtgaggttggcatgggtttatcatttgttttaatatttcactgatttaaaaaaaacaaacacaatggcagtttgatctgttgtttctggagtttactctcttaaatcttgctttttttttttttcttgtcatggtttcagatttaaaatcttgtccccaaatggccataataatgcagagtattagaatttgtgtggctggccttttaggaacagatggaatccttgaaaggggatttcttcatgaacttaggtagcaaccttctcgttttcaacttgtagcttgtaagcaatatttgttcaacagttgtttatcataacttgcaacatcctagaaatggcatcgttcgtgaaggatggtatttgtggcgagaatggggaaacctccaggctggggaaatgccgagagaacacaggtggcagtagagtacagtgggttgatcatagggcggaaggtggtggggtacaagtacaagatttcaattgctgttctttcgttgtccatgtactgtatgaccccgaagtcaccgacagtcttcgtaaactggatgtaaccacgtctctagatatttgctgagagcctttgagagacgactctaaagttgagatcctttccacagaaggtttttaggtcctatgcttttattccctcttctaatggatacttttaactgaataaattcaccttcaaggagccaatgtgaactggctttctgaaatttttataaagtggtaattgaaaagctggatggtgaggtgggaggattgcttgagcctaggagtttgaggctgtagtgagctatgatcacgccactgcactccagcctgggcaacagagtgagatcctgtttctgaaaaaaagaaagcttgatgagctaaagtgcaaaatactggtgtttacacttagctggagtaatgtgaatactgactccaaaattacttgggaaaaaactattgcatatattgtaagaatccacatgtacaaacataaaatatttttaaactggtactttttgtcatgtttcaaccttttgatgactgttttcttttcctgccaccagaaaaacagcatatgaacattgaattcttttatttttctgttaccacaggaatgaatactgaaagccttgtcataatattagaataatgatgtgtgtggactatcctgagtactggatatctaaatttatcttttaagaaaaatggaagggagagcatcrggaagaatagctaatagatactgggcttaatacctaggtgatgggttgatctgtgcatcaaaccaccatagcacatgtttacctgtgtaacaaatctgcacatcctgcacacgtacctggaacttaaaagttgaaggaaaaaataagaaaaatggtatgtcgtgtctctgtacctttttcartttcattttaaaaatagacaatacctggccgggtacggtggctaacacctrtaatcacagcactttgggaagctgaggcgggcagatcacttgaggtcaggagtttgagaccagcctggccaagaggtaaaacccccgtctctaaaaaaatacaaaaattagccgggtgtggtggctcccgcctgtaatcccagctactgggaaagctgaggcaggagaatcacttgaacctgggaggtggaggttacagtgagccaagatcgcgccactgcactccagcctgggcaaaagggtgagactccgtctcaaaataaatacataaataaaataaataaataagtaaataaataacaaaacaaaactggacaatacccttgtgatataacaccttaagttttccgggggcgggggaggggagcaggtgggacagacttttaggaaaatattgtaataagttattactggttatggggggaatacttattttcctacatggggttaggaaaccagcatttgttcagtgcctagtattattattattattattatttttgagacagagtttcagtctgtcacccaggctggagtgtagtggcgcgatcttggctcactgtaacctccacctcccaggttcaagtaattctcctgcctcagcctcctgagtagctgggattccaggtgcccgccaccacgcctggctaatttttgtaattttagtagaaatggggtttcaccatgttggccaggctggtctccaagtcctgacctcaggaggtccaccagtctcggtctcccaaagtgctgggattacaggcgtgagccatcacgcctggtctgttcagtgctttttatgtgtcctattatcctattaaggttttgtatatatcatcttatgctgtaagcatctatgcataaatgtcagctgtctaagaaaacccctctgaaaaggtagatgctcgtgatttcacagcaatagagctttaaacttttatcttatatgaaaatatctttaattgattccattattattcagtaagcattctcttttaaagcatctttgatttgttatttagaattaaatttgattggaactgcatatcttcagaatgatttgaatgttttcaagaaggttctatccagattttaaaactgttttgtgttcatttattttcaataatgttgcactaccaacaaatgaaattagatgtcagaagataaacccagattagccattttgattttaatgtgttattagtgcatattctgcatgctgatatgtgttgayggcatttctctcagccgaaatggtttgtcagaggcagagtaacagactctccataataaagggtctggggggatttggaggaaagactactaaccagggaccccaaagacttgcctttggggctggcttgtcccttacttcaattcactgtgttacctggaaaaagtcagttatgtctctgggcctgttttcccatctgtaaaatgagagagctgcagtcaccctctggttgtctatcgggtccttcttgtcccagtctagagatctgtgatgcagccattcgaggagagaggtcttcgtttaagagcaggggtccccagccccctgcttcggacctgaactggtcagtggcctattaggaaccgggccatagagcaggaggtgagcggcgggcaagtgacctttaccacctgagctccacctctgtcagatcagtggtggcatttgattctcacaggactgtgaaccctgttgtgaactgcacatgtgtgggatcttggttgtgcactccctatgagaatctactgcttgttgatctgagttggaacagtttcatcccaatccccaaccccatccgtggaaaaattgtcttccatgaacgctgtctggagaccactggtttagagcattatttggaggtgattttgtgtttccctgtctggtttgtcactgctttgtccaatgcccttctttttttgcccaattcctacttccsttatagttttcatttgttataaaatggttgtcataaaattaactttatggccctgccagtctagttagcagataaggtaatgattagatttgggtaaagtgtattcgacatttgaaactacttcatagcattttctgcggggagactttctgctcttgagcacacagatagtctgagaaagaaacctctacctaggctgcaggggagggggtcctgtgctttgcttcccaggcccacccttgtgaaattttggcaagcctttcctgtgtcccagcctttgtctcctcgcctcgatgagaaatgcagcccttggtctctggaatacgactttcactctcatttracgttagccctgtcactgtgttggacagatgcctgtgattggctgctgcagtagcaggagtggtggctggtgaaatgtgtctactcagtgtcattagcaggatcatgagcttttttttcttttttcttggcaagctgcgatggggcagagagcaaaggaaaccaatcccatttggtgtttttagtgcattttgctttcaagaggctcacaaaactcagcctcattaacctttaagtgagtcagtgaggagttgttatcccattgaaataatttttaataaagggagagtgactctagttcctctaataaccaggctccagggttcctggacccctgttaggagtgggtcattaactccagacattagatgagagctgggagagaggaagggcatagagggtggaaggtcaagtcacacaactgggcaggaagtaagaagcttgatcagtttaaaggtattagagctctttgtgtgtagagttacaggagatattccctttctatataatttatttccatggtgtttgaatcttatcttgttttctgtaatggacgtatatttattttataatcagagaaaaatcccaatatataatttattgatatataaaatgtacagattcacatggacaaatacgagaagagaacatggaaagaaatgaatggtatagaaaaggatggattaaagcttttctttgttgttggttaatgacttgacagtggttataaacaaagtttaccagttctaccctctcttttcctcttgtggaaatcttgcaaactttgtttgctaggtaataactgaagttcccgaagtgtaactcattggcaagtatgcttcaggaatgcttagagtgggaggaagagtgtcgttttttttaagttgatgaaaaagaatgcagaaaccgggagcagtggcycatgcctgtaatcctagcactttcggaggccaaggcaggtggctcacttgaggtcgggagtttgagaccagcctggccaacatggtgaaaccccgtctctgctaaaaatacaaaaattagccgggcatggtggcacrcgcctgtaatttcagctactcaggaggctgaggcaggagaatcgcttgaacccaggaggtggaggttgctgtgagctgagaccgcgccactgcactccagcctgggtgaaagggcgagactctgtctcaaaaaaaagaatgcagaatattggaatcgaggtagaaggaaaaacgtgtgtttaagagggtgagatagattggagagactttgcggaattccagagggtaaagggaaatgccattgttgaagaaggaaggcctggcattactggaggtatgggatgtgtccctgtcgtgtaagtcagagctcagtttccacacaatataaaagtaaatgagtatctcctatatgcagagcataatgttagccccacaggtcatttattgttggttagtggttttcactgttcttatcacaatgatgataatgatgtagtgaatatgtcataattgttcaaataagaagatatgtccttttctctgatactatgcctttctcatttttgggtaagattcttttatgatttgataggaatatttttatctagccgctgaatggtccaygaaattggtaagtctgggaatctgggcctgagatgcagggaggcctgcccttgggattgagttgagtcatggaggccaggccaacatgtggagttygtgggtcagctgatggggcccctgggctttccaggaatatagagtcacccaaggtcctaggaactgtgaatgagctaattttgaaagtgccctaggagccagtgactatttttgaattatagcttgagaatracaaggaaagcaccaagatgaaagatgagggtgtaagggaacagaatgggcaagtggttgaagtgtgaatttcagcaggtgaacctcaagatgtatcttgacatttgattctttgcatgcaggcctctttctggcaaaacaacactctttagcaattcttagttagtgattctaggaaatggtgatgggtgaaagccatagaacctagaattgtgtaatagccagcttggcccagacctctgcagtatcattccctccagggtgagccttgaattgctggaggaagcttcagaatgatttgctcatggaattgctgttattcacctttagttttggttgctattgtggggtgaagaaggagtgtcaaaacaataacaacaaattatttccyttttttttttttttttttttttttttgakacggagtctcacttggtcgcccaggctggaatgcagtggcttaatctcrgctcactgcaacctccaccttccaggttcaagcagttttcctgcctcagctacccaagtagttggaactacaggtgcccgccactgtatccggctaatttttgtatttttagtagaggctggggtttcaccactttggccaagcaggtctcgaactcctgacctcaagtgatctgcccgcctcagcctctcaaagtgctgggattacaggtatgggtcctctccctggcagcatcctgcttgctctttggtgctggctctgttcttaccttctgatcttccttctgtttctcaggtagacttctgtcctgggcaagagtcgacctgccacattgagtatcacaatttgctaggtggtattgtttgtcagtggaagtgaataaatcagaatttccttagcatgagttaggtttcttgagttgtttcattcctgggggaactaataccgttaaaatttccttgacatttcaagaaatgatcatataccacaytgcaaattttgaacacagcagaggcatgatttgggtgtrgagacaccttgggaagcattgattcagactcagattcttcagattatctgatcagaacctcttgtcctctccaagaaccaaggtctgtgtataccttttccaggacactggtgaagagagacattcatttggtgacatccagaaacctcggcttcatttgttccttcctttgttcagcaaatgcttattgagtacatastttgtgccwggcactgtgctaagttcaggaggacagagaggaatgtaccagaacattggttatagggtgctgcagtagaggcaygtgtgtgatgggagtggaggggaaggaaggctgtcctaatcctgcgagagtggcaagagctgtggykagtgactcctcatgtaaaattcccactacagcaaacccttcagctgcttcctttgtcatctttccttaactcaattttattcctgcctaccacccaggatttgctactccttttgtaagggaactcgggatttggcctttcaaatctctgtggcagtagttcttaagcaggacagttttgctcactggggaacatttggcagtgacattttggtcatggtgactgtggagggataactactggcatctagtaggaagaggctaagaatgctactaaatatcctacaacatgtgcaaggatagccctagaaggaggcagcaggggtttagtggtcaagtcccagtgctgctctgcaatttaatagccatatgacaaagggcaacagaattgtactttgacaacagaattacacagtgctcagtttgctcatctgcaaataggaatactaattgtgcttatataatatgattgttgtgaagatttcatcagtgaatgtataagggcagagaacaatacttratgtgagataagaccttacttaacgagtatttttatttttagttttaaacaaaaactttaccttttgactctaaagagcttgagtttagagtatccagggcagttgagcttgtagccctacctgtargtatgctttggtgtaggaaatggccatagtttttgtgtttttctagttcctttttgtccgttggctttatttcccattgtctcatctcttgagatttttaatagctttgcctttcatcccttttttcccagggacccaaatttatgcccttaatgagcttttccctagagggctgagaattatatttatgattttccttagctctgtctattttgggaatggtgagaaaatgggaagcgggtcaggggagatgttgcattacttcctgattgccatagctcccttctctgtaaaatcccrtgaaggattgagaggcaggtggtagtgcttgcttagtaactcttccctttacacccaccagctccactcccaagttgggtgcctactacttccaaaataccccgtaattgggtcacaacattatctgcctgcttggaatcatatytaaaaatcaaagcaaagatgcagactatgtcagcaggatttgaaatgtttccatcctctgctttgaggctttgcagaattattctgaaaacaaaagaaggtaaacttgttatcccaatgaggtggcagtttctatgtggcctagaattatgcctaatttttgcttgtaaaagggctcaaaccatgatcctttctgactttccacagggatgtgagcttttgtggacatcactcaacagatcagatttactgttgaattttcataacataattgacttggaaagcatttcattcagtgttttgaatggtgactagagagaaattaagaagctcagttgttatatctttcgaattcctttcccatgacacagtcatctctcccctgaatgagagcagtggcctcctggcttatccagctctgttcactcagtttggcttcccaagtgctgggcactgttccagatgccacacgtggacactgaccaggatggccactgcctctacctgctcggagctctgggtctatagagaaaggctgacagctaaggaatgaatgacggtactatgtgatacgtattactgggagaaatactcagtgcttcccagacgagcacttaycctgcttgggtgtggggagtgtgtggggcaaagcttccaggagaagggatgctaagtctattccacagtgcacctggacctctatcttatggttccttaaggcaccctgactctagctcccgcatggagcctgctgtttctgaatgcgtgcctccaccttccctcccacctcggttgcttctcaccttggaggctgcacttgcctttttcctggtctctttctgtttctactgtacactgcctccaaggtgatcttctgaaatcttctgcagatctgggcatatcatcccaactcttcaggggctccttgctgccctcaggatgaagtctaagctttttgatgaggcaccgaacatatttcatgatctgctttccatctcgttcttacgacatgccagattttctctggcctttcggcttttatcccctgttgccattgcctgcgaccatccctcctgtctgttctttaccgcctttcagtactccttcaggaagtagcttaaacattctctgatatctttatggttcttgcttggcacagcaagtgggaaagtggacaaggtggggcaggctcactgaaaattttcatttgagagagtccaggatgggtctttttgaaaagcatgtttgttaagataaaacaatatagagtaaaagtgtttggttcagttgtcagggatgtgaggagacatccatcctaggctgctgatttctcatgcttggagcagtttccagaaagatgcagtggggtttgactgaggagaggattgatggagctggagacataaagggagacggcccaggaaacagttcacacaggaagggaaccaggcctggagtactggggagaattggggcttacagctcctggaggttcctactgtttctgggaacttagactttggggccctcttgttagtggtctctgtattcgtggcatttctgctctccctaaatgagataggragtatgaacactgaatatgttggatactatcactgtggagagggtctccatgttccagaattcaggggggaaaacctcctgcattcaaattccaattatttgagcagaaaatatgtgaatggggtgaaacaaaactaacactgactgttcttattcatgagacttggcaatcagatcactgtcattttcaaaaaatgcctcttttcctaagatttgagataatttctactaagaaaaataaaggaagttctgcattccatcagtttatgtatcattgtctcatgatcacagtcatctcctgctgacttgaattttatttcagtttaaatcattttcctttactagtactagatcctgctgttacgtgtacrcgygtgtgtgtgtatatgtgtatcttttttttacaagctgcaagtagaaataagaaacaaaaataaagtgaggtgttttattgaatttttatcttttcttcctcttagttctgaaaacatgtggattgcaagaaaaaccaattaaaaaaaaaaactgaggagaatgtggatttgtggcatgattatctttatttcctgtaaagaaaacaggattttcattagatcctgttgtgctgttctcccatgagagaaataatratgagatagactgccacatttggagtatatatacaattttgcttaacatttaaatgatttttatacgaacatttgtgaaggtttgaacgtttgcctacattctgcagccccagttattaacaatacagtgctgtcttgtcaagaacaatttctttatatcagcgaaacttcagrtagtttaaacttatttctacaacaggagagctgggtacagattttcattaaagcacatttattttacgttagtattgaccttgaaagttaatttttgaaatgctcagagatacatcattttgataaatggtcaagttaaacaacgcaatgtgaatgtttctatgtgatgcagttgtaaaaaatttgtttgcataaagccaaagattataagagaatgaatagaaacaaaaatagtatggtttcttggtgggattgtggatggttttgttggcgttatcgttcttcctccttcccaagcatccttagtgtttttatatcctgttagcaatgagtaaaagggaaaaaataattcttgtgtgttcatttttgtttcctctaaaggatgtgcatttcaggggtgtttctttaagcaractaattgggaacaaaagagaactggcatatgctaagtgaaattagccagtcacaaaaggaaaaatattgtacaattctacttgtatggattgcctacagtaaatttagagacagacagtagaatggcagttgccagaggttgcggggagggaggaatggagagttactgtttaatrtgtacagaattttagttggggaagacgaaaagttttgaagacgaatggtggtgatcattgtacaacaatrtgaatgtacttaatgctgcagaactatacacttaaaaatagttaaaattccaaggagaaattaatttgcactagactgaagctcctgggggcatgttctcacctcagtgcaatctgctgctgggtctgaagctccgaggagcsgggaagtcacagaccccaggagctgggagggtatagacgccactcacctgaacttgacaccaagctactcatccagacaggtttcaaattgtgaattgggtatgatctatgtggggcgtatttttggccgtgtatattactgacttgcactttggagataatttggtaaaaatgaacttgattggcatattctcaaaaactgtggcacctttcccatttaccctgctgagtgtattctcaaagccaagtgactagctggcctaacctttttttcttgcccatgttgttctaaagagagcataggctttatctgtatagatctgggtttaaattcaggccttactctgggatagacggatataggtgggtgccctgaggtgaacagctttttctccctgagccacgtgtgcttttcccatctgtaaaatatctttagtgatacttacctggycatgctgtgggaagggtttactgtgataacatgtgaaagttcttgctatatagagcaagtaatcaagatatttagccacttttcatattttgtttcatattttggagcattttggatttcagattttcagattagcgatgctccaccttttgtaggtttaaaatgctttttattcaactacatggtttgggtttttattcttacctgtctcccctcccttttattatcttcagaaaatacagatgacagtccctctgtgtttgatacttcatattacagtttgataggcttgggaaatgtatcagttgggatttgattctgggtttgatttgatcagcgtggtaaccctaaacaagttacctcctttccctacaggaatcttatgggatcctataggaattataaaggtcagtgtttaatgagccctccgtataaggcaactgtcactgtgatgaatgcactkyatggattatctcatttgatgctgtacttctaagaggtagatactgttataatctcctaatacagatggggaaggtgaggcacactaaggttgtttgagagcatgcagctagagttgcactagatgaagattaaggggccagaatttgcaaaggagaaagcactcagtatatgtgaatacacatgcacagatacacacatgtacacacaccctgaatattttcttaaaacacaagagctactagattgtaacactgggaattccccaggacgatagagaggtctaaggaccaagcagtgtgrgaaagatgtcagaagtgctacctgtatttggttgtaattgtagctactttgcattttttaaacaaagaaaatttctacatgctctatagagtgacacatacttttaaaggctgtaactggtattgcgatgttttctttaggaaaaaaaaatcagttatttctcaaatcattgagcattctgtcctgagaatgtgctcaggataatcacggaggataagttccagccgccaggggagagcaactggcagtctcaaaatattctctgtaaatatattagtctgaaaattgcattttaatgtggtgtactagtaaaatagaattttacttgctaaattattccatgttaatagtggtataatttttctagagaaaggctaattttatttaaaaaaaaaataggtcattcatttcttccaaaattattgaattatcctttggaataacctgttagtacttcctcttctatttcagtcagggtaatagaatacaagaaagctgattgaattttatgataagaatttgattttcagaaatgtcattttcaccacaatgtttgctttgaccagctttgctctatagtgcattttgacttgaatgctgtattttggtatttaaagtgagttaaggaacttacgtggtgcttttcaccatgtaggtgatgctagcgtaatatattcatttagttgtgtctgatgtcattcaaagagtaattcttgaaatgggttggttaacaatgatttcaaagagtaattcttgaagtgggttggttaacaattactcataccagatcatttccccaaatctgtctaaagggccaaattctgaattagcctattgtggaaatttctttgttttctagcatacagaggaaatcaggctgccagtgcatggtgaatgtatttctcatgatttagaagtgaacaaagtatagctgatgtagagcaaatgcacaagtttgccactagacaccggaagaacagtgaagctattaataagataaattcaaaacatacccttttacttgaataattatgtacctcatttatgtttttccttgaaggctagttattgtcaggttaatgaaaatttgaaagttgcatgtaatcttaaactgttagctgtagatcccaaagaatcacaagcttttaaaataaatgggcacctctattaagagtttaacaaataaaatatcaatgattataggttgctcttatcaaattatttaattattgttcattggtcaaaattcaaaggtgttgctttagtgcaagaaaaggaggtgcacaataaattagcagtgggcaggtaggcagattataagtactgcccttggaatttttttggtatattaactagcttctcttctagggaaagacttgcttttttatgacaaagaaagtttctcatgtatgttttggatgtgttccatttacctgtataaagagaaaccttgaatctcaaaccattaaccatttccttactctgaagggtagtttgagaactggcaaatcttgcatttataaggtaactggttaaagagactcgagttatctctgtgcatctctggagtcagttctattgagggcatctgtttgggttaaattgtgtcccccccaaaaatataacttgaagtcctaatacttcatatctgcaaatgtaaccttattttgaaaagggtttttgcagatgttaaggtgaggtcatactggatagagtaggttagggttcttaattccttataactggttttcttataagaagagggaaatttgtttttgttttgttttgcttatcctggcttgctttaagctttagaagaagagggaaatttggacacagacacacaggtagagtgtcgtataaagacagacacacagacacacagaaggaagacatgcgaagatggaggcagagactggacttgtgctgccacaaaccaagggatgcttggggctaccggaagcttgaagaaacaaggaagggtcctctcctgaagactttggagggatcatggctctgccaacaccttgatttcagacttctagcttctagaaccgagagagaataaattttggttgttttaagccacccagtttatagcagtttcttacagcagccacaggacacttaatccacaagcctttggagtcagtcggcctgcgtttgaatcctgggtttaccttctaatgctgtgatcttgggcaagttactgaacctcatggtgccacagttgactcatctgtaaaataggactaaaaagaacaccatcttcctatagttgttttgaggataaaacaatatatgtatagcactttgaacagtgcttgctgctattatatttcaaaaaccaattgtttcaaagctaaaaggaaatgatttttgataattctacaaatayctcctgaacttcctctttaatgacaggccatatgctagccagtaagtgtacatgttggcccaggcagacaggatccctgctttcctagatccatcaggcgcttattcctccattaacatgaagaagaaggacatgttccttgtggtagcattatgggcaagagctgggtgtagcctttcctgtggacctcagagacatgtattagggaggtggtgaatatggagccagactgcttgggtttaaattctagttcttatcagctctggccttggggagtgatagaatttttgaattatttctctacctccacatctgcaaaatggagacaataatagcgcctttctcagtagggttattgtaaggattaaatgagttaaaatacttaaagtacctagaatagtcagcacgtaatgaatattgttatattatcaaatgaaaccagaaaggcctcaaatttgtaaattcattcttttgcattttattaagtgtagggagttaatgcataaatcagatggagctcttttccacatagagctcatagtcaaatgggggagacttattcgtctacaygttagtgaaatagcatatgaacaaagaatatgggggtagaaagaagagtgtgattaaatctcctaggagtatcaggaaaagttgttttaagacgggttttgaaggttaagtaggagtttgccaggcaacaaaggcagaatagagcttagaggatgtgggaggaagcatctctaaagacgttggcaggtacagcagacacccagcagtcacagtgctacaagagtatagactctggagccaggattgaaattctgccagttactgttgtatgaccttgagtcactttcttgacctctctgtacctctgtattttcatcttttaagtggggatcacaggctttgggtagataacttggagtgcttagatcagtgtttggccaaaataagtgctcagaaaatactggcttttattagtgttattattcttgtatttgctattggaagataagcattaagaaggctcatcaaatatttttagttcagttcagtgattcctgtgggcttggataaatgctgcggccctgagcccatatactctcttgaaaacaactttcaccatttgaacactggtattaagaggggaaaaaataacatgcatattgttcgagcaggagaaaaaaatattaaaataggccagacattggcacaaagttgtgtacagattgctgattaggcaaaataaaaaaaataaaccggcatgttgagccaacatgattttgttgttaaatctggtgaaccacctgtatctttaagtgatcaatttaaagatagttttggtttgttgttaattgtcttcaaattacccagtgacatcagtctatgttcagaactaatacaatttaaaaaaactagtgctggagcacaccctccgtggtggtgccgcctcacttgggctgtgttcagagggggaaaggagtgtgtgggatttcttcggccacacatttcagagctatgatggcaaatgcatgatttcaactgtggtctcacttagttttatttttatttttgaagaggaggattatttccaattgtggttttctttgatcatgaaaggaaaatgtgctcatgatggcaagagtcaggcaaaaagagactaaaaagtaaacatcmctagaaatttcaacatttggagataattgttaacacttgtggtcaaaccttttaagcctctccccacttgcaaaaaaaaaaaaaaaaaaaaaaagcagggggcttttctcaacgacaggaacagcaaagaccagcactggatgtggggcagtgaggttttgggggagatgcttaattgaaaattgttttggaaagttccagacaaaaacagcaaaatggtgataatggaatttttttgcattgaatgtgtttaaaatctttgcgataataagtggctgggcaaaggttacctatgtattcatccagcatgtgtttattgagtacccactaggtgctaggggtatagtaagtggacacaacagatgaaaatctgaactttggtggcacttgcacccagtgtcaggactatagacagtaactaaccatagtacgtaattgacattacaaactgtaagtgctgtgatgaaaaatgaactagacggggggatgggtgatcatgggatgggctaggaggggatgtgatttttttttttttgagacggagtcttgctctgtcgaccaggctggagtgcagtggcgggatcttggctcactgcaagctccgcctcccgggttcacgccattctcttgcctcagcctcccaagtagctgggactacaggcgccgccaccacacccagctaattttttgtagtttcggtagagacggggtttcaccgtgttagccaggatggtctcgatctcctgaccttgtgatctgcccgccttggcctcccaaagtgctgggattacaggcatgagccactgagcctggccgggatgtgatttttaaatcgaggagaggacttgaaagagttgagggaggatcccctgggttgtgcatatggcgggaaggggtattccaggagtggaggatgtcagcagggtgggaatgggatcagtgaggggaggaggagcagaggagtcagaaggatctaagggtagggctgaaggtgggaaaacaacstgtagggctgtttaggacacggaaagggccttgactttgctgccaacgaagatgtgaaggctccaggcaagggtaacaatctaacttacattttatgagggtcctgtggcagctgtggtgagaacagactttaggggtgctgaggtggatcagggagacctgtggcgaggctcttgtgtggtaatctggtttgggagaatggtggagaactggatgcaggtaggagcagtggaagtggcaagaaatgactggattctgaatatttgttcaaagtggagcsagcacggtttgttgatggactgaatgtggggtgtgatagaaagagaggagtcaaggacaattctgaggatcttagtcggagcagctggaagcaggaggctgctgtgaatggagatggaatggagctggttttggtggggatttcagccatggataccatcatttgaggtgtttcatcagcatcctagtggtgatatggactgggcagttggacttacgagtttagagcttagggcagaggtctgagaggggcctgtaggtttgggagtataacggtcacccagggagggggtgaagacggagaagacttacatagcacggtcaggttagggctggacagatgaggaagagctagcaaagggggcttgaggagcagtggccactaagacaggagtgtgacatcttagaagccaaaagaagaccatgtaattcaagggagaggtatgatctgctgggtcagatctaaaaataaatcacacgtcttcttaaactgtagtaattaaccactgaaaacttatgagtgatccaatattacgtaaataaaaaaagaaaaaattaaaaaaagaaaaacgagtgagtgagtattccttagattttatcttacttcaatatacagaattgttttaagtattcagtacaaattcctctgttctctcttcccataccctagaggtctcattgttaatagttaatagtctggataacctttcagatgtgtgtatttattttattttattttattttttgaggcaaggtcttgctctgtcaccaaggctagagtgcggtgacatgatcttacctcactgtggccatccatcctcagacgattctcccacgtagcggggactacaggcgcmtgccaccatgcccggctaatttttgtatttttggtagagacagggttttgccatcttgcccaagctggtctcaaactcctgggctcaagcagtccacctgccgtggcctcccaaagtgctgggattacaggcatgagccactgtgaccggccccagatgtgtatatttattttatctatactgatatctgtatatctgtatctataaatgatctctcttcttttcttttttgagagagagtttcgctctgttgcccaggctggagtgcagtggcacaatcatggctcattgcagccttgaactcctgggttcaagcagtcttcctgcctcagcccccggagtaactgggaagacaggcacacaccatcacatccagctaattaaaacaattttttttttttttgtagagaygcagtctcactgtgttgcccagaatggtttcaaactcctcaaagattgggctcaaagttcgggctcaagtgatcctcccgccttggcctcccgaagttcttggattacaagcttgagccactgcctggcctcaatttcactcttaacaaaatatttcaaatatacaaataatctaaaaagtggggactaatgttctagatactgatattcctaccacacccatcagaaaagaaatgcgaacactgttctagatgttttcagatttatctttacttctccattattgcagttatttttactatttttacttgtgccattcaacatacaccctcttacaactacttgctagtgtgagtgcatgggtgtgttttctctctctctctccctctctctctctacccagactcttctaccctgcctagggctatcctgtgtttttcagacagttgctgtaacagcagcagtggtggttctgtatccaactgggtcctgggagacctgcagaagtaataatgcagaaaacagcagcctccgcaaggaacatgttaagctcactgacaaaaagtagcttaccttggggagtccctggtttccattcggagagctcaggagggcctgtgggagtaccatggtctaggggtaggactgaggttttggtgcccttcagttctttctgcatatcctagctttgtcaccagctgtgaccttggacaagtgacctaagctttatgcatcccagctttcttcatccagaggactgaaaatagtaattgcctccttgaaaggttgttgtggggcttataggaaataacatatgtaaagtgcctaagaggcctgtcacagagtatgtgccagttacatttgttctttttccaggtctttatcatcttttccctattttactgttaagttagttggtggacaaaaaagattgagaggtacattatttaaataaatatgctttggttatctataacaggatattgaagttagacaattttagcgcataaaataggtgaactgaaactagagctcaaccagtttttgcttttgtattttaaaattttaaatacagtttcttagccagtaagcctttaggtttcactgtgaacacgttcattgtcaagctcactactagaaatcaaatggtgcctttaacctgtggctctcaggccaccccacttggcgagtgacttggattggtgagaaccctcttctttttataaaaaagattatttaaaaaaatcatttataaggtgtacaacatgatgttatggtatgatacatagagagtgtaaaatcattactatagtgaaccaaattaacatatccatcatctcacagttccccattttttttgttttgtttttgtgccaagagcagctaaaatctgttcatttatcaggaatcccaaatatagtacagttcgttagattcctagtcttgttcatcctacatatctgctactttgtatcctctgaacctatatttccccacctcccccattccattccactgttttattctctatctctgtatgtttgatattaaatttttttttaagattccacatataagtgagatcatgtggtgtttttctttccgtgtctggtataataccacttagcataatatcttctaggttcgtccatgttgtggccaatggcaagatccccttttttaaggcagaataatattctgttgcatgaatatatcacagtttctttatctgttcctttgtagatggacacttaggttgtttccgtatcttggctattgtaagtaatcctacaatgaacatggcactgcagatatcttaatgagatggtgatttcatttcctttgggtatatgcccagaagagggattgctggctcctatagtagttctgttttgagtttctttggtaacctccatactgttttccataatgactacaccagtctatattcccaccaacagtgtacaaacgttcccttttctccacaccttcaacaacatttgttatctcttgacttttttgacaacagcattcctaatgggtgtgaggtggtacctcatagtgcttttaatttcaatttgcatttccttgatgattaattgatgttgagtttcttttcatatatctgttggccatttttatgtcttctttaggaaaaatgtctatccaggtgacttattcattttttatcaggttatttatttttctactattgagttgtatgagttctttataaattttggatcgtgaccgccatattaggtatatggtttgcaaatgctttttcccagtctcataggttgccatttcattttgttgattgttttctttgctgtgcagaaaaggttttgatgtagtttgatgtagtcccatttattaatttttgcttttatgacccaggcttttggcgtcatatccaaaaaatcattgccaaggccagtgttaaggaacttttcccttatgttctcttctgggagtctttatggtttcgggtattatgtttaggtcttttatccattttgagttgatttttatgtatggtataagataagggtccagttttgtccttttgtgtgtggaaatccagttttcctagtactgtttattgaggagactatcctttccccattgtgtcttcttagtgtgcttgtgaaatattagttgactctatagaaccatcttctttcacacttggatttttaaaggagggttgggggagaaataaaaataaatgaatgcgtagaaataaactttaaaaagatttgatagctgttgatgttgtcagtggacaccaggttgggcaggggaattagattgttgcagattgttcataacctagccacgtggttcgattatgttaagcacataggcattaataagggggagagaaggctgtttattggttaaagtggacaaaggaggaaaatacatgtggtagaagttgtccaccctcctcatcctccccactccagtcctctggtcccatgagtgaaatattttatcagtctgagcgttctccttcctggataggcaaggctgctgtcaktgagatgtttttgacctcttgggtgtgacctgactccgctgggtccctgccaagcttctcctcagagagaattgaatcgatcaggttgggtctcaaagcatggtccacatgggaaatgatgggccaaccacagctctctggtttttcttctgctagcctttttgctgctctcgttcatcagaaacagcagaccagcgttggtccatttcttcaaagctccttaatcagaagtagaggattagctttctttggcttttttcttttcagatcttcttaaagtgttttactttgtatggcgcaaccactttatgttactttggaggtaaagtttagctgactccaggagtcaagccgtgtttttatggacaggtatgtgtgattagtatgaagttgtcttgtgcataatctatgcaacaaaatacacttagtatccaaacctaataatacaaaggtggatgcatatcccttttccatgctggatacttgctcttcttttcctacctcttctgaggagataatcacagaactttaagaaatagcctttgtagctgggtgcggtgcctcacaacctgtaatcccagagctttgggaggctgaggcaggtggatcacaaggtcaagagtttgaagaccagcctggccaacacggtgaaaccctgtgtctactaaaaatataaaaattagccgtgtgtggtggtgggtgcctgtaatcccagctactcgcgggctgaggcagagaattgcttgaacctgggaggtggaggttgcagtgagccgagatcgcggcactgcgctccagcctgggcgacggaacaagactccatctcaaaaaaaaaaaaaaaaaaaaaaaaaaaatagcctatgtaggaaattcttttgatatagtaagttttagaaagcaaatatactacaatgaaataatactaagcagtatgttaaactatgggacatttttatttcttcaaggattataacactgggggattatcaactttctaatgaaaaaaaataatagcacgtgtaagattggacctatttggataattaaatattaatgaaagaagatgtgacttttgatttttagccatgaatttttaagggacttctatttgaagrcatgctgaattgtttactaaattcaggaaacagttacagattttcaaccctgtgctgaggcaacgtgcaggtgcttaggagacaaaagagaatgggccccaggcctgtctcccaggggttcacagacagtaagtgttatcgtggagaaacctgttcatgtaacacagaggagggatcagttagttttgtctggggtgttagagaaagaagaagaaaggaaatgacttactatgtaaggaccacagttctatggctgaagaatctgagccatgtccagaatacttagctaatgacttcctcaggagagagaagtataccgctatttacttgtactgaggactttaatttgttgagatgcttttattgcttgattttctgaggttaggctgttttattgttaggtagcagcagccagagagctgttttcggaggggatttactgtcactgtaatgctctggggctgggagacttttatttacccattaaccttttacattaagggaaagcacacagatcttaggtgtactgcttgatttttccatatatatgcaactgtttagccattacccaggtcaagatagataacattcctatccctcctgtggccttcctcctgccccttccagacagtacccctcccattgtatctttatcactgtaggcaagtgttccctctttgaacttggtgtaaatggaatcatgaagtgattcagtatgtgctttcattctgaccacgtctgtgcaaccatccacgttgttgtgagtagcaacagctcatgtttttcccactgtatatattatatgaatatacttcagcctatccactttactgttgacagacatttggttttccagtttatggctactgggaataatgatgctatgaatattcttgtatttgcctttggtagacacttaccaggcatttctgttaggtatattcttaggagtaggattgctgaattgtaaggggtgtgtaggttgtttaataaagtcttccaaattggtggttccagtttacattcctaccagccatgtatgttgccaccactttttctttttttgaattgagacggggtctcactgtcacctaggctggagtgcagtggcatgatcttggctcactgcatctgtgcctcccaggctcaagcaaacctcccgcctcagcctccctagtagcccagactacaggcacgtgccaccacaccctgctagttgccaccacttttaacccggttagaactgcctttgttccttaccttagttcacataagcatccccacacccacaggcactgttttagtctgttcaggctgctgtaacaaaatactctaaaacaacagacacttatttctcacagttcgggaagctggaaaacgttcgagatgaaggtgctggcagattagggtcctgctttctggctcatagatggccatcttctcactgtgtcctcacatggcagaaaagggccagaaagctcgtagaggatcttttataagggcacaaatcccatccatgagggctgtaccctcgtgatctaatcacctcttaaagaccccacctcccagtaccatcacatttggagttgggattccaacacatgaattttggaggggaacaaacattcagtctgcaacaggcaccacagctggaaatcttcctgcctctttaagattcttttcttttacttcatggaggtagcttgtcaatagggctggaaatgtctctggaacctgttttctttttcagtccccagatgtcttcatttttttctcaccttcatgatggcaaagcctgctaattggttgttctgtctctagattttcttttctacaagccaacctccacatgttcccctagaatagaaagatacataactaaaagcacctatcacagtttataggcactttaatgtgaattgaatggaaatctgatttaaaactggctgtattatacagtctaaactcttttgcataaatatgtattggaaagagttaaggagtaatgatttttcatgctattgaggatctcatttgggaaaaatataaatatataaatctcaatagatgtttatgtatgtatacacatatatacatacatgcatacatagaaacttttttcctttgcctctgcagtgagatttggattacaaaagaagctaaagtacaaatggataactcatgtcacataaatgaattgagagtactgtctgtttaaggatctttcagtttagattttaaaagttttggttgataataataaataactcttggttggcacttaacagtttatgaatgtgtatgtgtgtacataaatgtctgtgttgcttatttaattcttacaatgaccatgttcaatagatagtattacagtattcttttttgcaaatgaggaaatagggtctctgatgagctgaacagtcgtccagggtaacatgaattgtacttgatggtttggtaaagataacaaagccttctgaattcatagcccatggtcattaaattcatttatctcctatctgtgtatgacttctgcagataagctctgaacttaagtttgtgtgtataatattagcctattggtacaactgtgtattattaatgttgtttgtttttctcaaatttaaaagactcttatcttttttcatgttataaaaatggcatggtttttagtaggaaacacagcagtaaataacaaagtataaaaagccattttttaaaaaatcacctgaaatcccaccattttgataggtgttacattttaatatttggcaagtaaaggactgctgccttttgctacctgagatcttattttgtatcattgtatcttcacttcattaggaaaacagttcttacagaagctcatctctgacttgattttatttctgtgctggggttgtttgctaaaacttgaaataatcttaaatgaaaasacaaaatacaaaatagcattctcatattgatgattcctatatgtgtgcagaagctaggaattttagtgataaaattaagttctttgttgctatgcatcttaaatatttgtttgcatttcaaaggaacatatagtacagtcaaatgcatggatttggagtctgacaagtttaggtatcagctctggcttcataatgtcctagttgtatggcattgagcatgtttatcgattaatacctacctgatagggttgctgtgaacacccaacagtgcaaaagtagttgtagttagtaataataatagtgctgtattaaatgcaytttttactcatgatattttcaatttatggtgggtttattgcaatgtaagtcaagggtatgggtaatgatggtgctttatttctagtcagcagtaatttgtttccagataaagtagagatctgaactacaacagtggtaatactgagtgtttccataggattgtatagactctgcatttttttgagtgaaacagttgttgacatagtgtaagggttgacacattgtatttttgaacttcttggaatctgcttaatggcaaacaggttgctgagaaccgaaggtcttagctgcaaagtgagcatacatacacagccctgcaaagctaggtgcataccagacaagtgaataacatactaattattatcctaccttggtagtaatagaattgtagcttcaggcactatgtaagacctagctttttgagctggcaaaatagtgattactatttttagttcaatttctgctctttaaaaaaacatagtatactacttgctactcctggatggttttatgtattttaattaatgttatcttattgcatttgtaccctgaggctgctttagtgaaagatataatttcagaaggctgatgaaattagataggtctgactaggaagactctgttattcatatttatggttataaaatatttcgggtacatctgtgtaagacattcttgtgctataaacatacagacactgttgtgaatcaatttgccttagagtgtggtagagtagttacagaccagtatagtagctctagtgtgggggtgatttgttgtttttgttgggggtgtttttggtattaaacatgactttacatttttcacttgaaatctcatcgtgcagtgctgtgtaaagaaatgaaagtgattctaaaccaaacacacacaacactcctcagctctattactttatagtcaggcttaacacattctgatggaattggcatgaagtacgtgaccaggtagaaatcagctttatttggtctaaatgactagccggttatagggcatggaaaatctattttaaatcactttccagagccaaatgcaattaagatgttgcaataaagtgaaggccaattctctgagaaagaaagaaatactattttgaatgaaaaaaatactattttatttgacatagtcaataaagaagaaaagctataataaactatttataatgataatgtgcagagcagagktttctttgaaatgggagttaagaattacataaaggtgtcacagagtgattgaacagttactatacagcatattccctaccttaaaggttagggtcctgaaaccctctttatggtagatcttgtggttgtgaaatttgaaatcttagggggaaaggtcatgggcatcaagagaagaagtgaaccttaggaaaacttagtacacattgtttttaagattctctgaaatcaatagcaatgtgcattttagaaacctcacacagcttcattgtaatgctgtgtattccttttgctttgtgatacataataaccatattaagatgcttttgttgtatccaggggccagtcatctatccaaatacttattgccctttcttctttctgctctccttcatccatccatatatttccattcaatcatttctcctttcctgcgaggtgccattttaggctttggggatacaatgaaacaaagttcctgccctcagtaagattacactctagtgaagggagatagataagtgtctcaggttggattctccacaggcggacgctgaaatggagtttgggaagcaggatgtttatttgcgatcaattcctgtgaacaggaggtggaaggagaattgtgcaggggaagaagctgagctgtgatgcaggtttggcggagtctctgccaaccttccagagagctctgcagtgaatgtcacctctcagagtgtcccacacagaggtgtggactaccctgggaaggatgtgacctcaggcaggtgaggctgcactctgtagccaaggctgaccccaaggaactgagtcatggacgctgtttacctgcatttgctcagcaagttctttctttattgggggatctagcaatgcatctcccagtctgccacaataagtacttaaagtacctggtggtgacacacaatggagaaaaataaagtggatgagggggacagacagtgttggagggaggagaaggccttaaggagctatttaaacagaggtctaaaggaattaagggctctggggcagagtggtctaagcccagggaagagctagagcaaaggctagacatgagcctggcctgttggaggaacaataagggggccagtgtgtgagctagggtatgagcatgtagggtcttttggccattgccttttatcctttatgaggtggtgtattactttgctagggctgctgtaacaaactactataaactgggtggcttaacccaggggtcttctacccccagccagggatactggtctgtggcctgttagcaactgggccacacagcaagaggagagtggcaggccagygaatgaagcttcatatgtatttacagccgctccccatggctctcattaccacctgagctctgccccctgtcagatcrgtggtggccttagattctctaaggagcacgaatcctattgtgaactgcacatgtgagggatctaggttgtacgctctttatgggaatctaatgcctgatgatctgtcgctgtctcccatcactcccagatgggaccatctagttgcaggaaaacaagctcagggctcccactgattctacattgtgatgagttgtataattatttcattataaattacaatgaaataataatagaaataaagtgcacaataactgtagtgcgcttgaatcatcatgaaccgccccctcccaccccctgcaactcccccagtccatagaaaaattgtcttccatgaaacaacttcttggtgccaaaaaggttggggacaactggcttaaacaacacaaattattgttttacagttctggaggctggaagtctgactcaggttattggtagagttggttccttctgaagatcatgagagaaagagaatctgttccatccctctctcctagctcttggtggtttcctggcaatatgtggcattccttggcttatagatctctgccttcatcttcacatggtgttctccctatgtatgtgtctctgtgtccaaattttccctttttataaggacatcattcatattggaattggggcccacctaaatgacctcatcttaactaattacatctgcaatgacattatttctgaatacgatcacattctgtggtactggaggttaagagtgtaacatatgaatttttgagggacacagttcaacctgtaacaggtggaaagccgtcaatgggttttgagcagaggaatgatgcaatccaacttaggtttataaaggatcactgttttgtggagaatagaatgaaaggaggaagcagagtcattgtaaaaagccaggcgagacaatggtgattgctgggccagggtgctagagagggcggwggtgtggacaggttccagatataaggtacagctgacagaatttccttataaattagatatggactgagagagagagaaagagaatgtaagcatagacaaggatggctctcctgggcaactgcaagaatggaattgccatttactgagatgggcaaggtcttggaagaagccagtttggaggtaccattaggagtttgatttaggacttaggtttctgatgcttcttagacattggtatggttaggctttgtgaccycacccaaatctcatcttgaattgtattccccataattcccacatgtcaagggagaaagtaggtagaggtaattgaatcatgggggtggtttccccatgctgttctaatggtagtcagtgagttctcacaatatctgatggttttataaggggctcttcccccttggcttggcacttctccttcctgctgccttgtgaggaaggcgccttgcttccccttcaccttctgccatgattgtaagtttcctgaggcctcccagccatgctgatctgtgagtcaattaaatgtctttcctttataaattacccagtctcaggcagttcttcatagcagtgtgaaaacagattaatatagctattcatgtgatgatattgaataggcagttggatatatgagagattctggaatccagagttcaaagaagtttcagctggaaatgtgatttgaaaggcagctatgttcaccactataccaccaatactggagatgtgatttataaatcatgaatttgtagaaggtgtttgaagctgtgagattaaccaaggttaccttggtgagatcaccaagaaggcaggtactgaatgttcgcaattagagtaatcattcagtagaatgaaggttcaaattgaccattggctttggcaacatggaggtyattggtgatcttgacaagcagttttgatagaatggtargaatgaaagcctaattggagtgagctyaatgggaggagagaaatggagactgtaaatatagacagcccttgactttacaactgtctctcccttgtttatcctggagatgcggagtcactaggatgctagagatggaaagatctttatgtgaccttcttagaagggaagttaggtacttctcacgcctccttttctgttacaaggttatttaactctacagagtaaagatggcttcatgccaaagtatgttatggtagtccctttcttttttctttttctttttttttttttttttttgagacagtttcactcttgttgcccaggctggtgcaatggcgtgatctcgactcaccgcaatctccacctcccaggttcaagcgattcttctgcctcagcctcctgagtagctgggattacaggcatgttgccaccatgccgggctaattttgtatttttagtagagacagggttgctccatgttggtcaggctggtctcgaactcctgacctcaggtgatccactctcctcggcctcccaaagtgctggaattataggcgtgagccactgtgcccggccatgctagtccctttcgagcaagttctagctcctttcttcctaacaggatagtatattaatactgagttcttaaggagtaagagtgtgttaggcttacatagaattagtcatgaagtcataagggaagaaatatttgacctaaaaggatgtttactgcgattcacttgcatgaataaagaaaatgaagaaattatacataattagctcttgggataatttacatccaaaaacaattttaagcacgtttcaatttcttctttcacgtgtcttaaaatcaagagttataagcaaagtataattaacccacttgagtttcatcgtctcccattatccaaggtaagggagcggaagacccaaaaaggcaaccgaaagagtagcgtgaaacaaaagggcccttgagttgtagccttgcccctggcaacttccccaactccccacaatggcttggtgaaacagtttaggaaaaactctgtgcctgcttggaattgaatgtgggtgaaggtgtgaacttaagctttcagaaaacctgtgcaatttcataatcaaaggagatattaaatgtttagtttctacaaggccatattagctcttaaaaagattttttaaatgtaattgwtgggattaaatttgatcactgacgttcytgctcttttgaagagagcacctattctgttaacccataggattcatttgatcaaatgtgatttttttttagatgaaagggacttctttcaggggttcattcttctccactgagttcacagagggaaaaaaggaaggaagtagaattaaactatacaatgaaaacagctttggatttaatacaggagaagcttttcttaatgaggcctcttgaggatggtcatagtgtaggatttgtaaatcattcccttgtagacaatcaaggtaaagtgatcaggagtccttgaaggtgggaggtcattctggtccactggaagacacaagaaaacatgtgcccacatttactgtttagtagtttttgtttttttgttttagagacagggtcttactctgtcacccaggctggagtgtagtggtgcgatcatagctcactgcagcctcgacctcctgggctcaagtgatcctccagcctcaccctccctctgcccccccatcaagtagttgggactacacgcatgtaccaccactatgactggctaattcaatttaatttaatttttgtttgtttgtttgtttttttgcagaaacaaggtctagctaagttttacaggctggtcttgaacttctagactcaggcagtcctcccgtctccccctcccatggggctgggattactgacgtgagccactgtgtccagccaagtttactcttaaggaccctgaatcaagcacacataaccccaccttcatgcaggtttactttgatttattcgggattcacaggaccatggtgtttaaaagcatttgtgtccttgtaagagatagcgaggagggggtcaggcatgctgccttacactgatggaagctcttcactaacccaaacctttgcccacagagacaaatgatttctcaggtttgtgtccattctgagagctgttttgttcctgtactttccctttttgtcttatctgatgttggtctcttaaattcagcattgaaatttaagtatgaaagaaagagaaggattagttggatgttgtttgtattaaattctctaatgagttaacacgttatcaagtaccattttgtttgctttccctgaggttttaaaatattatttccaagataagattcccaggcagctgtcttccttacttctgaatttatatataatctagtgttattaaccctttgtagttcttttttatgccagtatgtgtctgttttgggaatttttaaataaagccagctgtgttaaatattcacagaatcgattttcacttgcttaaagtctttagtgatttatcttcagggagtattaatacggcagtaattctgcattacatttcttgtaccagcatttaattgatgctatatttcatgaggattattgcaggtttattgctgttatatttagagttgtggttctgggctggtaatctagaagcgtgagattcccaaatctgttgttccattttaattgtgtgttcttttgagctgacaagtttgagaagggctgttaactatttaacagacctgatagataaaaactattttagtagagtagacctggggatactttacctgtgtatgttgtgtgaatctatttttttacatgacggtagatgaattgaatctatacatatttttaaattgatatatatgttgatatgatttatgttaggtgttagtgtttgatttacttcccaattgaggtactcggacatctcaggctgtgtgaatggcagcagttgtattgtgttttaaaacaggttaatttacattgttgttctctttgagaaacttcagtagtttctcagaacattagaacacagttctccttggaacctcacactgtatgacacttggcaagtgttcrtcattgtattgaaagaacaaatacatgtctgtagaacagaaaactttttgttgagcgagtaaatggatgtctgtgcaatagacgtgacacgtatacaacacactggtggaccctcaaggaagaaggagagtttgcccatcaatcacagtccttaataaatatttgtttaatgaatgaaaagtaggaaaagaggtaggaggcagttctgggtgggtggaagggaagtgtaaaaactgcagaggcagaaaagtacaagacaaggttatggctcaagtatttgtattggatttaacccaggcagcagaatgttctgaaaggaaccctagactaggagttaacacacttgggtctttgccacttattaagaatgtggtcttgggtgactcagtgaacttttgggccttggttttctcatctgctctggctttcttccccaaaagcttactatgaaggtcagatgagaaaatttatgagagaatgttttgcagaccctcaagggacatccatattagatggtgatgtgagccttgatagaagatgaggttcattcatccaacaaatgtttactgagcacctgcctcgggccatgcactgtgatagatggtggcagtacagtggagggtaaaacacacaccttatctcctggcttttgttctagtgggtgagaaagatatttatcagtcactcaaatagagaattacatactgttgtaagtactttaaagtacagggtaccggaggctccattctagtctgggtgggtttgaggcttctcctgtagatgtatgtagagattttaaagatccttagtaggagtgacttaaacacaacattgctttaggaagtttaatctatttggctacctgtaggatagattgacaaaggattggagtctggaagaataaaaaagttactgtgctgtatatatgtatatttttctttacttggaattgtcttgatgttttgtttaatattgatacatgtgggtaaggttttctggagtcttgatgtttatatggtttgcatttggtgtattagtgaacatctatttttagttagacatgaagttgtttagcataaagtgttagtaaactcttacgtaggttcttctgcgtgtgagaccctgtacttagtgcttcatatatacaggttgagcatctgtaatctgaaaatctgaaatccaaagtgctccaaaatctgaaacttcttaagcactgacatggtgttcaaaggaaatgctcactggagcatttcagatttcagatttttggattatggatgctcaaccggtaagtataatgcaaatattctcaaatatgaaaaatctaaaacttgaaacacttctggtcccaagcattttggataagggatacttaccctgtattaactcatattaactcccaacaaccactgttgagaccatgttattcaaccatattgtcctcattttacagacagggaaactgaaacttcccaggctgtgcagctagtaggtgggacttggacccagaccaggtgtgtgtccatcgctgcattatcatctcttcataaaacaaagaatttaatattgtatgaacgaagataaggtaacctttaaataaccactgtgaatccctttgtttcaatatatttcattcctcttgatttttaaaataaatatttgttaattacaaaattaagaacaaaacctattttaaagcaaaatattttttatgttacagtttgcattttacaatgcagaatgagaaaagcatggtagttcttgatactgctttcagggctgcatagctccccattttttccctttgtttcataaccagaataactgtcagctgagtcagtgagtgtccagagctgttaactgtggtagatcttgtttgcctcctgtctttcactgcccagaaaagcttcaattctgtatcatctgtgcattttagttctagggcagaaaagtcttagagcagatagcatctgtggtgtgtacttaaactgaccctctgaattcacagatgggaaccacaaaatgaaggcaaccactttccatggtgttaattattggcagagccagaaccaaagagcaggacccaggacatcagcccagtttcccccatggcctatttagacattgctcattttcatgcttttttttttttttggtacactattttcattcaattgcatttgtgtaatatatttgacagtgaaattttgcattaattcagctaagtcctgaagtagaggtgtaaggcatgctctggctgttttcaaaatgagttcatattcagattatttcaatttagatattaataagatctcaaatttttttcttataattttagtttttgttaacccaaaatgctttatgaaataagctgtcttgtgttattttccctcattgcattagcttttcatttgttttgcttctttttcttaaaactttgatcctaaactatgggccagtgtagataagctacaaaatgtctgagttcagaattgaactaaacccatggttttggattactttggtttacggccagaattactgacattttttgtagtgatagtaagagaaaatgttttgcagtgtctcataagggactttttatatattactttttgattctgcttttgttttttgacctttgggctggtaggtgggggccaagcaggattgggagggggaagaagctggaagtatgctttctgtctaatgtaacccagcttgtcctctgagggctctggtttaatttggttaatgctgtaaactgctaaaaaaaaatacattctttatgggaattgggtgtagatataatgttactaggaaagagacaataagcttgcagttttacagatggtctcattttctttatttggttagaatctctttttggactctttatgctttctgtgattggtgtgagtctttctgtttttattttgtccgtgttttattaccaactggttatatttcagtaacagagccagggggaccagaatctcttaaatattctgtacagaattttgtgtttagagtgtagaccctcttatctgggaatatcatgaccagcagctggttagttatttaaggtggagaaatgtgaaaaatgttacattcatgtcttaaacattttatttcaaacatgtttgctaatttctgatatggggccaagtcctgataagtggcttccatgttggttttgtacataaacttcacctatgatgcatgatctacacagttttcagtttaggttgctttaaagtaagaactttaaaatacttgtgaatatcttgagtgtagaatcctagatttttatgatttgccttccagtcttttgctgttttcttcctcacatctaatatcatggcatttattttagtgtttaacttttattgaattattccaaatcattcaaacattcaacttcattttcgttgaaacattaatttatctgaataaaaaaattaaaaaacwttcatttctctgaatattgtgtttatatacaatttactatgtgtttatatatttaaattgtaagaacaactggtgtaaataggaataaacatatctgaccatagggaatgatacagcttgattggtgggagcagatcactactttttaatctgtatgtgatgaaaatctagtcttttttatttccaatcttttgtggacctgtacttttacttaaaaaacaaacaaacaaaatacaagccttattttttaaatttatttttaaaaacgacagaaataaagttacattttaataaatgtagttggaaaaaacagaatatagggaagaatttctaaatgtgtactttgaaagtgtacatgtcttggcaattcacaaagaattactgttactcttgttaatttttattccatttataactaagcaaaaagttatgagtgaaataatgattcttcatattaaattcctctgtatatactttgaccaaactctrtgtatatcaatatttagagtttttaatgtcacaaatgaattcccatcttgcttgttaacctatctaactaggctgggttggtgacaagcttgtcttgaggctaatgtctatccaaactatttctagttttccttaaataatactcatggtagaggaactgatcttatagagggatgtggatgataatgaatgaaaaaagacattttaaaggaattctggaacgctcaggatattcatttttaattttactccaaaatgatgtaagtgatgctatcgtgtcaaaattcatcttcagtccttcttcagtagccagttccaacaatatatcctgtaaatttatgtttaaatttaaatgaacttttagtgttaagaaatggattcctgattttaatactttcgtactgcagttgactaaccttaaactatcatatgtggtcacgtagttcttcagagcttgactagtaggtagctggtgctgcatgtacctcacaagatcagcaacactggagttggtcaatgaagcgagtcagatacttaggcccttaggtgatgcaaccatgtctaatggctctgtatgtttctaaatgccttctcaccatttttgtacttacctcatgggcaactggtaataaacagttggcagactagcacccacctagaccacacattgagtagtcttgtgctcaggtagagtctcctactagttatgagctgctagcgtgctcaaacatcagtcatgttctgatgtaggatgcgccggttaatttggcagggtggttaagcagagatgagttaagggagcctctcttgtgtaaacattttttttctggggagcaggtttatagctttcttgagattctctgacttaaaaaaggttaggaactgcactatcagatatgtgtgtgtgcatgcttgtatgtattatattaatcccgtgattgtgaggccaatagaagtctgcttagttatctcttaagaaatctcagtagttgattcttttgtcctttgcctgagtatattgcctgggcccaggaaaatttatctgctattgcagtttaacacaccctgaaaaagtgatcagcttcggtgtttcagtccacagttacctgttaactaagatgattttaaacgagaatcgtgtgaacagggactacctaggttagctgtgatttatcttgcttttgttcatagctgagatagaagtcagtttttcatgttttttaagtaatcatgttcttctccatctttaacactggggtttgcatgtagcttctgggtattgtggcatataatacttatacagtcatgcatcacttagtggtggggatatcttctgagaaacatgttaggcgatttcatagttgtgcgaacgttgtagagtgtacttacacaagcctagatggtatagcttattacacacctaggctatctggtatggcctattgctcctaggttatggacctgtacagcatgttactctactcaattctgtaggcaattgtaacacaatggtaagtatttgtgtatctaaacatatcttaacatagaaaagttatggtagaagtatggtattgtaatctaatgggaccaccttgtatatgcagcctgccgttgactgaagtgttgttatgtgcacctagaatgtagccatttccgtggagacattttttacagccaggtacttctctgaagtatagttttctgcctaagaactaacacactcttgaattctccagtttctcccctggccgataggaatctgtctagttatctctgaagaaatctccgtatttggttccttcatcctttgcctgagaatattgcctgggtccaggagaatttagctgctgttacagtgtaacacaccctgaaaaaatcagtttgggtatttcaggcccccatttttatgttaactaacttatgattttaaatggtaatccttctgtgaacagggactacttaggatagctgcgatttagcttgcttttattagttcatacctgagataaaagcgagtttttcatgttttttaagcaaatgaaattttagctacagttgaactttgttcccatggaagttattagtagagtctttggtgttggagaaagagtctgaatttccttgtagtggtaataaccagaattttgaaagagaagatgacagcgaggctgcagagggaagtgaaaatgtactaatgatgagtatagatttatttcagagtaaaaaaagtgtagtgtgttaattttagaagcatttcctttcttgatgttttaccttgcaacttgaagtttttcaatatcctaaaatgagctgatttgacagtcaaaaagtatccttgaaaaaaatgacagcttggcatcttttgcctggctgacttttcccccttccatcaggtggaaagaaaaagcagtggtaaatttcaggcatagtcagagggaagccatttttacataattttagtagctcttacttgagtgcttactgtgtccatactatttcaagcatatggatttcatttcaagctgaggatgtgggcagagcccactcccattgcgtgaagtgcaaagtactgtaccaggcattggcgtatgagagtttgtaaaccacacttagttcctgccctctggatgctcctaatctagtgggggagaccaagagcctaacaaatcatcatttgaaatggtggtagtttctatgaagagtaattatagagtgctatgagaacataaagggtgctcgtctagtccccgaggttggtgagagaagcctttccagctaagtgatatttaagccaaaacctgagtatatcttgatgagtagaagttacgtaggccaaagtgtatgtatagggggctggcggatgggggtgggaagacagtctagatgagggtacggtttgcattaagcccttgaagtaatgatcgaagctggcttagggactggaatgtgcctggggcggggggtgctggatgaggtgttggaacagcaggcaggggccaggcaccaggcagtgaccaggattttggtctttgttttagaggcaatggaaaactttaaaggggttatttatttatttattgtttcgagatggagtctcgctttgtcacccaggctggagtgcagtagtacgctcttggcttactacaacctccgcctcttgggttcaagcgattctactgccttagcctcccgattagctgggattacaggcttctgccaccatgcccagctaattttttttgtacttctggtagagatggggtttcaccatattggccaggctggtctcaaactcctgacctcaggtgattccacccaccttggcctcccaacgtggtgggattacaggcggctgccaccacgcccagctaatttttttgtacttttggtagagatggggtttcaccatgttggccagactggtcttgaactcctgacctcaggcgattctgcccaccttggcctcctaacgtgctgggattacaggcatgagccaccgcgcccagccctattaaagggttttaagacaagacatggatagatgtatgctttataaggctcattctgggtcacagtggatacaggtaggtcttcatggagccttatgaaatggttactcagctcgaacagtcactagacctttgctgagctgggcataagtttggttcttggccctgttttgtcttccaaaattctgtttattcaacaagattcaaagttggcttctgacaccttcccctgctttagagaagactgcattttttttttttgctattattgttagagccacctgttacctttgcaaggaagctatggaacaaaacaatttacaggtgttccaggctgcagaatggtccttgggcagggcctactgggcaagtagctctgtatcactatagtccaggggctggctctcagctatggtaatctggaaatcagttatttttcagcacatgtgtaaagtgattgaactctggggagcagattcttgttaacctaaatcatgagagactcatgtaactaaagtgccaggtggttaatgctgagtaaagacaagagctgggagggggtctagacaggagttctggaggcaagcctacatggaaagacaaaggagaaactgacgtagcgagttggttagatctccataagggccatccctgcagacctgtcaaggggactgatacttgagtcactggatgttatcagatattgtacaggttaacacattcaagttatttaggcctcctttttattgatccatacccttccttattttaacttctttatagttttcaatttttcattttgaaataatatcaggcttttgaaaaagtagcaaaaacagtacaaagaattcccctgtattattcacctagatttcctaaatgttaatatcttatataatcattgtacagttaccaaaaccaggaaattaacattggcagaataccatcatctgtagaccttatacaaattttgccagttaaggtcccattaaagttctttttctggtctaggatccaatccaggattagatgttgcatttggttgtttccttagtcttccttactctttcttggtctttcataaccttgacttttctgaagagtactgggcagctattttgtattgtagaatgcccctcagtttgaattttttggttatctcttcatgactgaataagcatttttgttaagaatattatggaagtgatgatgttgtgtgcttctcagagcatatcacccttctttgtttgtaaccatcataacttggtcttccttccaaatggatgtgaaacttgagccaatgttgaccctgagactatgtctgggggcaccgtaggtgcttatgaatgcaaatgtgggaattgagattacatggctataataagattgccctccggatggcctaggatatgcctacattattatatattaattttaaaaatcatcataaaaagaaaaaaagaaatagtttctaaatctcagacagaccactggggaaaatgtccctggacttcagttaggaaagctttggataactttacccattttaacacctcacttagcagagactgtgccatcttggtaagacttgggagttccctgccttgaactgattatttagagggggtattccctgctatggtctatgcactccaactattatatgcggattttgaatttagagtaacctcattctgttttaggattttcttagattaatagaaatgaaactactcaacatttttcttcacaaagttcatcctttattctttcctaactgttcctgtttctagatcttatcttcttaaaaaaaaaaacctacagtaatattttctttccttttttccccccctattcgtttttggatctttactctggtaaaatactataaaaataaatcagctacattttagcataaatacagagaaagccagcagttgaaatgattacagtttggaaaatgttcgatggaggcattttagaagaacgattttaccatatcgcaggctgctgctttgaaataactcatgtttctttcccacctctaaattgtcatttttccagttctcctttttggaagctttagtatgcaaagctttgacaaccatttaggaaaatgaaatcactacccactgtgtgtgacatttgcttgaggataattcatttggttcaaaattggcagttgctgaaatgggtggaacaaagaaatgtttgcatgggttcattgtttgaaggaaggaaaccttccaggtggccatttaattgcagggatgtgaaaagcttttatctgattttgcgtctttgagtggattttttcctcttcagtctctcctagagtagttttaggtaatgtttggaattctctgcacctttgcctgtgttgtacttttcctccctctctgacctcttccttactttacctccctctctgtgctcttccttacctttccttcctctctgtcctcttccttttttttttttttttttttttgagacggagtgttgctctgtcgccaagctggagtgcagtggcgcaatctcagctcactgcaacctctgcctccagggttcaaacgattctcctgcctcagcctcctgagtagctaggactgtaggtgtgcgccaccatgcccagctaatttttgtatttttggtagagacggggtctcactaccttggccaggatggtctcgatctcttgaccttgtgatccgcccacctcagcctcccaaagtgctgggattacaggcatgagccactgcatccagccacttctctgtcctcttccttacctttccttcctttctgtcctcttccttacctttgtgtgggctggcaagtcatttcctgtatcaggtagaaaactttctattgtaaatcacagaaaatttcactcaactaagtttaaacagtaaaggtaatcttcctaactgaagagtagagattaagagttaggcttaggtttgatcagggccgtggttctatttctctgtagatctttaggtcagttctcaagcggtctgaggaatgggactttttcttttttaaatttctataccattgcagaccaatacttttgtaaaatacaaatgaatttctaggaaaacgaattactaggaaaacaaagttataaaaaacaaatataagcccattatttaaaattgttgacttcgctgggcatggtggcaggtgcctgtaatcccagctactcaggatgctgaggcaggagaatcgccacttgcactccagcctgggtgacagagcgagactctttgtctgaggaaaaaaataaaaaaataaataaataattaaaaaaatgttggcttcaacagacaaaattattctgtcaaattgctgtcaatatttctttttctttttttttttgtttttagacgttgtctcactctgtcgcccaggctggagtgcagtggcgcgatctcggctcactgcaggcttcggctcactgcaggctccgcctcccgggttcatgccattctcctgcctcagcctcccgagtagctgggactacaggcacctgccaccacgcccggccaatttttgtatttttagtagagatgaggtttcaccatgttagccaggatggtctccatctcctgacctcgtgatccgcccgcctcggcctcccaaagtactgggattataggcgtgagccaccacgcccagccaaattgctgtcaatatttctaaacatgctcattgtcagtttctgtcctgaccttgtggtaggctgtggaaaagcaccatgttggctctggcctcctctgctagctggattcagtgcagctctcctccttgtggcaagatggctgccagtagtttccagaatgatgtgtgtctttgttctcatctagggaaagagttttcctcagtattgttcctaagctttgagcctcatactaggatcagctcacagctggtcactgagaccagagggtttgtccgtttttgaacctatcaccattagaaggaatattgccctagggatgggggctggtggctctctgaatccatatgacttccatacaatgctgaggaggcacttgcattattcactactgttttagattaataaaatatgcataggcactacttgtacatttagtctgtgataaaataaaaaaaaattaacatttggtttttgtccctggttcctgtcacagagctcctaaaacccttggagtcccctgagtggtgagagtgtctttcacgtgctaatcattcactcttgggggttgttgtgggtagttatcttcaggttgagcctggtcaccacaaagaccaaagcatgtttagagggttagaactttctgctccatttcagacctcgagggagatgagaaggattcatgatttaaccaatcatgcctacataatggagcctccatagtagacagtgagatttggcgagcttctgggttggtgagcacacggaggtgctgggagggtggcatgctccaggagggcttggaaactgtgcgcctgcccccacctcttgcctggtgcatcctttccatttgactrttcatgagttatatcctttttgataaacctttatgtatatgcaaagaaacataagtgtcttcctgggttctatgagccaacctagtgaattattgaacgtgggagggcttatgtggaaacccccaaatttgtagccaagacagaagtgtgggtttaaccccaaaatgcaggttcagtcacccaccacttgcagagtccagttaacaagagcaaggtctggtataaaacagtttttttaaattttattttatttttctgctcaggctggagtgcagtggtgtggtcacggctcactgcaacgtctgcctcctgggttcaagcgaatctcctgcatcaacctcctgagtacctgagattacaagcatgtgccaccatacccggctaattttttgtgtttttagtagagacagggtttcaccatgttggtcaggctggtctcaaactcttgaccttaaatgatccgcctgcctcggcctcccaaagtgttgggattacaggtgtaagccactgagccaccgcacccggcttttcttttcttttctttcttttttttttttttgacagtctcgctctgttgacccggctggagtgcagtggtgcaatcttggctcactgcagcctccacctcctggactcacgtgatccttccacctcagcctcgccagtagctgggactacaggtacatgccactatgcctggctaattttttgatttttttgtagagatgaggtctcgttattttgcccatagatccagatccatttttttgcccatagaatacagctctgggctggtttcaaactcctgggctcaagtgatcttcccgcctcagcctcccaaagtgttgggattacaggcgtgagctaccaagcctggctgaaagtgactttttattccaaagctagcttagcggaagaactacaggcttcttgcttcccttttggagcagaaagtgggtacttttaaaagggggcctgaccctgtaatcccagcactttgggaggccgaggcgggcggatcacgaggtcaggagattgagaccatcctggctaacatggtgaaaccccgtctctactaaaaatacaaaaaaattagccgggcgtggtggcgggcgcctgtagtcccagctactcgggaggctgaggcaggagaatggcgtgaacccgggaggcggagcttgcagtgagtggagatcgcgccactgcactccaggctgggtgacagagcgagactccgtctcaaaaaaaaaaaaaaaaaaagggggcctgacatgctggcatgaatggcttgcaggggaggaagcgagcaggtggaggggttcgtgtacttgcttcagtgtcttatctactgggcgatcaagctggtgactgctggtaccttcatggactgaactgtgttgtaaaagtggccgaaaactccccaggtgtagagagtttcatagtgggcataccttgggttataaattgacgtcttgtctcttgaggcaacctcctggtgggtgagagttccgctctggaattgctaagcacatagttagatgaacttgctgtagggagtatctggtgaagatgaggtaaaaggctataattgcattactaaagagctaagtaggaagtgaggaaacagaggaaagagataagaagagagagagaaaaaaccgattctgagaactatcggggtacttggttacatgggtaacctagggatgtagtactcatggtggcccctgggtgagggcagtcttgtggtactgagcccttctacctgtggcctctgactccttgtgggtagttcgtgtgagagtagcattggatggtaagatgcccaatttgtgttggaggatcagagaatccaagatagtccttgtagcatccttgaaagacgggtactcttaggaccctcctgtgcagtgaggaaacagttaagtgacttgctacaccgctacaatggcacacctggggttctttggattctaactgtctctcccacatgggtgccttgcggacatctcaaatggtcaaataaaatataaaataatcgctgtttttgtgagggaagtgttagagggttcatggctttgggaagtggtttattgctgtgatggtgaatctctctgcaaatggggctaaagggaaaatattctcacttaaagccctttgtaaaataaaagcttaaaaaaagtgaaatccagaattattccctgaagatggactctatgttaattttaatatgtacttaaacacctggatttagtctagccctytaaaaaacagccatgtttaaaagatcacttaggactatttctaaattaaaagaatcaacctcttaagtcataaccttctattggctcttagaacaactggaatttaccctttgtatgtatgttaaagctagtgtgatgtagggttttaagtccagaggataaactagctgttttagttatttaaaggttaacatttaacgagaagtgatattacttcactttttcaggcaatctatataagattttgttttgttttgtttttcaaagggacttatcacagaaagtatctattaaacacttaattgggtttgtgctgtctggtacaaagggaaactattgtggtctcttagataaaagggaaattatgtatctagggatctcttctgaatcaaaggagccgccttttgcatcctgtgtcagtgtcttgaaactctgtagtcctagactactgataattatttgtgtatattttcaaaatcagttgtggattcagagattgtaatgtgcacactgcttacgttttatctcagtgtacaaggtgagtacccctcatgtgaaaatctgaagtgctccaaaatccaaaactttttagctgccattgtgatgccgcaagagggaaatttcacacctgacctcatgtgacgggttgtggtcaaaccaaagtcaaaactttgtttcatgcacaaaattattaaaaatattgtgtaaaatttcctttaggctatgtgtataagttatatatgaaacatgaatttcatgtttagacttgggctccatctccaagatacttccttatgcagatatttccaaatacaaaatccgaaactctactgatcccaagcattttgtttaaggtaccccagcctttatagatcttatagacttttctttataattaatttccttccatctatgttccttgtttttgaaacgttagagaacatttatatttcatgtaggttgaatacaaagctgtagaagtatgttatttgaggttttggagtataaaggtgatctcaaaatttttagacttgaatttctttttctctctcattttctaaaaaatagaattaacgtggaaaatacacatttgcctcagactcacatgcccagagtatggaaggcctcagagaaatcaaaataagatttatgaacatattgaagaaagtggattggtccagtgttccctgggatctgttgaatttagcttaaagtcaagatgtccaggatgcccattatcactgttgacaagaatttttgactgacgcttgtttatgatctgaaaggtgtatatattttcttgaggaactatagggataatttttcttttccttaagaaagtaatcttctttctctgaaagctgaaaatcagcttatattatcttttactcctcctgcctcctggccccaggtattcagttgataaaccatgtcacttccttctttctttggtcattcttgttgacctagtgcagggacccatcaggtggattattgaaatccaaactggaatcctcacttctaatacactcactaatgctttagaatacagatccagggctattcccctattcaaaaatgcgtgatgattctcaaatctctcagcagatatgtggtctatcattaccatactctttccccccagatcttttacccacctgtgctgctgctgttttaaaatctgccggaatcatccctgccttgtggcattacccaagctgtcctctatgtcacattgcatgttgctccatctgggcccaaactgccattttcaaagtctagcctaggtcttaccttatcctggaaattcttctagagtcctcttaagtagttctcacttatcttccttgaattaacattatagagcttatcacctttcttggattgtgtcttcccagagataaagaccatatcttattcaccttgttattccacacaccttgcccttattgatactcagtggatatttgctgaattgaatcaacaattaaataaaatttattatttattttaacagagtcttactctgttgcccaggctagagtgaagtggtgtgatcagagctcattgtagcctcaaactcctgggatccagcaagccgtcctcccacctcagcctcctgagtgctgggaccgcaggtgtatgccaccttgcccggctaattttgtttatttttttgtagagacatggtcttgccatgttgcccaggctggtctcaaactccagggctcaagcagtcttcccaccacagcctcccaaagtactaggattacaggcaggagccactgtgccttgcctgttctcttaaattattttatgatgagcatgtatgtgtgtctatgtagagggtgagatagagagagaaagaatgcatatgggtgagtctaagctcacttcctttatgcaaggtacaatgaagagcgttgtggggagataaaaagaaagcaaaatccagactttgagacagaatcgtccccatggtacaattgatctgattttatcaatgaatcaattgttagaaaaaagggagacagagagatgaataggagacctagagattaaaagaaatttaagaaatactttaaccagttgctatgtgtagactgtgattcaatacacaatctatgtatagattgtgattcgacaaattgtaaaaaaaaaaaaaaaaaagacggggaaatttgaacactgatcagataattgatgttaagaaattattgttaatttttataggtgtgttaatactattgtggttatgctttagagtgtctcttaaaaattttatctttttaagagatatatgctgaaatatttgtggatgaaaggatgtgtgatgcctggaatttacttcaaagcaactggtggtgatgaggtggggagagtagataaatgtggaaataaggtaagattccccatgagttaataatcattgaagttggatgatggctggctgtatgggggttcattcattctttctacgtttgtatgtgtttgaaagtttctataataagcggaaaaaaaataagggataggagacatgggttttgtttttaaagaattgaaagaactttacactggaatttgggaggctcaacattctagctctagctttctctctaattacctgtgtgacttggagccactctttcaacatttctgggcttcacctactctcctgagtaaataagaagttggctgtgtggggtcctcattgtccctggtgtctggaatgttgtactttattttttatttttatctttttagagatggggtcttgctttgtcacccaggctggagggcggtggcacaattttagctcacagctgcctccaattcctgagctcaaacaatcctcccacctcagcctcctgagtagctggcactgcaggtgcctgccactacacccagcttattttgaaattttttgtagagaagagtttcgccatcttgcccaggctagtcttgaactcccgggctcaaggagttattctacctcagcctcccaaagtgctaggattacaggtgtgagccaccatgcccggctgaatgctatacttttgagagagactttgggcttggactcagagattccagaataaacgagcagtgtctatgaaagtcatggtttcacccaagctgtatatttgccaaatcacaattccaaacttaccacgtttttttttttttttttttttttgccagggaagaggatcatagctgcagcattctgtaatacatgctgtcagtttgagttggtgtaatttcattctaaagcaaagaggcatcatatcataattagctggggtagtcttatccccaaagttaatgctgtgggtataatgattaagaggtcaggctcgggaggccacattcacatctcagcttaaccacaagctgtgtcacttggacaaattacttatctacctccttccttagagggtcgtcataaggattaagtgagctaatgcatgcgaggtgcttaggacagtgtctggcacatagtaatggttcaataagtggtagatataattttcattggctttattagtttgatttatattttggattttcagttcttgtaaggcatgttgaggtttaagcacatttgtcatccttaggccacccttcctccctccctccctctctttgagctagaagtatattggagagctcattgcaatgtgagatgaaagagggtgagagggagaccagggaagggagttagtcaccaaacacagcctcttagaggtcatcctgtcccacccttctcttggaggctgatggattgagtcgctgagggatttgcccaaggcggccaagcccagggcattagtggtggagccgtatcttgaacctgggtctcctaactgctggttatgtctgctgcaatcttcagctccctgaagtctcctctgtcattctgattgctaactagagtgcattctggagagaaaatttccctgcgtctggtttatctaatatttaaaaagtcatctctgttaaggaatctctggtcatgtcctatcatttgcagggagtgaaatgggaatgtgcatggtgttcttcaagcactctgactaatcacttcataagctatgggcttccgtcatttcctttccaagtcctgctgatcccaggcccttgtcttccctgtccaggccggcagcacctgtgaggccccgcacccgttccttacagccagcttgccctgggccctggatcactgcattrctgttgtctgaatcacctccgtggccttgtttttcatccttgatgttttcccaaaagcattgtttctccagtatccgcaaaacagcatcctgtgatgttttcttcttcttcttcttcttcttcttcttcttcttcttcttcttcttcttcttcttcttcttcttcttcttcttctccttctccttctccttctcctcctcctcctcctcctyctcctyctcctyctccttctccttcttcttcctttttttttttttgcccttaagcctattgcttccttccttaatgttatttcttgcttgctttcattttctttggatgcttctatttattttccattcattaagctgcaaataggattacaagcttcttttacttattccagggatgagattgcagtttatagactattcacatccctttgctttttctgcagcttagaggcactttatagctcatgaaaatttcctagtaagggaaaagtaatatctctataagaattgacagattacatagtgattttatcaacaagataggatactaggcctaagagttgaaaaggttagatataatcctgggtttgaatttgcattcataaactgtagttctttggacaagttatttttacctttttccatttcagttttctcatctgaaaaatgggaatgttaatactcatctctttgggttgttgtcttggcagatttactgaaggagttaagtaagtcggctaatattactgtgtatattgtgatcttatttgcgcttcatagaaaaatagcccttttgaggtagatagggttattttctccatttttatctgactttatattaattcatctgttcccttcccttcttccttcctgtttcctatcagagagagagagaaagaaaaagagagagatagagaaagggaaaggtcgatttaaggctaatacatttctcttgtacagatgcagcattaaggcctagtgagtttgagacttgccctacagtcctctcttggaggaggtggcaaggtgggagtggagaactccttcctacatctttaaacttcaggtctgattgtggttcagtacaacctgagaggacctgagggtgaggtggggtgggtgtaaagctacccttttagtcagtttcatgtccttgatttggaactgtgtccgggattcctgagcccaggtcatagactaggaggcagggtggtgcaggaggcagacacacctgggatggaatctcggctatgctaggaacctctctgctcctcagtttcctcatttgtatagtaaccgtgctgtggggtgaccttgagaaacgggacagatgggtaaagggcctggcatgtagtaggtgctcaatcgatattagttccttttctagtttaaaatgtatttctggtttgtgctacaaaaaaaatcctgctaaaagaatttcaggcagcagcatacaggttgcagaggcatttttgtgggcagtgatacccctcaacacccttgaactattcccatcctcctgggaaagacctgtcttgtagagttgggacttgctttcaaccagtgtttctcacctccatgtgtgcattagaatgacattgctttgtcaaaatacacattttgggctccaaaccagacctgttgcccagacatgtaccttttggaaaagttttccagatgttcctgatgccactgtagcatagagctactgctttcaacaaaccagaatgacttcttagtgtgtctaaaatatgattccgtttgggcatagcctcttagacataaactcttagagaaataggaatccttttctgagaaaagaatatactcttttcacctctgactcattaatgggaaatggatgtaattttcatagtaataatagccaattcaggtgcttttactgtattatttaattctgacagcagccctgtgagttagttggtatcattatgcctatcctgcatgacatgtccaaggccacacagcttggagagtgtggagccaggctttgaacccaggcagtctggctccagagtccattttttttgtccccacgaatatcccacttctcttaattacaagtgagattaccttgggaaatgcactttggagtccgtggctcttttgtttgtttgactgtttggtttttgaggtggagtctcactctgtcgcccagactggagtgcagtggcgcaatctcggctcactgcaacctctgcctcccaggttcaagtgattctcctgccttagcctcctgagtagctgagattataggtgtgtgccaccacacccagctaattttttgtatttttagtagagacggggttttaccatgttggccaggctggtcccgaactcctgacctcaagtgatccacccacatcatcctcccaaagtgctgggattacaggtgtgagccactgcgcggcctggagtcgtagctctcagctaagagccatggaaatttgcgaagaactggcagcttctttctcactgcccctgtattgtttcttggcatatcttggtctggtctggatttcaggaagatccatgcattgcagcagttgtgtgtgctgttggcttggtgtgggtggtgaagcaaatttacaattccatctctcatatttgctcattccactctcccacctatcggtagagcgtttgggattagcttgctctaggggtgaaaaatttaggggtgaattattgggcttctttcgctctagttcaatggtaaacaaagttctctttgctcccaagggcctgttggccttcaccaacctagtgttagaaggtcatttgaagggggctttcatgcaggagctctttgcagcctggaagagagtacaaagtagtccagggaaaaatagtcgggggaagatttgccttgtgctgacctgcctgcaccagaaaattctggagccctcggggaaatgcagcaggtgtgcaagacgatagaaatcgccacttgctgtgtgccaggcactgtgccaagcgctttaaaacactttatccctaatcccttctccatctggaaggtggatgttatgatccttgttttttttttttttttttgagacagagtctctctctgtcacctaggctggagtgcagtggcgtgatcttgggtcactgcaacctctgcctcctgggttcaagcgattctcctgcctcagtcccccaagtagctgggattgcaggcgtacaccaccattcccggctaattttgtatttttagtagagacgggggttttcccatgttagtccggctggtctcgaactcctaacctcagatgattcatccgtcttggcctcacaaagtgctgagattacaggcgtgagccactgtgccccgtctgattcttgttttatagaggaggaaactgactcagaatattaaatgatgagtcttaagatcacacagataaggaacgtattcaggatttgaacccatttctctcagactcagaagccaatgaactttccgtaatactttgctccatcttctgtgaaagacaattgtgtactcagatgtacagcagacattaacttacaaatacaagttattttcaccgctagtgtcacatgaggatttccctttgaataaaataaataaaacaaaacactgctaaatgttctcctgaaatgaaagaaaagaaatgaatgagtgaatgaagctggactggctatcgatactcggagcacatggagattcttccctcgacccccggtgtactcgggaactctgataatttcgtttataggaagtctgttgaggatttgtttttcttttatgttaaaaatgatatattacaatatctggaccataaagtagcagtttgtatttttagctacatttatttctgacttctttactcatgatttttttcccctcaattaattgtacgtcctgttctccttttcttcctcctgttcttctccttttcctattttygcacccattttttctagtagagggttttgcttgcaaatgttacttggtggataatggatgtaatttttacaaagttcagggtttttttttttttaagtctctgagaacaattcataaagccatatctgtcaacttatgtactactaaaatacaggatgaactttccaacaaatgttgttataatacttgtggttccatttccaattcagccattatagatgccccgaggaaacaaacaaaggggaaaaataagatacgaccaaattcattatgatttcacttttrtggttaaatagatttctagctagagctggagttgcttctcaattaaacagatatttctggagggcctgaaatctgccaaaccctatactagtctgtgacttgatttcacctgttgattgggtgaatagctccttttttgctttgagttggtttaaaaaattcttagcagcagctctcagcataatttattaggcaagagtttaggaatgttattccatgaaagctgctttcctgcatgcttgacgggtagcaccatgtctgcctgactgtctcgtctgtctgagtagtctgtctgggtagtgtgtctttcggattctctcttattcgtcctcctttctccttccttctttattttattgactaggtagaaatagtactaaagtgtacttttaaaaagtgttgaatagatcagtgtttcccatcaagtttcctctagaccatcagcattataatcagttgtgcttgttaaagacgcataatcttgtgccctgacccagaatctgaatttgaaaattgctgaactacagttatctgtggtcactgtgttatttttaaactatcagtggaatgttctgtttctctctgaatcaaaagataatctcattttccccctgagttaatgtactctgataaaacaaaaacaaaaacaaaaacaaaaaaacagttccaaataagaatcctggaattaggtttcagaatttgagaaactttcattagacttttattgaaacaagagttggtgtttcatacactgtggatatcctcaagttgttgttagtaaaatgccaaattacttgacgtttaaaaataaactttaatgatgaccaaacccgttaattttaagtctttgttcaaactacttatgatttaaaatgagtcacagagttggatcgggtgkccacactgggtagaactgggtactgacctctgccagtcagctgcgtaactccaggccctagggtgccccgtctgtccagccagggattgcatggatatgctgtgatctcccttttggttctgattgagttggaccttgtgggaggagaaacatagatgttgatacatgagcacatatgttggagagagaaagttttatcttggcataggacttttaaaacacaaggtaatttttaatcagttttgggaccaaaaaacactcaatatgggaaaaatccaaattctgccaaaatgtctaaagaggtttattctgaaccagtataagtgactgtggtctaggttacacaatttcaagagatcctgataaagcgtgcatgagagagttgggctacagcttggttttacacatttcagggagacaggaattgtagggtaaaattatggcacaggacttttaaaatgaagctgtgaaagtttacagtccatagagaataaaaatctagaagtttaaaagaaatgattggtagtttctttactcrttcagaaaaacaatgccatatttcccaaaattcctggttatggaaacgcaaccaggaaatggacttccttaaggcaaggacgaccatcctttgttggagacatttgattggttgtactattgccaggtrcatttgtgttattttacaaattctagtagaagcgggtataatggtaggagctgggcagagaagtgtttccagtcatttttcctattagaagccatctctattggaggaaaaaaacaaggcctgctgcctccaaaggttaatcagtaatgacataattcaaacagctggagaactggggagaawttggagtttagcaaatgatttcttgcatgtgygattgtgttccatttctctccattcatttatggagagaatgataaatgtatcaagggtggtgaagtatataaagagcattgttttttaaatctcagtaatttatggacctctatttagaggaaacatttctcacaaatcctcagtaataaatatttttattatgaaggagcttcaatrtaaactaggtataaactccttacgcgtctagctcttacttaactgtaaagcagtgatagatttatagagcaaattcaaacaaaactacaaaaccaataaaattcaaattaatattaatttatcatgacagataattttgtttcactaaaattaaacccctcctcgaaaatgtgattatgtttctgacagccggagtgccagttctttttagatctgcatgaaactcaattcctccactttcctgtattctatgcttccttcatattaaagctccttcatttagtaagaatgcaggatttaggttttaattctgcctcatttatcttgacttggccttgaagattaagattgtactactaggtgccaagatcagaaacataaatggaaacctacttttgatcagtaagatttccggacttgttgcctagttacagatgagatagtaggggaaagagaagggtcactggtacctgtaattttgggttgcagatttgggtgagagtgaatggtgccatttagcaaaatgtgtaacaaaggaggaaaagtaggttttgggagaagatgattagtttaagactaatactgcttaggttcctagcagtacggtagactgaataacacacttttccactaaagcattatattctggataaaacattttttaatgtatttctgagaccacaagaactaagacctctccaaaatctctcacttcaagtagttcaaccaagcatcaaagggtaaggtaaaacccaagctttatgtgtaagcaaacacaaaagataggttacctgaagagcaaatgctacaggttgaacatccctaatctgaaaatctaaaattgaaaatactctaaaatttgaagcttttggggtacgggcatgaaactcaaaggaaaatgctcataatttttggattaggaaggcatagcaagtatatattctgcagaatattccaaaatttgaaaatgtctgaaatccaaaacacttctggtcccaagcattgtggataaggaatactccacctctaatatcaccattgtggttagagactaagtcttgggtcagtggcaaggtataagagcctgcattccaccagtacttatttgtaagaggagctaaagtggctctaggaagatagtgccctttggcttctggcagaagcaagtgcacatcctttcaggaggaaggcatcttcactttagaccttaggattttcctgactaacatcaatcaaatcggcattcagaatcaaagatctccagtcctacaagaaaacaagccatcagcagtgcgagtcatcagaaacaagtgaaggccgggcgcggtggctcatgcctgtaatcccagcactttgggaggccgaggtgggtagatcacgaggtcaggagatcgagaccatcctggctaacacggtgaaatcccgtctctactaaaaatacaaaaaaaattagccggacatggttggtggtgggcgcctgtagtcccagctactcgggaggctgaggcaggagaatggtgtgaacgcaggaggcggagcttgtagtgagcggagattgcgcccctgtactccagcctgggcgacagagtgagactccatctcaagaaaaaaaaaaaagaagaaaagaaacaagtgaaaaacaatagatttagaaccctaaggactttagatattagaattatctgatatagaatataaaattactaggtatgaaatattttaagaaagaaaacatgtaatcacaactaaatgcaaaattgaccaggcagatttggaaagccaagacctaaggaaatattagaactgttgaaataaaaactaaataaattagattagaaataggtgaactagaaaaatgaactagaaaaaaagtttgaagaaattaaccagaaagtagcataagggagaagaaaaacgaaagtagttgaaggatataacggtcatgacgagatctcttctgagttccagaaagataataagagtaaatggttaggagtactatttgaagatctaatgtatatataatttccagagagagtttatgaatgacataaatggccatgttccttaaatctaagtaatttatgggccgataagggaagcacaacatataaataaaaaaattcatactagacataaagaaactttaattcacttaaaaaaaaaaaagaagaccatgtttaagaacagccagaaaaaaaggcagattgtttatcagactgagagctgacttcccaacagcaacaatggaagctggaaattagtggaaaaatatcttcaaaacgctaaaagaaaatattgattgtatgtcaaaaaaagctgtcattcaaggaaaaagcaaaatacgctttcagaaaaacctaaacctgattttaccacagaagatcttttctaagaaacttcttaaaggatatacttccggaaggagagattccaggaggaagggctgagatgcaaaaaggaatgatgaagaaataaactggtaaacatgtagataaatctcattaattaaaattaaataaattaaaaatttagctcctcagtcatgctagttagctgcatttcaaggcacgtgtgcctagtggctattgtattgaacaatacaaatatggaacatttccataattgaagaaagttctgttgaacagcactgttgtagagcagcggaagggaagatgcactaagatagtctctgcaatgcgttgactgtaagatggcatctttgtaagagccaccattatatgttaacaattttaagataaacattgccccacatctttaaaatgccattaaaaaaagataagacacacctcaagattacctgtatgaaaatgtaaagaaatgtgtctcttgagcatggatgcagtatggagttagaatgttaggggcacagaagtccaagagttgtggtgcagtagattgggagaggtctgggccagcgctttgagaggccaaggtgggcagatcacctgaggtcaggagttcaagaccaacctggccaaatagtgaaactgcgtccctccaaaaatacaaaaattggcctgacatgatggtggttgtctgtatcccagctactcgggaggctgaggcaggagaatcgcttgaacctggtaggtggaggttgcagtaagctgagatcgggccattgcactccagcctggacaacagaatgagactctgtctcaagaacaaacaaacaaacaaaaaacggtgaggaggtgagatgttgtagagattctttcaggataaggcatatatattactgaaatgaacatcagcctgctatgtatgataggagaagcaatgaaaattgcaaagccttcgggaattctttctgttgctatactggggaaggcttcatgagggcagtaatatttgggctggaccttgaggaatgaagaattgacagagtagtagggcagggcagtatagatagaaggaatgacactaatgacagcatggaattgtgaaaaggtgttagctttggcaataattcctaatgatctagacttcactgtttccagcttctttctaggtagtctagttttgatgaaggaacatttattccctgagaccggaagcatgccttttactaatcttaagttggaagttaatcaaaataactagacacctaacctgctacttccccaatgctctaaatagacaacacttaatacatgtttttcacatcctcttgaattacacaatttattggtaaatttggggatttaagttcagaaaacagttgcccattattataataaaaatattccaatactttttctcattaagtaaaatacagtaaatcagtggttcccaaccgtggctgtattagcatcatctgggaacagttgaaaaatgatgcagagtacttgggctttgtattttatgtaagaaccccagtgtattagtccattttcatactggtatgaagaaatacccaagactgggtaatttataaggagaaagaagtttaatggactcacagttccacatggctggggaggcctcacagtcatggtggaaagcaaaggaggagttaaggcacgtcttacatggtgtcaggaaagagtgtgtgtgcaggggaattgctctttataaaaccatcagatctcgtgagacttactcactatcatgagaacagcatgggaaaaacttgcccccatgrttcagtgattcagttaccgcccactgggtccctgccatgacacatggggattatgagagctacaattcaagatgagatttgggtggggacacagtcaaatcgtattaccccaggtttgggaacccttgctctggagttgagtaacatcttggtcacttttaccyagatattcattctttttatgcagtattttgaacattggcttttagtgttgttgagtgcatggattttcagattattagagattaatgtgtagatcttaacgcctgtgccttcccttctccttctttctcccccctttcctcagccctttcccctgcatcccatattgaattttttgtacagcagggctgacatgtcctgcatagcttagttctcaggacttttaattaaataaaaattttttttaaaaaagaaactttgctaagacagacttttggcatgttaaagttgaacttgagtttagtttctaaaataatttaatttttttttaatctttaaaataatgactacaggaaatacttctaaaataattgatattccccgtggtaaaactggggttattactggatgaatttcagcatgtgttcttttttcctggggtgaaaaaaaagtgttggggagtgttccattgtatgccaaaacacataaattgtaatccctcaaacctcagagcgcccttcatatggtggtagttatttggtatattgtaaaatgtggcctggagattaaaataagaaataaaatattttactatatacggatcagttagaatattccttttaacacttttgcatggatactttggttaaaataaatcattgtattgaagcagacgtagcattgctgctcgtttctatttcctatatgtattttatatttcctacagatgaagaatgaccaaaatgtcagccccattaaagcagaaatttttttttagtgccagtctccatcacctagaatggtacctgatacatagtgattgctcgctaaaaaaatgtactaaatgaatgagctaacaagcaaccaaaattaaaaatgacactatcacttttcactgataaacttccttccagaagtattgggaacgtcacaatacctggtgtttgtctggaattccgattaggtgccgcctgcatgttcctttagccccctgagccttcccacagatcacagcttcccttagagtcagtccgtgcagaaagagctgtgtcttagtgttcatggttgtattggtaatgccacatctagcagcatagtggtttcttagtaaatatttgttggatgaatatagtgctttatagtttcaataatgctttcatattcagtttgaatggttgacagctccatgaagttggctaatagtatcatcctagttttatagatgatggaacagaggttaaagaggctgttagttatccttgggtcataagtagcagacctggaaccacaacctctaaatctgttaatttcttcatcccttgtttcagaacagctttaaaaacattagtgaacctattaattaattaatattcgccttcccctagttgaaatcctacagggaaagttattacatgaacccttttccaaactgccctaaggttatcagtcacagactttgttggatgccagtttcggttttcatagtagttcttttttggttacctgtgatagattctttttgaaagaaaatttttttttaacgaaccctcattctttcaaacaatttatattcttctttcccagacattttaacctgtaaatttatcaatactgtaaatctaatttttataataaaaatattccaatacttttttttaagtaagttaatgcagtaaatcaatggttcccaaaattaaacaaattttcacagccctagaggagtgggctccagtgtgttccttcttgccttgtctgcctggtcattttgacatagaaatttcagctgtgttgaattggcttggtggatatttytggaatcaggcttgaaaaggagagaccttccctgtgacattagtaaaaacaaaaaagtctgagtcatgtggatcacctgaggtcaggagtttgaggccagcctggccaacatggtgaaacctgtctctactaaaactacaaaattagccaggtgtggtggtgcgcgcctgtaatcccagctgcttgggtggctgaggcaggagaatcgcttgaacccaggaggtggaggttacagtgagctgagattgtgccactgcactccagcctgggagacaagagggaaactcctcatttaaaaaaaaaaaaaaaaaaaaaaaaagctggccaaacattgaagatcctcaaatggtggcagtgtctgggtgcacattttgccagatccattcacggaggccaaagaccaactgacatatgaccaaggttttgaataaaaaaggatttcacaatctatgaatcaaatccagttctcatttctgtttagtcttctgttgagaaaaataacttggtgacttcagtaagctttaatctactttgtgattcttgggttagaggttattttatcagactgctacatttaaacttaccctcattatcttacaaatgactttaaggtgttactggaacaatactcaccacaaagctatgatttcattgtgaaataccaacaagaccctgattccgtttgcctgctgcagrcattaatgtttactgttagaactgaggcatcaaagggaataaataaactgctgacattgtgttgccttcaggatccgtcacgggaatatatggtaggggtttgagaagtggttttgggtggagaaaaagcattttcttttttcacccagcgcctgacttctcagttgaggcgggacagagccattgtgtttgttcgggctctcgcaaagccagatcacatcagcccgggccgcggctttatgcgcagcctcacagttcatgcctttgttgccctgatgcacagtcgggaaaggatgacgagaagggagctcagtaaagacctttcagggattgtttctgagtttgtcattgccayctgtcctcctctctcccctggcttttcagactattcccattttgtgagactcctgggtttctgattggtgtggcgtggataccataggtagatgtaacacaaaaagtggaagtaaacaatgtttcaaagaaataatcttgaagaagagagaaaaaagcctgctcttactccaaggctgtgtggacataagcgatgaaggattaggattattttaattattagtgactgtattgttttctttatttcttttttttctgagacggggtcttgttctcttgcccaggctggagtgcagtggtgagacctcagctcactgcagcctcaaccgcccaggatcaagcaatcctcccacttcagccttctgaatagctggaccacaggcatgtgccatcatgcccgggtttttttttttttttttttttttttgagacagtcttactctgttgcccaggctggagtacagtgctgctatcttagctcactgtaatctcctcctcctgggttcaagtgatcctcctgcctcagccacctgagtagctggaattagaggcgtgtgccaccatgccttgctaatttatgtatttttagaagtgaaagggttttgccatgttggccaggctggtcttgaactcctggcctcaagttatctgcctgcttcagcctcccagagtgctaggattacaggcatgagtcaccatgttggatwaatatttaaaattttttgtagagatagggtctcactatgttgcccaggctggtctcgaactcctgggctcaagcaatccacttgtcttggcctcccaaagtgctaggattacaagtatgagtcaccgtgcctggcatctcttaatttttgaaaccactaatgtctttcccttaagacttgggtcattttggaagtaagaggccagacttgatgccttcagacatttattatttctaacactggtgcatgcatctttcctgtctctcacaggtggcttggtgcargtgtagttttatcttgttgaaagccttttgttcttctttgaacagtgggactgtagtgttatcaacagggccagtgctaggaccagaaagctttcggtgtgataggcagtttctgttcaggacacctgctgcccaagcacagtgcactcattgtttcttcagttgaacatgttctaggcagagctgtgtcttttttagcctaggattgagtcttcactttttctcctgcatgcgtttcatttttggtagaataaatttctgtcttcttcttctggttttgctggtatgaatttaatacctgcacgtgatttgtacaaagtttatttccaagagttcatgctgaaatgtcatagtggtggaaagagcacttggtcaaagtggaggcaaatggtctggactctcattcctgctttgctggctgtgtggctgagggaaagacattttacctctctgggcacgggcttattagagcaatgggttgccaaggccccagtgtaaagattccaccattgtgtcttgtgtttttcaggatgccaagagcatcagaaatgagtgtgccaggagtcattaagggccctgctcctgtgagtaggtaacaccaggaggcattcttttatttatttaatttatttgtgtatttgaaacaaggtctcactctgtctcccagactggagtatagtgacgtgaacatggctcactgcagccccgacttcccaggctgtagtgaccttcccacctcagcctcctaaatagctgggcccacaggcatgtcccaacatgccyggctaattttttaaatttttgtagagacaaggcctctctttgttgcccaggctggtcttgaacgtctgggctcaagtgatcctctggccttagcctcccaaattgctgggattacaggccataagccaccatgcccagcccgttcttttaacttagtgacagttttatggcatggccagtgatagagaaatttggatgcgataggtgagggagggaaacaactatggttctctgtctgtggcaagtttgcagagtaaaaaagaattttttatttctaggaaagtgttgttcatcactggaagtgttactggacacttgggttttgaacgtgtaaattaagaacttctgtgatcagataaatacttcttcatttgttagctctgttcagataagaggcagaccgaagatcaggctaatatagcatagataccccatttctgatttgtattcctgcagtcttaaaccccttatttaaaaattctcttaaaatacatgttaattgtagaaaatttggaaaatactagaaagaaaatacaaatagctttccattccataacccaaaagtgctgttgttcatacttaggtgtctttagattatatgcactcagtttgtagaacaaaattgggatcataccatacatatataacttgatattttgctttttttctgctgttcctttcgagatgatttttgggactgaggtttcaactgaaggtagagattaatgtaatgttatgcttagcacacttgtgacgaggactgttttgatttacagaaatagaactgtggacccagtatctgaaaataacatttgtcctgtcccctcttgaatagactttcaatatttggcatatacagatgtcgtcataactgttactataattaacaaatgaagacttcttaatctattagctcttaatgttcactaattgctttcataagattccctcattgagttttctgtgccagaattgctagctgcaccaccagtgagcataagttatttccacactgtttttccttaagccctgattcctctagctaaagcatggcagcgcctgtgggctaggccacatgtttggcagcaggatagttaagggattccttttgcccagttatgttatacgtttgataatatttatgatttacttgttgaatgttggtttcatatataatttcctctattaggaaatgaaagattattcgtttcccctttggattatgtagcctataaamttttctattacaccattcatattgcaatgtaaatatattctaaatcctgaaccgcattagaattttttatagcccccacttatgtgtctttttgtggtgccctttgaagtcctgtaatgttttatatttgagattaaatctgggtttcgctttactttttaaagcatattgagcaagttaattttctgtttcagttcctaaggggaatgattccagccctctgtgtcccaagaattcagactgagccctgccagaacattcctgtggttttccacggggcagatcagtatgttcatgaaattttagttgtagcttgtgttttccatggttaattaaaacatctggcttttcagtttcccacaaacagagcataatcactaggccaaaccttttcaataaatgattaaatatttcaatcctcccctcagaatagcccacacttgtctttaggataccttgtaagctgttgcctctgtttataatgattttgaacgttgggaacatgtttgaggttatcctgccaaatatgtgcccttgagagagagaaagttgatgactttgagtccttataatggcttctggcctttgcccccccaggttggagttgctgtgggtgagctgctgtggtctgtagccaagcatgctgtggtcggatctgcccagccgtggaacagaaacatttgctggatggaaaatccataaaagaaagctcctgtgaaaagctgaggctgacaataatttaagcaaaatcaggttagtataagtaagagaggmtggataaagcggattgggccggatagggaaaagttgttttgttccttccaggctcattttggagaccaccccaaatgattattttcagttatttgtgagagtcccagcatgtgtaaatggcagatacatgctgatagccttttgtgtatagtgtaatgatgtcttcctttccttctcttccttttcctctcctctgtcctatcctctttctcatcttcctctcctctctcagagaagagagaaggacgttggcacaaatattggaagaagccacaactggaagccacctatgccaacttcaatggtcttggctttattttggggagaaagcggcgtccagcctcatggagttggatttgtagtttcaaagacttgcactcatttgtgttttygaactttgaagggtggggcatggagacctgccatttctgttgggataattctggctgtgagcctccagtctgcttggccagattttatatactctaatctttccccaaacaaaagccaccaacacatttcattttctgcagtgtgtgcatttggcattaagatacttatatacgacaggggaagagaatgtcctgaaaaacataggtgtttaaataaatgccaaatgctctcactgtgggccaggtgaatgaaacagcatggataaccccatatgaggcagtaaagtgaaataattcattttgaaaacatatattatacagggacagacattgcagaccatttctgttggacattcagtgggtaagtcagctttctacataagcagctaataaatactccctagaaagtagtgagtcacagtctttcagaatctgtgaagtagtgaatgtctgttggctttgtctgcccagcatccttttcctccatcttttaataaatcatccagatttttcctggacaattgcccttgtttcattttcaccctatgtagttagaggaggtgaccctgctgactcagttatgggcatgtaacataagcgtggccagtgatatggtttggctgtgtccccacccaaatctcatcttgaattgtaactctcataattcccacatgtcatgggaggatcctggtgggaggtgattgaattatgggggtggggttttcctgtgccgttcttgtgataggtaatgagtcttatgagatctgttggttttaaaaacaggagtttctctgcgcaagctctgtctttttttgcctgctggcatccatgcaagacatgactagctcctccttgccttccaccatgattgtgaggcttccccagccacrtggaacttaagtccattaaacctctttcttttgtaaactgcccagtctcaggtacagcatgaaaatggactaaagggtcacaaccatctttggaggggccatagtattcttattgcaactattgaagaagttttgccttctgtgagtttgttaagctggagctgctagtggcagtttttctatgacttagggaaaaccttactgaaaattaagacaacacaggagaaatcaaagcagggagatggaggaaaagagattggtgggaagggaagggacactcgtatgcatatgcacacatgcacacgcacacatgcgcgtgtgcacacagacacacagacacacacacacacasacacacacatatttttgrcctgcaattcagcagtgcctaaacccagcatctcctgtttcactttcttggcaacttagctagttcatctgagttaggtgtctgtctcttacatccaaaacatcccaattggtggtaccttctaggagtgaggtcttagtgtaaaatgactgtggcatagtccctgtctttaggggctcatggtgtagggcagcagtccccaacctgtttggtatgagggactagttttgtggaagacagtttttccaaacagtgagtggggtggcagggatggtttcaggatgatctaagcacgttacatttattgtacactttatttctattattattactacattgtggtctataatgaaataattttgcaactcattgtaatgtagaatcagtgggagccctgagcttgtkttcctgcaactaggtggtcccatctggggatgatgggagacagtggcagatcatgaggcattacattstcataggaagcatgcaacctagatccctggcaygtgcagttcacaatagcatttgcgttcctatgagaatctaatgctgccactgatctgtcagggggcagagcccaggaggtaacgtgagcgatggagaccggctgtaaatacaaatgaagctgtgctcattagcccactgctcacctcctgctatgcagcctggttcctaacaggccacagactggtaccaggggcccctggtgtaggggataggccagataagtattcacatgactgacatgcagtgtgacaatgtatctctagaggtaagaacaaagttttgtgggaacagagatggaattaggaattctgttgggtggtagactagcagggagggcgattatttaacaaggtagaagaggattaagtcttaggaacattaaaaaacattaaaaagatttaaaaaatagatttaattcaattacttgctttttgagtctaaaagaagggaaggctttccagagcatatagttaaagtaaattgcagataatgaagataatttcagaggttagtaatggtagaatcttgtttatttactctgaatacaattgtttaaggcctagccaaatgagaggctatcagaaagctgtctggagttagttttaacacgacaaggtaacagctgctgttctcaccagaacctcagtcagctttctgttttaaggagaattaaatgaatttaaagacttatttcctctttttaatgatagagttttcattaatattatattttgtaattacactgttttttgggggaaattttgcagcaagtacagaaagtttccatgtgacttctactgccagtttcctatatcattagtgtcttgcattagtgtggtatattataattgatgagccaatattgatacattatcattactaaaatctatagtttatattaggttcactctttgcgttgtatgttctatgagctttcataaatatataagttgtatttccattacagtatcatacaaaatagtttcactgccctaaaagaattgcatgttctacctgttcatttcttcttcctgaacccctggccactacttatcttttgccccatagttctactttttccacagtgtcatatagttagaattatacaatagatagacttttcagattggctttttcacttaccaatgtgcgtttaagtttcctccatgtcttttcatgaattgatagttcattttttttaaagcactgaataatattccattatatcgttgttccacactttatccattcacctattgaaggacatcttggttgcttccaagttttggcagttacgaacaatactgctggaaacattaatttgcaggtttttatatagatatgtggataagttttttactcatttgagtttctcaccattaaatatgatgtcagttttaggttttttgtgaatgttctttatcaagttgacaaatttcccctctatttctagttgctgagagtttttattatgaaatagtgttggatttttgttgggtgcttttttgcaactattgatatggtcatgattttcttctttaacttattcataggttggatgatactgatacttgaatgttgagccagccttttgataagagattatgttgactttctagttcaatattaagagctcttatgttgacttgcagatcaatattaagagctctgatacgtgaacatgggacaygtttccatttctttcagttttctttaatatctttcaacagtgttatattgctttcagggtacaagtctaatacttccatatcaaatttattcctaagtatttttctctttttgatgcctttataaattaagaaagtaattattttcaaagtatttgtagctagtgtatagaaatgcagttggtttctgtataatgatcttgtttcctgcaaccgtgttgaacctgtttatcagtactgatagttttttatgtgtatgactttgctagtattttctatataccagattatgtcatctgcagatatagttttatttcwtgtccaatctggatgttattattatttatttttgcagtgatttgaaaacttgagtgtgatgtgagaaatacaaagttatgtgctttggagtttctagtgaaatcattctgttatgtagctttttgataaggataaaagatgataattatgaaatttatcttctcacagttgacttagttattcagtcattgagcttcttagtcactcctatatcttctttggagaaatacctgttcaaatcctttgcccatttttatattgggttgtttctttttgtatatagtctgatataagctctttattggatatatgatttgcacatattttcttctagtctctggcttgtttaatggtgtctttccccccaacaatgaaatactgtaaattttaatcattgataaattgcatcaatatgggaaactgtgtgtatgtataaacttattttcttaacggtgttgtttggtgctcagaagtttttaattgtaacaaaattcagtttattcgttttttctttcaaagctcatgattttgatgtttctaaaaactctttggctggctaatcaaagcycatgaaaagtttctgtgtttctttctaaaacttagtttttgtgttttttttaatgcagtctcactctgtcaccaggctggagtgcagtgacgtgatctcggctcacagcaaccgctgtctgccaggttcaagtgattctcctgcctcagcctctcgagtaactggractacaggtgccagccacccacctggctaattttttgtatttttgatagagacggggttttaccgtgttagctaggatggtcttgatctcctgacctcatgatccacctgcctcagtgcgcccaggctctttctaaaacttttgttgctttaccctttacattttggtgtttaattcatttggggtcaatttttatgtatggtgtgaggtttgggtctatgtttatcttattttgttgattttttatttttattttttgcatataggtcttagcaccatttgcagaaaaggctaaccagtgacttgactttttttgtagaaaatcaattgaccacaaatgtaagggctttctttctgtactctcaattctgtgcctttggtttaccatctgtccttatgctagtaccacactggtttttgcaatgcaatttttctatgaaaaaagttagttcaagaattggacttaagatgcagtgtcttcactaaaaaacactgttgtacctttgctacttttcctctctgttctttatgagtcactgtgttagagtactagtatttggtgttttctctttggggtaattatggaaatctaatatggtagatgacaatgtggaatcaatcaaagtgcattttccagattactatatatatgactttaagcagtgctttgtttttcataaaggtggtaatcatttttatacctgttctgcatttggaaaaaaaaagattaagtttttcattacctctgtcttaatcattcccaataactactgaatgaaggttttacaaggctggcatattatttcaagtattttcattaatggtaacatgaattgggtctcatatcacaaaactattattttactaaatagaaaacctatgaattaaaatgtcttgcgtgtgtttggtaacatagtgtagttgtatatgttttatgaaaatgggacatttttcatagtataaaatgctagctgtatttttatatttacctattctgtttttatctttgtattagtatgattctgaatagctaagtgtgaagacattaaaataattatattagaaatgtgaagattgcaaaatatatatatctttagttacaactgcgttatggatgcataaacattgaaaaggaaattgtttaaaagtcagtgctttattgtgacatttggaatctagttgatcattttctcttgttttctaataaactcctaattttgtttgggacatgacatttttaatgtgaaaaaaatctaaatgtaagtcttggtgaaatgcagagacatttcccttctctggcacatagctgagctgactattgctgctgggctttaactggagattacagtcatgctattagatttggaacctgttttctgcagtgccgttagtaggtcaagccatgcgtcctggttcctggagggctcagttctcaggatggcttatctgcttcctgctttcttcgtaatcttctcatttcaacctgagtagaccagcttgatggcaactgacatgtgtgttacctggcccttttactttcctgggaagtcttttaactgataatatcacctcctaaaaacatatccatagagcaacatggaattatcttttttattgttcatttaaagtcaaagccataagtaagctttcatttataactctaagtccctggaaataggtgttatgaaacttttaacccagtcacttctttaaatcttttctttctctctgttgcccctttaaacatctttgtgacctattcacagaatgactccatgaggagtgtagtataatgttctggaaagataaggtcttcttattcttgttttcttttgggagctgaatcaaagcatggctgggttagagtaacctcttaaccatcgtttactttgaatagagcctttttgccagctgaagttgggattcaaaatgattgaatcactgaagtttgagttgtagtacaattacattcatgaagactctggcctatttatgatcatttgcttgcagatgaagcaaaatcagatcaacctagtcacattcactgagtcaacaccagaatgaagagagtgtcagggaactgggtgtggtggcacgtatctgtagtcccagctattcaggaggctgaggcaagagaattgcttgagcccaggagcttgagaccagcatgggcaacatagcaagacccagatcctgtctagaaaagaaaagagtgcctggaacttgcttctttagtacagccacaattttgtatacatctgtaatgaggatgtttatgacaaatacattaacagagtttggaataatatatcttttgatatttttcttgtctttttttatgttgaataatctgtgaagtataggttttctttaacagctttcaaagatactgtgagtgacatacagtcatttattttaatataattactgatacaagaacaaacagtactttctcagtttcatactgatctgtgatgcataaaatgtttaatttgattatattgtccaaataagatctatacgcatgacacgatagctattcaaagtttctgaaatttccaaattgattattatctattcaaataagcattgatcattgatccttggcttcattcataaacaaaaatagtctactggtttggatagtgtctatgaaaaaacatataatwatttataaaaaacaagtatcaacattggtctggcttgcawtaaaaaatctttcggtgcagtttgttagtgtactgtctttaaggatgaaagaatatagttttgaatgtaatcgtcatgcatctgaggccctttgaggacaggttttagaatcatagtaaccatgctatgcttgggtttgtaagggtgatttttttttttttttttttttgagggctcaaggatatagtttgttactgctgtggctttttttctggtgtctggttaaaatgtcacagagcatatgaaaagtaagacagtaattagtgacttgaggaatgaattctcctagaaataagaagtctggagttccaatcaggactttagatccttgattattctaaaataggattgaaaatgaccactggtcttgagcagtcattaacatatgagtgataaggaatgttgaatttgtgttacttcagtgcaaatcagttaaattccaagtgaactagttagcagtgtcctgtaaggagggcagctgtggtagtttgctggagggaacgaaatgaagtattattgagggaaacagccaaaatgcaagcccttctggggagaggttgcatgtgcrgtttgccaagtactaagcactttctcagtatcttatgggagtggctcaaggcgggggcagacttcatttgatcctcacaacagttctttgacagagacagtgttacccagttttagagaagctcaggattggagagatcaaatgatttttgttcaagtcttacacccactaatttaaatttgaatccagatgttccgaaactccatgatatacttgtataaatcaaagcactgcctatgaagtggtttacccagagcaaactctctttatatattttctttatttgtggggggctgggggctgggactacaggcacccgccaccatgcctggctaattgttttttttgtatttttagtagagatggggtttcacyrtgttagccaggatggtctccatctcctgaccttgtgatcagcccgccttggcctcccaaagtgctgggattacaggcatgagccactgcgcccggccctaaaaagtttgtcctggctgggcacgatggctcacacctgtaatcccagccctttgagaggctgaggcaggaggatcacttgagaccaggagttccagaccagcctggataacataggacaacctatctctacaaaaaattaattaacttaaaaaaaaattagccaggtatggtggcacatgcctataaacctagctactcaagaggcagaggtgggtggaccacttgagcccaggaggtcaaggttttagtgaacaatgatggagccactgtattccagcctgggtgacagagcaagactgtctaaaaaaaaagaaaaaaggaaagtgtgtcctaggttttatagctaggtatgtggcccagccatctactccatgaacttgctgtgaattactgagaggtattttggtggctgggggaatcagatactcctaagcagctgcttagagaaggaaggaagaagataagccttggacattcctggcttcccctcccccttactctgcactccttgtttgggagctgcctagaatttttcagtggggagagagggaccaaggtgtttacctctatgatggtttgagactctggtcaatctgttgcttttctagtattctcacctggtagcattcttagttaagtacctagtagatgttaatccctttcttccttttcctgtcgctgtgtctgcctcttagacacaaagtacagaaactaataaacggaaaggttaagctatacagaaccctttccaaagctgtgattgccarcctccagctttttagagacatttctggtttgattcacggagtctgtgttgtctagaagagcttgacttggtctgctaggggttgattgtctagcagttctgagatgcagtttgaggcacagcaggtcagttgtgatacctccagcacgtgcaaaaaagggacttctgtttgagattaaattatcttctgaaatagacacaattcaaaagcaatttggtgatgtatttcagaacttaaaatcaccagcaatttcataaatatgttcacttaaaactatgccaagatatttatatgatatattgtagcatatttgtaaagaatgaagtagttctgtatatgtgctcctttggaaagatttataagatatatatacacacttacgtgtacatatatrtaaaaaatgaaaaaaatgccttgtggaatcaatgtgattaccattcccttttgtataatttttttaaaaaaggtatatatgctggtgtatgcattttttccctgaaaaagatgtacagtacaactgttaataaactggaaaactttttcttccttttctgtatttgaattttctaactatgttcacttatttttctttcctttaaaaaaaaatcgggatagctgagcagtatgattatgtatcattttgctttagttttaatgtattttataaaaccttactaagtgttttttaaaaatattgcaatttttttctaatgttcatttgtcagtttttcttgtcctctgggagttcagaggaagtaagcaatttttgtggggagagtggtaaagcatatagatagcaaatgttctcaggaaagcttattaattaaaacattgagttgaaaaatagaaaggaaaaagatatttcctaaatgtaatttgaaggacaatgaattcaatcttgctgaagtgtgtttgaaggtgtacctttatgcttagtttgtttgctttcaaaggagctttggactgaattgtatttgcttttcagactgcagggctggaggtggccatggaagcctccagaatctgattgctaatcaggaaagctgtttgctaagaaaggcctgcctgtttggacttgaagtaatgactgatgcacagataaagccagggtgactttttaaatatcttttgacttctgtgtccagattttgcttttctcttaattaaaacccttagacaaaggtcacaggtcaaaggagatgattcctctaaactcttctggtagcaatagctgcttaactcttcaactcttgataggcttgtctggaaactgttgtgttcatttttctatgacgtgatttacctcctttggcttagtttgagtgctgaaatgtagtaatagatacgaagatggaaatttttttttacaatgtagataatggtagtctggagaagaaaggcattgtgctaacctttatccatatttcatatggaatacttgaagttttatttttactttttatttatttatttatttatttwtttttgagacagagtcttgctctgtcgcccaagctggagtgcagtggtgcagtcttgactcactgcaacctccgcctcctgggttcaagtgattctcctgcctcagcctcctgagtagctgggactacaggtgtgtgccaccatgcctggctaatttttgtatttttagtagagacagggttttgccatgttgcccaggctggtcttgaactcctggcctcaggtgatccacccgccttggcctcccaaagtgctgggattacagacgtgatccactgtgcccggccgaagttttatttttaaaaatcagtaaacagtgttatttttctaatttcataagaattttagaaacgtattttcctaaaatggtttgttaaatacctcatccgactcagtaatgtttatttttgccrtatctccttctctttataacttctgtactgatatctgaccttaaacttagtcatgccaggaatcataacccctatatttcaaggtatrtgaaccatagtacaggaattttaatctattaggaagattaaggggacagtttctaaaatacatatctatgtatgtatatgtatgtgtttgtatgtaattgatatttataatatagaaaagtctaaaacaccaccattgtcagttgatatcataaatgaggaaaaactgatattatcttcagtacatactcacttcccaaaagaatctgataatttaaaaattcagggtaatcaatacctaatacaaagatagcaaactcaaatgccgacaagacagggacccaacagaaagtaaaccagtgaacttgggcatagagtggagaaaaagggcacagctactgctcagcttctcgcttctgctgttcaggaatgaggctccagtgtagcatgatctgctgatacatcaagagaaggcagaaatgtagagctttgtgaatgcccccatacttttaatgtgttggaaacacattaaaaaattaaaacattgtactctcgcatgttttgctgtgatgttccttgtcagtacttcagggcctgagaagcataaggggtggcgcttgttctttggtgacgtatggtctagttgggcccttatgatgtggagcagttgaagggctgagataaatggtgtgggtgctgaaggccacaggatcctaaggaggtagaaattggtgtgagtcagaccatcctaggaagcttcatagaggaaggggatctgtcctacaaggccttaacatttagggccatggagagaagggagggcggatggggagcagaagtggggagggygtggtcttggggcatcggtaggcactcgaggagactggcctctgtagaaggcctcacagtgggtctgtgctctgaagagctcctcacagagctggaggagagttagctatggggagaatatgagatgtagttagaaaggaaaggagggggccaccctctggggccctctaggcaatcataaggacttcatgttttactgtggggacagagaagactgattgcaagttctgatagcagaagtgctgtggtgtgrcttgagttttaacaggattcctctgttgagaatagagtgtagagggcaaggatagaattaggscaagcagcaaggaggtcactggaataatccaggccagatgaatgagggcttgggtaaggggcagcaatggatctacgctgaaggtcgagtcaggactgttttctggtggaatggaccttggaaacatgtccacattccattcttttcattgataatgaccaagctgcagcttagacccttctcctcattcctagataactgtgaaattctagaaattttccttctcgttctcaattttctcttttcatcgtatagctacagcaggattgatgttggaatgctggccccatcacagcctccctggcttttgaacacagtgggcagatttctgcctcagggccattgcattggctggttcttcttgtrttctcttccccagatatcctcctggataatgtcctttctcatttaattcttactcaaatgttagtctgtcggtgaaacctaccctgatcgatgttttaaaaatygcaaaccttcctgtcactcctccccaaatccctcttaaccttttaatttttttccctgtagatcttagccccttctaacatacctgcatactttacttacattttaagttattgtctctctcttctcactggaatataaatgccaagaggaatttatataaatataaatatatttatatatataaattgcaaaaggcagggatttttgtttttgttcactgatacatccctgtcacctagactagtgtctggtggggactgggtacttgataaatatttgttgaaggaatgaataagtggctttcaagaggcacttaagatataccacatgtcagacactgaaaattaaaaacaaacaaagcaaagacacaagccctgccccagcgcacatggttcagtgaggcacaacagcaggagaacaaagcctgttgatctaatacaatgtgtccaaacttctgtgcaaacaaaagtaaaaaagcaagtaattcttcccttttcagccaagtctagactgttgatttggacttcccaaggcacacaggtaggggagaggtgatgacatttcrgggagagggagcagtgtgagaggggacatggaggcaggaatgtgccatctgtgtagtcaggagggtgttggtggtggagagtgactgaagatgaggcaagaaaatggaaagtggggccagttgagaggggacttgaataccctgcacaggagtcttgactccccaaatttattgagctcctgttgtgtgtcaagaacagtgctaggtgcttgggattcaaaggtgaatagatggctcttcctgctttatgggtttcatcttctagagagaggctgtggtgttaagggagaagaaaaatggccaggattgtggtgggaatggagaggccaggagagacagaggagggacactggggtaggattaataggatttggtcaaagacacggtgtgtgatggagggagtaggaagtagagtcttctggctcgtcactggggcttaggggtagataaatgttgacagtgttgtctgtagtaggaaaggcaggtaaaggatgcaaggggctggaaatgccaatcagagatctcaggagggatgtgaaggaaaattaaaaatatataatagcccgttagttttgtctttgggaagccaggaggctggagatacaggtgccccaaccaggaaagttggaaggggaaatgtgtttgtaggacagtaggggaagtgatgtgtgtaccttaccagaatgtcacttccatgagggcacaggtttggtttgttcactgctgtatatccagcccctagaacactgcctgatacagagtataatctcagccattgtttgtggaattaatgaataacgtagttgaatttggaggacaaaactggagtcataagttattagaaggcttaaaatgagattaaagtgattacaattatattattttagatattcttttacagggctttggtgatcagttagattttttagaaattttaaaatgttaccttttactggtgatattcctggtcacatacttgctttggatatatacccaacaatgggattgctgggttgaatggcagtcctaagttctttgagaagtctccaaactgctttcctcagtggctgaactaatttacattcccatcaatggcatagaagtgttcctttgctccaaagcctcaccagcatctgttgttttttgactttttaataataaccattctggctggtataagacagtatatcattgtggttttgaattgcatttctctgatgattagtgatgttgaacattttttcatagatttgttggctgcttatatgtcttgttttgagaagtgtctcctcatgtcttttgctctttttttctttttttttctgagatggagtctcgctctgttacccaggccggagtgcagtggtgcaatcttggcatactgcaatctccgcctcctgggttcaagcgattctcatgcttcagtctcccaggtagctgggattacaggtgcttgccaccacacctggctaattattatatttttggtagagatggggttgcatcaagttggccaggctggtctcgaactcctgacctcaggtaatccacccgcctccgcctcccaaagtgctgggattacaagcatgagccatcgcccctggccttttggccaggctggtctcgaactcctgacctcaggtaatccacccacctcggcctcccaaagtgctgggattacaggcatgacccatcgtgcctagccttttgcccactttttaatggagttatttgtttttttgcttattgaattgtttaagttcctcctagattctggatattagatctttgtcagatgcatggtttgtgaatattttctcccattctgtagtacatacctgctttgaatagaaatcttaatctccgatagtgttatcatttgctgaacccagtttgatgttggaagcaggtagtctagattaacacagcagtaggcaacctttcatgccaagaagtgaatggctacatgaaaaggcacatgtgaagtgagtgagaatgaaatttttttgcaattgccttctattgatgtggaatatcaagtgaatgctttgatttttttttccttgtgttgtattgtcgcagtacaaatgcttataaaatgtggactggcaactggtgcttagaaatctttgggtttccccaaaagacttttcattatggttgtttggtgtgtgtctttatgaagtatttcataaagacagtgaaaaagatatgttgctttttttttttgtaatcaaaatcagggtgtcattgggacattgtagaatgtagtatcctttcattatattagaaaggtagctaatctttaagtaagtgagaawtgaattgtgagtttattgagtctagcctcatggcactggtaagaataaatggaaatagaaccttgccatgttagtgattccaacagtgttatggactgaattgtgtctccccaaaattcatatgttaaaatgtgagtgtatttggagacaaagtctttaaagaggtagttaagataaatttaattatcttaaagaggtaagataaatttacctcttaaagaggtagttaagataaaattaaggagggtcctagtgcagtctgattggtgccttataagaagaagaaattaggcacagacacgttcagtgggaggacactgtgaagacatagggataagacggctctctacaagccaaggagagaggcctcagaataaaccagtgctgctgacaccttgatttcacatttctagcctccagaaatgtgagaaaataactttctattgtttaagccacccagtcgtggtactttgttatggcagtcctatcaaactactgcaagcaggcagcccaggctattttagcatcacagtctccctgcaagtcaggaagagggagactcagtagtgccctgggtatcccaagatggatgtttctgtttgaatgctcacagggtcgccaggtaactgctgttgtctgttgttcattagtcattcatttctgatcattttcttctgttgtttattcatttacttatttattgacagggtcttgctctgtcgcccagactggagtgcagaggtgtgaaacagcttactgtagccttgacttcctggtctcaagcgatcctcctgcttcagcctcccaagtagctgggaccacaggcatgcaccaccatgcccagctaattttttttttttttttttgtagagacacgatctcactatgttgcccaggctggtcttgaactcctggattcaagcattcccccggtctctgcctcccacagtgctgggattacaggtgtgaaccactgtgcctggcctttctgatcatttttgttggaagctgcataccttgtcagcattttgtttccttccaaaactccaattaaaggtgtgaaacgaagctgaggtgcttatcttacaactttctgtgattggagtcctcgggtttcatttatatggatagtcccaagctcagctgactagatgagattcttgctgaggcaggacagctttgtggacggctgtctttggtgtgaattggaccatgtgcatgggatgccagggtttcaagccaaggctgctttctcaagagactgtctccggcagcttggaatttaagtgaagcttaatttaatccctggttttcacagtaaatgtgtagggtgtatgttacttacagtaggagttggaaaaccattggcttcctttggcctatttatttgaatttgatttacttggaaattttccaagcagcagagcacttagaggtcttccaaagaacttaaaaagttttcatttcacattccaatagatctgttttcaaaatgggtagggcaagtggagtctgtgattaattaggttatagtaaattttgttttttttcgatgtatcctaggtttgaagaaaatgagaggcataaatgttgagaactatcttcttgaattccttcttgattgggttgctgggacacccaacctcaggatatttaaaatacctggagacctaaagtgaagtactctcattctctattttgtatctagggccacatagatgtgtttgatgtgaatcacacctcttcattatgtgtggccgactcttctgagtaataccatgaaaagtgcttcttcaaattccatatcttcacatattgctgttatgtaagaggaatgagactattataattgagtgaaatttaaaatcttgtgctttaagttatgaaataacatgcttttggctatgccatcctgcaacctggccttttcagcaaattttgtagcttgtggggacagatgaccctgaattccagcagcacctgcaatcaaaatagttctcattccagggcccacacaacagggygtgtttgaaagtacttaaaaggaaagtgtaggcaacgcattgtacccttagtcataaaacattatcctggaatttgccttgccccaaagcttgggaagccacccttttctccctatcccaaagtttcattgtaattcccatttctgaaaagaaagaaagagtacgatggaatttcttcactaggatggcagattgaaggtacttaggtgaggaaagagacgctaacagagcttgtgtgacaagatgaccaaaatctgggtggaaggatagtcttagaagagtgattaagtgatgtttatttacccaaataaactatttttccagccaattataacaaatgcatttattccatgtttaatcagttgtagaatatccagcagattcatggggtagaatgtattttatcaagacaaaaatagccagcttgagaaatgatttaaaccagagatcagcaaactacagcttggaggccaaatccagcttgccacctgttttttttatatggcccatgagcctagaatggtttttacatttttaaatgcttgaagaggccaggcgcggtggctcacgcctgtaatcccagcactttgggatttggggaggcgggcggatcacgacgtcaagagatcgagaccatcctggctaacacggtctctactaaaaatacaaaaaattagccgggcatggtggtgggcgcctacagtcccagctactcaggaggctgaggcaggagaatggcgtgaatgcgggaggcggagcttgcagtgagccgagatcacgccactgcactccagcctgggcgacagagtgagactttgtctcaaaaaataaaataaataaaataaaataaatgcttgaagaaaagtcaaaagtaggagaagaattttgtgacagctgaaaattatagaaatttgtatttcattgtttataataaagttttattggaacacagctgtgttcatctatgtatgaggatattccgcactgtatatcaaagctctgtgggcaagcttcttcctgctgaggcagcacagctttctggatggccatgaaaagcaactttcatggtacagcagcagagttgagtattgtcacagagactctagtccacacagtgttcagttatttactgtctggtcctttacagatatctctgcccttccctgctagtttaagcaatcgtttaaatttacttgtggtttttttttgttttgttttgttttttggtttttttttgtgagacagagtcttgctgtcgcccaggctggagtgcagtggtgccatctcggctcactgcaacctccgccttccaacttcaagcaattctcctgcctcagcctcctgagtagctggtactgcaggcgcatgccaccatacccagctaatttttgtatttttagtagagatggagtttcaccatgttgaccaggctggtcacaaactcctgacctcacctgccttggcctcccaaagtgctgggattacaggtgtgagccaccacactcagcctctgaatttacatttgatcatatttttgattgtttactgtgcagtgtgctggttttgacatgcagggtggaatatcctcatgttggatggcaggttattccataagctcatcttttaatagaaacagaatcccttcaatgtaatctgcaaaagataaccactgagcatctccttggtcactggaaattgagccacaaccattaagaaagtggaccagctgttctttcttttccctctctgaccgaccgaatcattcatttattcaacaaatatttagtgagtgccggctgtctgcttgccactgttcagccagtgacgatgaatggtgagcctaacaaaagcccctccttggggaccctacattctcataggaggagatggatcgtaagcactggggggaagaagcaccaggaagaaaagacaaagggggagagagagagagagagagctggggcaagagagggctgctggagatgtggtgctgggccaaggcttttggccacaagaatcaggtgagtaggaatttgtgacatgaagactcaggaggtggcattccaggtggagggaactgcaggggcataggcccccaggtggagccagtgcggcgtgtttgaagaatgggaatgctgttctggaggccagggcagaggtgaggacagaaaaatattggtggggcgagggacaggwttcggagggcatggcacggcagggcagaataaggacttaaaacatttttaattctgggagagacgaaaaggctttgagcaaagaactaacttgatctggtaatgttttttaaaaaaatcactgaaattacaagatatatcctctgccttgtggtttattgcagataatggcattttgtggattaaaagaaagaaaaaccctttcagttcaccagccacaacagttagctttaagagtgttataaaagtaggatcaaaacaataggaattacaggccaggatcttcttaggggagtgttcaaagcttcaggtatccatatcagtccaggtcccataagaaaacaggtggcatatggtaggtaatgggaagacaatggactctagtgtggagggaatgccactcctaccttgrtgcttcaggacaattaatctgctagtgttgtttagaatggattgaagaacagaggggaagaaggtagggagaccaaattgtttcattaaattatataaaaaattttcaaaaaaagtcagcttctattgtggaggaaaactattgtacagaccccagtcagaacagtgaagatacttgtactgtcctcaagtgtcattgtacttgttgattaacatatattaaaaacaagcaggtgtggtggctcacactggtaatctttgcactttgggtggccaaggcaggaggattgcttgagcccaggagtttgagaccagcctgggcaacttagtaagactcctgtctgtacaaaaaataaacaaaattagtcaagcctggtggtgtgccctgtagttccactacttaggaggctgaggtcagggattgcttgagctcgggaagtcaaggctacagtgagtcgagatggggccactgcactccagctttggtgacagtgtgagacactgtttcagacacacacacatacacacacacatacacacatacacacacacacacacaaccaaaaaaggaagccatatattaaaaatgttgccataaaaaatattggggacagggtatataggagccacaaagacgtggctgcatccgggggctagtaatagccaagctcctcccactcctaggcctgaggggtgagggaggaagcagtttccaggggaccctatatagagagccacctgacaggacccagggaatatggtgggaaaggatttggctgaaccaaaatgggagccagtgggcaagacagcctgttgttaaatgggtcagcttcccagaacacacaacacggtggcagagtagagggcaggtggaggatttccatcctaggggacacctcaggagtcttagctgcatcccaactctgtcgctttccctcactcccaccaccagccacaccacagatgcgcacgcatgagcgtgtacacacgcacgctcccaagtaccctctggtattcttccattgcttttctgaccaggacagaggaactatttattaattgtgaaatttgaggacatttctcattatttttgtggtatttgatgctataatatttgcaagacaaggaacatgtgggtagctctaygcattccattttccattcctgataaaaattcaaagcacgtatgttactgatgctagagttaaacattttattttttaaaagtatcatttctaattggctgcagaaggaaaaatacagtaagcaggacattaaaaatcttggggaactatattcagttttggctattctggttacaaacaaagcaagcattgaattttagccacttcaaacagttttcgttttccaccgttgagcatgttaaaactgtgaagacacagaagtaccattcagtaaactgcttctttcagcagcttctgtgatatcccagtactttggaagccttccattttctttcaggtacaagaagttaacaccctgaattagtcactatctgtgtatataaagccaggagctttatattttgtactgaggcagagctgaagtttttagataatttgatcttttaaaaatatttgacttttcacttgatttaggttctgagaatcaaaggttctactaacaaaatggtcaacttggcaaagagaaatatgcagaagtcaattttaggctgtattttgcaagagcgcggtgcctgtgaaagcagcccaagctgtacggatggtgaaactcatttttctcccctactttttctggaatctggccaaaaattaagtatcgtggcacattttctcaacaatcttggccccaaattggagggctggctcagggccccaggggaaaagaaaactcccttttccatttatgattatcagccatgttataaaacttaaacattattttaaggtcaaggaaaataagtcaccttgaatttcccgtaagttttgaagcactggaacgaggwctgtttttgttccttggcttttgctcatgtgtcggttttgcagcacaggatcagwcacgtggttgtggggcctttggggttgaggagcttccactgcatgcaaaggcactttgttaacacagcgggacctgggtgagtgagccaggtcctaggcctgagtcggtttatataattctgctcaggagattggaggcatgaacagataggtggcctgcagagaaagagagaacctccatggatgacaagaggactgtggaaaattattaaaaaatgagagggatcctgtctttctggtggagagagtgaaaacacagctggcatggagccaggccttgaaggatcctgaggaacagagtcactagtcgtggatttgaatgagttctgtgtcttgacttcaactcgtaagcctccgttttcctcatctatataatggtgatgacatctttaccacccatatcacggtatttttatgaggctaaattacagcatggaacacaaaccataaaatacccgaatgctgttacttattattgtcatgaatattatcaaatggcatctgttaaatatttatttttgatgcttgttatcacatttgtagttttccaggagtttgatctaaaaaacacagttgctgccactgatggtgatttcttaggccagctccacataggaaggtttttatatgtggtagactttttatatgtgcagatctcacaaatgcagtgtggagtctcttgttacagttgagaggagtctctggacagggtatgtgaaaggctgagctcccttctttaggcaggaatcggatatagtatggtggagtatgttaatgtacagacagacgcttgaagttctgggtttaagattgtctatagaacttgggaattgggactgcgatttttaaggaaaaaaaaattgccaacttttttttttttttttttttaatggaacttcctagagcctttctgggacttactttacttgttagaggagtaggaggtgtggtaaattccttcctgggtatgttaattaaaatgtagtgaattaagctggagaacttggagcccgaaacatgttagtgttgtataaaaggaggaatataaatgcatgagattaagtttaaaaaacacgtgccacacatttagctagagatcctagttcaaactcactcccccagtcggccccattcacacgtttcagtgccaccttctttgttaaagacgataggactacacttctttggaattagtttaagaggtagtttataagccagtcaagaaaattgacctcatgttcatgctcttaaaaaaaaaaaaatcaattatttttgagacaggcctcactctgtcacccaggctggagtgcagtggcatgatctyggtttgccgcagcctcaacctccagggctcaaaccatcttcctgccccctcctcctgagtagctggggccacaggtgcgcactacaacgcctggctaatttttgtatttttgtagagttggggtttcgctgtattgccaaggccagtcttgaactcctgagcttaatcattttgcctgcttcagcctgccaaagtgctagaattacaggcgtgagccacsgcgcccggccagtcttaattttttttaaagcatttttagatttacaggaaaactgagcagatagtacagggtatctcaatactccctcacctccctttctctttttttgtatcttaatatggtatgcttgttataattaagctatattgatacgtttttattaactaaaggctatcagatttattcagcacatataaaaagtaccacatataaaaaccttcctatatgaagctggcctaataaatcaccatcagtgatagtaactctttttttagatcaaactcctggaaaactacagatgtgataacaagcgtcacagacacataaatatttaatagatgccatttgataatattaatgacaataattaacagcattcgggtatttgacggtttgtgttgcatgctgtaatttagcctcataaaaataccatgatatgggtggtaaaggtatcatcatcattttatagatgaggaaaacggaggcttagaaattgaagtcaagacacagaactcattcaaatccacgactagtgactctgttcctcaagatccttcaaggcctggctccatgtcagctcattcaaatccacgactagtggytaattagatcagatttccttagggttttttgtttttgttttttgttttttgttttgataggatcttgctccatcacccaggctggagtgcgtggtacaatcatggctcactgcagccttgatctcccaggctcaactgatcttccttcctcagcctcctgaatagctgggaccacaggtatgccccactgctcctggctaatttttttttttgttttgttttgtagatacagtttctcygtgttgcccaggctggtcttgaactccagggctcatgtgagtctctccccacttagcttctcaaagtgctgggattacagatatgagccactgccctcagctagatttccttagttttgacctgagtcaaatactgtcctttttcatttgccactttatcccatcatgtagaacagttgcctgacacatagtgactttgcacagatgttgttgaaataaagatgctctgcctgcccttgagttggtataatagagtagggaaggatcaagccatggtgcaaatgacaccacactagcgcttaggaatttggaagcagatggggctgagtgggaatgaaccctggccctaccatccaccaatcctatgacttgggcaagtcacccatcctctcaacctgttttctcacctgtgaaaagaagatgataataattcctaggccaggcgtggtgcctcacgcctgtaatcccagcactttgggaggccaaggcgggtggatcacaaggtcaggagttgaagaccagcctggccaagatggtgaaaccccatctttatcaaaaatacaaaaattagctgggcgtggtggtgggcacctgtaatcccagctattcgagaggctgaggcaggagaattgcttgaacctgggaggtggaggttgcagtgagctgagattgcgccactgcactccagcctgggtgacagagtgagactccatctcaaaaaaaaaaaaaaataataataataataacaacaataataattcctacctcattgaggtagggattaaatgaaagaacacatatgagagtttccagactctggcctcacccatgagaaactcttagtaaatatcttcttaaagaccatgcaggacagaatgtgatacctgtgatgtgagctgcagagtgtcactgagagtcagaaaagaggggatcgcctaaagttgggatggggggttaggaaagctttcctagagagggcaacatttgtgatggacccaaaagaatgggtctgttcttaactgagggacagtgatgggagaataaaacaccaggttgagagactgtatctcacaaagcgacagaggtgggaacgtgtgagaatgtcttttggaggaaagaaaatcacccaatgtaagtggactataatttaatttggcaagacaacacgacgagagagagaaaggtgtaaggccataaatgcttttgacagatatatatttcagcttttctaaaagttttcaagtatagaaaaaagaacagtacaatgaacacccatataacccccctcatttatacaattattaacattatttgctttctgtatagaaatcaatacatattattttttgccaaatcattaaaaattaattatagctagcatgactttatttttttgagacagagtttcgctcttgtcgcccatgttggaaagcagtgacgcgatcttgggtcactgcaacctctgcctcccaggttcaagcaattctcctgcctcagcctcccragtagctgggattacaggcacccgccaccatgcccagctcatttttgtatttttttaagttatacttttaagttctggggtacatgtgcagaacgtgcaggtttgccacataggtatacacttgccatgttggcttgctgcacccatcaacccgccatatacattaggtatttctcctaatgctgtccctcccctggccccccacccaccgacaggccccggtgtgtgatcttcctctccctgtgtccatgtgttcccattgttcaactcccacccatgagtgataacatgcagtgtttggttttctgttcctgtgttagtttgctaagaatgatggtttccagcttcatccatgttcctgcaaaagacatgaactcatccttttttatgtctgcatagtattccatggtgtatatgtgccacatttgctttatccagtctatcattgatgggcatttaggttgtttccaagtctctgctattgtgaactgtgctgcaataaacatacgtgtgtatgtgtctttacagtagaatgatttataatctttttgtatatacccagtaatggggttgctgggtcaaatggtatttctggttctagatcctcgaggaatcgccacactgtcttccacaatggttgaactaatttacactcccaccaacagtgtaatagtgttcctatttctccacatcctctctagtatctgttgtttcctaactttttaatgatcgccattctaattggcatgagatggtatctcattgtggttttgatttgcatttctgtaatgaccagtgatgatgagcattttttcatatgtttgttggctgcataaatgttttcttttgagaagtgtctgttcatatcctttgcccactttttgatgggtctttttttggaaatttttttaagctccttgtagattttgaatattagccctttgtcagattgatagattgcaaaaattttctcccattctgtaggttgcctgttcactctgatgatagtttcccttgctgtgcagaagctctttagttttaattagatcccatttgtcaattttggtttttgttgccattgcttttggtgttttagtcatgaagtctttgcccatgcctatgtcctgaatggtattctctaggttttcttctagggtttttatgattttagatctacgtttaagtatttaatccatcatgagttaatttttgtataagttgtaaggagagggtccagtttcagttttctgcatatggctagccagttttcccagcaccatttattaaatagggartcctttccccattgcttgtttttgtcaggtttatcaaagatcagatggttgtagctgtgtggcgttatttctgatgcctttgttctgttccattggtctgtatatatgttttagtaccagtaccatgctgttttggttactgtagccttgtagtatagtttgaagtcaggtagcatgatgcctccagctttgttctttttgcttaggattgtcttgggtatacgggctcttttttggttccatgtgaaatttaaagtagtattttctaattctgtgaagaaagtcaatggtagcttgatggggatagcattgaatctataaattactttgggcagtatggccattttaacaatattgattcttcctatccatgagagtggaatgtttttccatttgtttgtgtcctctcttatttccttgagcagtggtttgtagttctccttgaaggggtccttcacatcccttgtaagttggattcctaggtattttattctttttgtagcagttgtgaatgggagttcacttatgatttggctctctgttcgtctattattggtgtataggaatacttgtgatttttgcacattgattttgtatcctgagactttgtggaagttgcttatcagcttaaggagattttgggctgaaatgatggggctttctaaatacacaatcatgtcatctgcaaacagagacaatttgacttcctctctttttatttgaatactgtttatttcttcctcttgtctgattgccctgaccagaactttcaatactatgttgaatacgagtgatgagagagggcatccttgtcttgtgccagttttcaaagggaatgcttccagcttttacccattcagtatgatattggctgtgggtttgtcataaataactcttattattttgaaatacgttccatcaatacctagtttattaagtttttagcatgaagaggtgttgaattttatcgaaggccttttctgcatctattgagataatcatgtggtttttgtcattggttctgtttatgtggtggattacgtttattgatttgtgtatgttgaaccagccttgcttctcagggatgaagccaacttgatcgtggtggataagctttttgatgtgctgccagattgggtttgccagtattttattgaggatttttgcgttgatgttcataagaaaaatatggaacgctccatgaatttgcgtgtcatccttgcgcaggggccaggctaatgtctgtgtcgttccagttgtagtatatgtgttactgaagcgagcactaatttttgtatttttagtagagacagggttcaccatgttggccaggctggtctcaaactcctgatctcaggagatgcacccacctctgcctcccaaagtactgggattacaggcgtgagctaccgcacctggcctgtcatgacattttaaccctcaatactttagcatccatctccaaaaaaataaggaagcttcataataaaagtacaccaccattatcataccaaacaaaattaacagtagtccccaaatattacttaatattagtccataatcaaactttctaaattcatttcccagacctttagtgttttaacaaaattttaaaccagaatccaggcaaaaggctgtgtattgtattaaatacacaatcatgtcatctgcaaacagagacaatttgacttcctctctttttatttgaatactctttatttctttctcttgcctgattgccctggccagaactttcaatactatgttgactagatgagtgacaatttagtcaaattgtccctgtttgcagatgacgtgattttgtattgcattgttatgcctcttacctctctttaaatctaaaattccagctatgatattgagatttttaggatttggaacattgaaaagattatggagctttcccccaactcagatatccctatctaacaccaaaataattcaaaaaagaaacaatactgaatttcaaagtaaatgtaaggaagtccatataaattcagatattttttctctcatcaggttggtgcctttgatactagttttgcaatttcaggtaatcacatttttaaactcagcatatgcttgctttccttcagttaaataacccagccctggactcacagaattcaatagacatacagtggctcgttgttttctgttgagctgaatatctggtatgtctaaccttcacagatatgaaaccacattgtttttttttttgagacagagtctcgctctgtcgcccaggttggagtgccattgtgcaatctcggctcactgcaacctccgcctcctggattcaagcagttcttctgcctcagcctcctgagtagctgggattacaggtgcatgccaccacacccggctaattttgcatttttagtacagatggggtttcaccatgttggtcaggctggtctcgaactcctgacctcatgatccacccgccttggcctcccaaagtgctgggattacaggcgtcagccaccacgcccggcctgaaaccacattcttaataatgctgtgtagacccacagaagtgatttttggcttcattgtatttacaggttttttgaaccctaggttccaaccttagtggaatttcatacagaatttcacagtttttctttaaggaaaaacatcaggtaggactgtgggcagaactatagtatgaaaacccatatcctgcagtgagaaactcttacctggaagcgggaaaggagtagaacgcagagtgtgcagggcgctgccaggcctgctataaccaggagtgccctgcataggccatgggatggttgggtgccttctttttggccctgcctgtatcccagatacttgtggccaagcaagtccctggaattgttgcaggcattgcagtgggagtgaaatgcccaccagctgggctacatcttccacgactgagggaatataacttggtattcattggaactccactgaagagaggtcgggtgctttgggagtgttttcttgcaaatatgtgccctctaattgccttttcctaatgatctctcctcattctgctttggaggtggggtttctccaaggatcatttcttttccacctcacctgcaggtgcacagtgaatgatgctttaatttatttcatttcaccttgctgtggaactcagcccatcccacctctgctgtgagaaaagcatttccatctgtttcaactttcctgtggttctgttgacccacttggaagagctccagtgtagtgcctgctggtttttttctatctgcccttaatttggtttgccttttattgtattccaactgaacggattctttctctttcttttaagggaaaggacctgagaaaaacaatacttgtaatggcgactgcttgttaagggtaattgctgtttcatgttaatttgcatgttaaaatgagaatatagggaattgctaaattcaccaacctgttctatcccaaggctagtccttttaagtatatttgttgcttaaataaagatggagctatgcagaatggaaatgtccaaatatgcagttttttttgtgcatgtatatatagagagagcatttaaaatttttatttccatcagcaagagtcattatacaatacatggaaattacagaaaagcagaaagaagaaacccagagacaactagcattaacattctgtgaaattatgtctagtcatttcaatctacatgttatatactctttaaatgggaatagtttcactataactgtctagaactttttgctactccaaagaatgttctgtggatcagcagcattgctatctcttgggaacttgttagaaatgcagaatcttgggctccaccacagacatactgaatcataatttttattgattgctattacatatacattaaaatttggaagcactcttctgcaaatggggtccccaacccctaagttttggagtggtaccattctgtggtctgttaggaacagggctgcacagcaggaggtgagtggcaggtgagtgaggaaagcttaatctatatttccagctgctccttatctcttgcattactgcctgagctccgcctcctgtcagatcagcagcagcattagattctcataggagcacaagcccttttgtgacttgtgcatgcgagggatctaggttgcccactcgttatgagaatctaatgcctgatgatctggtactgtctcccatcacccccagatgggatgtctagttgcaggagaacaagctcagggttcccactggttctacattacagtgagttgtatagttacttcattatatattacaatgtaataatagaaataaagtgcactataaacatcatgcatttgaattatcctaaacccctccaacctcccctcaccctattggggaaaaattgtctttcacgaaaccagttcctggtgccaaaaaggttggggaccgctgctctagaacatactatacccagggcagcatgtagagagaacacaaagtagaggggatgcaaaggggctcagacctatattctcttctccattttctgtcagtcttgcctaaaataatttttgtcagtacatgataaggataaaaatgaggtctttttttttttttttttgagacagagtcttaactctgatgcccaggctggagtgcagtggtgcgatctcggctcactgcaacctctgcctcccgggctcaagtgattctcctgcctcagcctcctgagtagctgggattacaggtgcccgtcaccacacacagctgacttttatatttttagtagagatggggtttcactgtgttggccaggctggtctcgaactcctgacctcatgatctaccctcctcagtctcccaaagtgctgggattataagcgtgagccaccgtgtccggctgaggtcaaattttttaacagggtacgacaaccttgttgagaaacacgactgtgccatgtgtaatcatttcactcagtaaacactaagtgcctcctgcgtgccaggcacatgtgtggcagccacgggccttgcattccggcttgcatgtgctgcagtggaaacatacagaggccaaggaggagggagtggttgcttctgcagggatgggggctgtaaattagaaagaaaggtggtctctgggtggagtcttgatggataaatcagttatcataagttatgagtattaccaggttctggagagaacacaaagatgataaaatttgtctcatccttcaaggaccttatgcttggttaaaggacaggagacagtgtttaaaactaaataatacaaagcaccttgatattagggtagaaccagaagacaagggtctgaacattaattttttagctccgtgacctttgacaaattattccacatgttggaacatccgattcttctgtaaaatagggataaaatgatataaacacctttataaaatcatattgctttcttggccaggcgcagtggctcayggctgtaatcccagcattttgggaggccgaggcgggcagatcatgaggtcaggagatcaagaccatcctggctaacatggtgaaactccatctctaccaaaaatataaaaaattagcccagtgtagtggtgggtgcctgtaatcccggctactcgggaggctgaggcaggagaatggcgtgaacctaggaggcggaggttgcagtgagccaagatcacgccactgcactccagcctgggtgacagagcgagactccatctcaaaaacaaacaaaaaacaaaacaaccaaaaattagctgggcgtggtggcacgcccctgtagtaccagctacttgggaggctgaggcaggagaattgcttgaacccgggaggtggaagttgcagtgagccaagatggcgtcactgcactccagcctggcgacagagcaagactccgtctaaaaaaaaaaaaaaattatagtgatttttttctttttttagtgtagagagatagggtcttgccctgtcgcctaggctggagtgcagtggcacaattgtagcccattgcagcctagaacttctggcctcaaaggatcccccacctcagcctcttagagtgtcgggattacagcgagaaccatggtgcgggacctgtagtgctttttaaagtgaaataacatagcaaagcactggcttgcagtggatgtggaatcaatgctstgtggcaaagatatttaaaaagtgccaagtgagcaccatagatggaaaattgaggaataacagagaaaaagagagagtattttgacttggagtgtgcgaggccatgtggcctgtgtggccttgaggatgctgatgaggcagagaaggtatgaagaatgggccagtgggaagagaagcaaaagaggaagctgcagttttgagactggatagaccaagaaaagagataggagaaacaaggggttgggtttgttggggtgatgtctgtcttaracatgtcaggtttcagggactgctgaaggctgtaggcctgggtgcgtgtgtcagacactgcccttgatgcaggctcagccaggggtgggtgaggaatgaggtccttggccctccctgggcagggtgtttggtcagtgtaaatctggaaaagggaatctttctgacttgttggaaatgtccgcacctgcacagcgtttctcaccaggatgggaaacacaggctgaatgttttaaaccttgaagacctacctcttcttcagacttgggtagaggagaactgaacttttctgtgtaatttttacccactgtcatcctcttccacgggtctctttttttttcttctcaacgttcttcctcccaactgagaaccattaattgcttcagaaaagaaatagaattggatttcttttttttttaagaaatggactaaatgctctaacactgaagaactatattcctatgtgcgtcagtttcttttcaaccattagctcctttatgatctctttatacagggtgggtatagcccacaagtaactatggttactagtttttataggttgtgaccagtctgctgtataaggtgttaacattttgcccaatctgccttatctccatctcttctgtttttttgtgtctgtgtctctttacacgcacacacttaaaacatgtttgctgaaccatctgagttagttgtagagattatgaccttttcaacatgtatttctcaagcacaaggatattttcccacatagcctataataagatgatcaccaataaatattatctgatatataaataatacttgaatacatgttcagatttcacctgttaccctaatactgtcttttatacccgcctcccaatccaggatgagtcaacagtcattcattgaattttgtctttttagtttcctttaatctaaaacagtcaccctgtttttgttttgtttttgtggttcatggcattggtgtcttgaaagatacctttgttttgtagaatgtatcacaatctggttttgtgtgattgttaccttatgattagatacagattaagcatgtttggcaaaaatgctacatagtgactgtggcgatacctactgttccattgtcctggaattgattatgccgagcaccacttggttgagctggtctgccagaactctccgtttgtaaagatgccttttctcttaggtaatctgtggggtgatattctgagactgtgtgtgagtgttctgtcctacaacaaccctttctagaatggttttagcatgtattaatgattgttgactgaatcagtgattgcattggtagttgcaaagtgggattttcttctgctctccctttgatatttattagctggcatcctttataaagaagagtttcccccattattttttcaatgaatatttgtgggtttatggtttcttttttaatccaatgtattatagttcatcaacatcattcttttttttgagaaagggtctcactgtgttgcccagactggagtgcagcggtgtgatctcagctcactgtaacctccgtctcccaggttcaagagattctcccacctcagtctctcaagtagctgggactacaggcacctgccaccatgcctggctaatttttgtatttttttgtaaagatggggtttcactgtgttggccaggctgatctcaaacacctggcttcaagtgatctgcctgccttggcctcccagagtgctaagatgataggcatgagctactgtgcctggtcaacatctttttttttttgttcaaactgccccacttttggctatgaggagcccttttaaagcttctcctcctatgtccttttgtcatgtctgcattagcatttgagcactcccttgctttttggcacagtaagatgttctgggcttatcttgtactttctctgcccagacccaactatttctccagtaagcaaaagtatttagaaaccaagatctaggtacttgggattttctttaaaaatgtacctaatctaggccaggcacggtggctcactcctgtaatcccagcactttggaaggccgaggtgggcggatcacgaggtcaggagatcgagaccatcctggctaacacggtgaaaccccatctccattaaaaatacaaaaaattagcctggcgtggtggcgggcgcctgtagtcccagctacttgggaggctgaggcaggagaatgccgtgaacctgggaggtggagcttgcagtgagctgaggtagcgccactgtactccagcctgggcaacagagcaagactccatctcaaacaaacaaacaaacaaagaaacaaaaaaaaagtgcctaatctataaaaagttaaaagtcattaatcatttaagttcatccacccatttcccaagattattcccttggtggcatcaagagttttagatgttcaccaatgaagggagaaggccatccaaagtgaaggtctttgggctttgggctagaggttgaagaggaatgcacaaagggaaatgagatagtgccaaagattaacttagataacattggaattctgccccagaagtgacttagagagcctgagaaaatagtttctgtgtgttttctaggtagactctgaaaattggttacccttttttatatccattaatggtaagataatttattcccctgagctatacatatgctaattcttaaagcaatttaagatgtgtagtttccatgccaagagttcctaactgctctgtattttcagagtcagtgtaaggtatgtatatgtgaatgtatatctcagcatgtctttgaaaaattaagattcatagtttttattttgaatactcataattggacacagtctctggattttctggttgattataatagttggttaattcttttttttttttttttgagacggggtctcgctctgtcgcccaggctggagtgcagtggcgctatctgggctcactgcaagctccgcctcccgggttcacgccattctcctgcctcagcctcctgagtagctgggactacaggcgcccgctaccacacctggctaattttttttgtatttttagtagagacggggtttcactgtgttagccaggatggtctcaatctcctgaccttgtgatctgcccgccttggcctcctagagtgctgggattacaggcgtgagccactgcgcctggccaatatttggttaattattaaaggtgcatatgcgcagcattttaggcagcaacttgtgggacacaaaagccaggaatttcaaaatttccaaaacaatcattgtgcatttgatataatgatagagtctctgaggaggctgtaaaccttaaattgactgatttgtctggagctccatatttcttccatgatatttttatatataatagcataattaaaatatttattttgccttttctatttgctaaaatgaaacaaaacatgtagtaatttggtagagaacctatatgaaaatgctaaaaaatacaaaagcacatttgaaacataagggtttgtttttgtttttcatcggtgtcagcatttttggaagtaaaaaacaaaacaaaaatagactatacatctatgcattgtatatcagggatatggttattattcagctatgtatgctgaatgttaactgctttataattttataaaacaaaactaccaccctctcctacacatacaaccactgactttcaatcctcagcacattcttgagagtgggagtcctattaaagtaactgccctatatgaagtagttactgggtgtgcaggtatgccaggaaagctaaattgaaagtgaaaagggacacatcacttaaatatgctgctagtgcactactcacaatagcaaagacatggaatcaactcaggtgccccttgacagtggactggagaaagaaaatgtggtacatatacacactagaatactatgcagccgtaaaaaagaactaaatcacgtcctttgcagcaacatggatggagctggaggccattatcctaagagaattagtacaggaacagaaaaccaaataccacacattctcgcttgtaagtgggagctaaacattgagtatgtatggacacaaagatggaaacagtagatactgggacccacttgagggaggagagtggcagggccaagggtgggaggagggtgaggattgcraaactacctattgggtattatgctcattacctgcgtacaaaataatctgcataccaaacccccacgacacacaatttatccagatwacaaacctgcatatgtgcctctgaacctaaaataatagttagaaagaaaaaaaatgaatagattaaaaataaaataaatgtactcctagccaarcatgggtgagtgaactcagatgtgtggtggccaagttgtcccaaattggcccttgattcctgtatatcctcagccttcagttcttaatgtgatatcagtgtgtgggattaaactaagcacactcatgactaaaagagtcactgtttttggcaagtatttaaagtcagttttgttattgggaaaattttaatatagccacgttcttttggaggttacaaagaccaatctctcttttcttacttgctatttaaaactcctcaaactggaagtttatccgcatgcccaaatgcatccctctttgtatttgtttaatcttgatcttgtttgaaaggagctttatccagaatacaatttctttattcagaatgaaatttctttcagatattaggacagcttagatacaattatataattaaaaatctttcaactggattttactaaatccatgactgtattagcctgtaaaagcaaattatattttggcctctgtaatgggtttataaactttaaacatccctattgggacggactgtatttgtccttgaattatgagatagaaaacactttcagaggtccagccgcatgactggacctattaatacttgtgattgacaaggaagctcctgatgttcttgtttttttggctagccttcattctattggctggattcacatgtgacgttaaagtgggggtaaaaaggatgttcccactaatgcaaaatataaagaaagtaaaaattactctgttgtaattctaccatttgtaactagcagtttttcaaatgttggctttttttttctttctagtcttttttcttataaacaaaactgggaagatgagtatattacattatagtctactttctcaatactgcttaagaacattttctccttttattaaatattctacagattttaaaaaactatccattgttgagtattgtgttttaaaaattatttataagagtattacttataatagaaaaattccttgtatatatctttatgcctatcttgaactctttaaaagaaaatttagagtctttttaatttattggtttttaagaatgaaaagtaattccattcattttgtcctttccagcaattatggttaagctgtcttgtctgcaagaatctatctttataacaccgtcatcttgatctgtccaaaatggtcctgtaatacctcctttaacaactttagggaatcttacataaataaatttatcatgtaactgaagctgacccttaagtgtctatggttggtaattgtaaacattgtgaaagacaatcttttttaaattgcattacaatatgttgctgtcctcttaaacataatgacaaaatatgaaaatcacaatttcaccccttctggataaataacaagtatcttttataaacactagttattatgtagtcaattctgataaaatgatctatgtgttcttaaaaaccacattatgcagaatcctgcagtaaaactcacagtgcttaggagaggaatgcagttggggacacaatactcaaaaaactatcagtgacacattaaaaagggatgggaactgaataaatactgttgcacaaatttttcacatactaaatggttaaatacataaatagtgcaataaatatggtacttcaactcgaaaaagtcctgacatttgcttgtgaactcgtgctttagaagggttgccacttaggagttattgtgaagtggtggcagacggattacctgaaatcagatggagtcgggataccagatatggcttggtgtggctcatagcacactggtggaaaccgaagtcaccrgtagatgtttgaggcatggactgtgttcattctktgtaaccatatgcagctggttttggcccaagtgcagccttctgcgataacctagtattcttgcagtgaaatcatgcataaagaaacatgaaattcgagttacactcaaattgttctcttgaaaaaacacaagcgttatagcagaactgagtgtgctgtatggtaatacagtgatgcccaggggataggtgaaatgtgaaattctgcttgtccctatctgaagtagagttaatgcatgtaagacacagagaagaacctggcatragagttaacagtatataaatgttggcagtaacaatggcaatagtaataaatgatgcttatggtgtttgcagggttctgtctgatttttagttacaactacttgctgtagctgtgccctctttctaattgattttgcagtctcctgtggcttgtaaatgagtgtatcacgcttcttagaattacgtctagtagaagtcctgtaataggagagcccraggggtatgccgactttaggttataggttacatatggcatctgttttgcctacttaaactattttatcttattaatgattttattgccttagaatccatttgcacgattgttggggaagtaacatgtttttctttttcttttctttttttttttttgagatggagtctcgcactgtcacccaggctggagtgcagtggcatgatcttggctcactgcaacttccgcctcccgggttcaagcgattctcctgcctcaggcttctgagtagctgggattacaggcgcatgccaccacgcctggctaattttttgtatttttaatagagatggggtttcactatgttggccaggctagtcttgaactcctgacgtcgtgatccgcccgcctgggcctcccaaagtgctgggattataggtgtgagccaccgtgcctggcctagaagtagcgtgttataagtgaggttagaattgtcagattttctgtttcattaggaaaaaatgaacacggctttctcttcccattcttatctgcagaaattaaggtgtgcttaatacatttgaagagtatttaaaagttgttgataactttccttaagttgttgtgattcacttctttttttttttttttttttttttttttttttgagacggagtctcgctctgtcgcccaggtcggactgcggactgcagtggcgcaatctcggctcactgcaagctccgcttcccgggttcacgccattctcctgcctcagcctcccaagtagctgggactacaggcgcccgccaccgcgcccggctaattttttgtatttttagtagagacggggtttcaccttgttagccaggatggtctcgatctcctgacctcatgatccacccgcctcggcctcccaaagtgctgggattacaggcgtgagccaccgcgcccggccgattcacttctatttacaactacttctgtgttgataagatgagctcatgtttggaagtgggaactggcaagtgtgatttcggaagaccttccttcccaagtcacaatataattagaagtccagattctccctcggttcctttttgtgactccctgagaaagacatctttaacaggagtggttgccaagaagcctcactagttcctgcttttgaaactttaataaggcgacagatcgaactgccatctagatttagaaagccttgttagtatattatgaaagaaaaatagtttacatttctcatcatttaaggatcccaatgacatcgttattttgttgatgcagagatactctgaatgacagtcgggtattttgatttttcatttctgatatgattttgaatttaaaatttttgtctctacacactttctagatcgatctctttgggctgcctgacctccttgggtgcttgctattaattaacagactttgtggggaaaaaaaggagcttgccttctgagctttgtaccaaagacctgggaaaagtaagtaattttaaacttgcttttaaaaaattctgttatacctctctcagaaagttaacaatagatccatggctttttactttctttcattcctggcttaataaattttatatgttttcatggatttgtaacatggaaggagactcaggaaacctctttgtgtaaaaaaaaaaaacttgcaagagattaagatgatgttctacattgtgccatttcttttgggtttcataaactgagtcctcaaggttgtgacaaaacttttatcagatttgcaagtgattaaacatcaaatacaaggcaatgtaatatgatgtgacagaaaagtgagtccagttgtctgagctttcaggtgttttagacttttagatattttggataggctttttggttctgaatttttagaataagtatgaaatcgacttggttcttttcttgtctggaaaggaaagcaaaatgtggaattgcttgtccaataaattcttcatgtagctttgtcttggaagaattgatgcacctcccagttttattttagaatttttttgagggcactataagacattctaattgagacacttgttgaatgtttttgctgtcttttagaaaaaattgcttggaaccagaaaattcagttttattctcttatctttttgaaaaatggaccttacagatctataaagtcgatctgtttttttaatggatactgcttggaattatgagtgaccaaatgcccgtaacaatatatgcaaaataaaatatgcacgtgcacgcacagaaacatacacaaatatcctctctagcatgttccagaaacattatcgacaataggaattgttcttccattaaattactagatagctttctaaacttcctatgctttgtgtcttatagctccactctatttctggcagtataaatgagttagttgaagcatgtttaaaataaaacaagacagaacagaactttgctttagttctatgaaagcattaaatagtaagatcggattttatagctctgttgttattgtatttactataaatttaattattattaaattgggttttattttgtaataattataataaggtaagggtcttgagttttgaagcttatttgaagttaaatatttgtactgaaaaaataaatattttgggaggccgaggtggacggatcacctgaggttgggaattcgagaccagcctgaccaacatggagaaaccccatctctgctaaaaatacaaaaaaattagctgggtatggtggtgcatgcctgtaatcccagctactcggaagcctgaggcaggagaattgcttgaacctgggaggcggaggttgcagtgagccaagattgcgccactgcactccagcctgggcaacaagagcgaaactccatcccaaaaaaaacacaaaaaccatatacgtgtgtgtgcaacacacaaacacacatacacacagacatagacactgcacatacacatgtaatttctgagggatgtcaagtctctgctaaaatatgaattagttgaaagtaaggaaaatctcacccaaaatatatttttttgttacagtgaaatatttgtaatagtgaaatattattgtcagtggaatttaaaaaaaaaatagaaatttgtaggttgaattttattgtcttgtaatcacatgttaatcttaaaagaaatattttatgttgtaattgtgtgttgtagttgttattccattttggaaggatatttgaaaaaggattatgttggaggccacccaatctgtctacagaaatagaacaaaaaggtcaaatgattgattctctggacttcagggtctagatatttgcagtggtgtttagattgcaaatgtaacttagcttcagaaagtaagctacttaagctgcctttcaaataagctgccttttcaaatccttatttcaaagaaataagcatttctttaaaatttcacatagtctctagtgcagtattttctttacattataccaaaatattcccttttgggatacattgtagcattgttgtaaaagttgtgttttgattttatagagggaaggcatctgtgggacttgtgtgtttacagtaagctaaagacagccctgtgttactacagggactgtgacaaaaagatctctgtgtactaaacttgatgttaaggccagacgccgtggctcactcctgtaatcccaacacttttggggggcagaggtgggatgattgcttgagcccaagagctcaagactagcctggacaacgaaagagaccctgtctctacaaaaaataaaaaagttgctgggcttagtggtaagtgcctgtagtcccagctaatccagaggctgagatgggagggtcacgtgagcccaggagtttgaggttgcagtgagctatgatcacaccatagccctacagcctgacacttgagtgagatcctgactctaaaaaaaaaaattagtaaaaataaagttgatgttacatgtgaatatttatatacgcagaaggatgtttacaatgtacccttaaggttaaaaaaagagaaggttataatgcagaagtgtactgcacataaatctgattttgaagaactagttaagttacatggaagttaatgggaggggacgggaggggaggggggaggtgtcttttctgatatttattaaagtcataagaaaatgtttctgactgctctttgaaaactgtaagggatacttaaatgtcttggtggtttctttttggaaaagcaaacacacaattttagagaaaattcagaaccctagacaacctccacacttctttttaacctctgtcctttactttcacttttttcttaattgcatgtgtcttcaaagtcttccttgtttcaagcatttcaagcaattcagaaaattgattgtttgaggtagatttttggaaacttgagtctataatggtgataaaatataaccgtaccttcaaaaaaattagccatggattgttttaaaggaagtaaaatttgtattttattatcctacttaatgcatgtccatgtttggttttatgtcaaccctaaatgagtatgcagcaagttttttggtaactttttccacttaataataaataatgcatatccatgctaataagtatttacctacagcatcacttttagtgaaagggaaacaactggatcttagccttttgtttaattttgggctrtcctggctttcagttagaaaggagtgtaaatatgtggaatatatggcataggtttttcatgtgagaacagaacagaaaaggattccccatttagaatctttatggtgtttactgtagccagacatattctgaatmggaggctcatgggtctgaatatgtgctcaaaatggtaagtgtcactggctgacaggtgctgtatataaagctttgtgtcttctttggtccctttgttatattatacaagagygcaggtgacatattcctcctgccgagctgtcttaatcaatatttctgtgcctaagggaggattttacctacgcatttctttctccaaagaaactccaaatagctcagatgaaatgatggttacagaaggaacactgatagattttggaatataatttatttatggagcaaactacagtccaggttaattggagatccagaatgttttataaacctttgtgtgcattcttaatttttagttcatttattgagcgaacatttgttgagcaactattgtgtgccaggagctcattattcaaagatgaatgagatatgtccttccttttagggaacttaatttgagtttcaaaattagatttaaataacctttatgtagcatgtaccatgtgaaaagcagtggaatggacgttatattcttagacaagatgttcaatgactacaattcgataatgatatttattgacctatacctttcaaaataagttaggaatatagttttctaatttttaaaggtttttttctcccattatgattttggtacctgctgctactttttaagttaaattaggaaatggaaaaaggaaagttaaacaaattacaaatgtttaattggtaaatgtagagagtggttttgaaaacatggatgtgtgtgtgtacacaygttttatatttggaagcctatatgcatatagtgtcatcattttttttctagtagaatatttcttagttcacatgatacaattaaatatatttatcaagatttcttggtattttgcccttagagtgactctgtcgcccaagtaagtttggaagccataccgttaagcacttgatgtccacaggaattctaggggtgggcgttattgaaactcgggggaaaagtaacttgctaccttgatacagttagaacatgtttgagtcagccttccaattatgatgcatctcactacaaagccctgcagtatcttcctgactcccatgagctggtggtgaaagctgattcaagaatgctgtaggtatgcaaaggacgagcagtcatttcagctgagaaatcaggaagtatgttcactgcattgaagagctggaactgaagtatgacttgagggctgagtgagaagacagaaagtagggagataattgaggctgtagaaaaagcatatgccaaggcatggaggaatgggaactcatggcatatccagagagtggcaagaactccaccgtggctggggtatggagcgtggagaacagagtggaccctgagatcgaaaaggtgccagagtgagaaaggtcacacatgtgccatgctagagacttggagtttctaaacaataaatagccatccagagttttaaaaggagaaataactagatgggagttttataaagatcacttgggcagtagtgtggaatatcatctggaaaagagaaaactggaggctggagacccagggccaccatgtgaggttgtgtagattgttcactgcagaagtgtacgtgtgagcagcagatgggaggacttagaaccacccagcacacttgtcatcaagctgtgcactcatggggcttggcctgcctagagagagcaccttttataatttacacaatgggatgatctacttgcttttaattgttttaaaagtaataggtatgattagataagatgaaacagtgtcccctagggcctaagagtctggaggtgggcatactaagctattggctgtatgtcaatgggctcgttccctgtcctctgaaagcctatttcctcatctttaaaggagagttaataataggttctgacagggccctggacagaccagttaagagaaggggtgaaatatgagagatggagaaatgatagatctgggactgcaggctgctgctagctgttgtttagccctgagagtgtgctgggaactgtactaagaactttgcctgttttattttatttaatcttatatctgctttcagcagtggatgttattaccccattttcaagattttgaaactgagcccctggcaggtaaaataacttgtccaatgtcacacagccaaggagtggcattgtcactacttgaacccaccactgtaactgtcatgtttatgctcttaaccattttgccacatttataagtgatcttttctgtttcactcctttaatatcctccttgcatcctgtgttgtttttaacttgaattgatcatatttatgtaacattttatttaatttgctatactataagatcccgagggctggggtcaggtctcatgaatttttttgtctttcgtagcaccttgcttaataaaatatggcagataacactcaataaaatgtggttgacagaggctgggtgcggtggctcatccctataatcccagcactttgggaggccaaagcaggcaggtcacttgaggttaggagttcgagtccagcctagccaacatagcgaaaccccgtctctactaaaaatacaaaaattagctgggcgaggtggcatgtgcctgtaatcccagctactcgggatgctgaggcaggagaatcgcttgaacccgggagacagaggttgtggtgagccaagatcgcaccactgctctccagcctgggtgacaaagggagactccctcttaaaaaaagtggctgatagaattaataatctctaagattccttctgtcttctaaagttaaataatttttcattctataggtaaagcttcagttgcagttatacagttaaagtccagtagaacttaaaaagggcttcttggatgttagtttggtgtttggactgatggttaaagtttcaagaaattcctaattgccattttatctgaaaaataatttgtgacttgctgtcaaagactgaagcgaagagtaaagtgtacttcttgcaagccctttttggaggctataaagctatgcttgctgcttcattgctgcagcaggtataaaactccaatgtcataaatgatatttttgagttcataaaaaatattacattgtcactcatattagtaaggacctcagtctctaaactcatgtggagccccttgggccaatggtcacttgtttttttcttcttcttatttttattgacaaataaaaattgtatacatttatagtatacaacatgatgttttgaaatatgtatacattgtgtcaatcctaaattaagcgaattaacatatggattacctcacatagctgacagtcactcttgtttggtgcctgctggagtcagatttagacaacaaagtgacagttaagggcaagtgactgtcagatgccctggagtcagactgactgtataggtttggattccatctcttctgcttatgaacttttttttttttttttgagatgaagtttcgctcttgttgcccaggctggagtgcaatggcacaatcttggctcaccgcaacctccacctcccagattcaagcgattcttccgcctcaggctcccaagtagctgggattacaggcgtgcgccaccacgcccagctaattttgtatttttagtagaagtgggggtttctccatgttggtcagggtagtcttgaactcctgaactcaggtgatctgcactccttggcctcccaaagtgctgggattacaggcatgagccaccgcgcccggcccttcttacgaactttttaacccttggcaagaaaaaaatctgggaaatgaggatgggtaagaaaacaggttgtgatcataggttcatgtacctggttcattaggaacttagggaaaaaaaaaatccttatccacttggaagccactttttgctcagatacccttaaaaggaagccaaaattgtgaacttgtaggacagaatttagcacttcagcgttatagcctatgtttatctcaggatgaccctttgctgtttttaaagcagagttcacgtgctcttgtaactactgactgcatctactctcatgagccctaaggaggtagtttaggctttgcttcatgctctgtgtgcctragtaaaataggaaatgatggcttttaagaaaatggaaattattacttgagatcarcatttcatctgggctttgaaaaactctggggtttctttcatcttccaggagagcagcacaactgagctgtgagaaaggaaaccaaaccctagggaaagttttatagctcgtttctgctgatgttactggaaaagaggaaggtaagggcctctaaatagctctcgtagcctcagtcgacagtaagttcaggtgttctggaaatagaacacaggggagctctttatccccattggcctctgcttggcctgaaggagagggtgaaacagcagcagaatggatctcttaaaacattgttgtacagcaaaaacaaatgtattcccacagcagagtttcatattttctttcatgaatttaaagttgaacagaggccggtgatatttttctcttttgaagttttacatcttagattgctgtaagagcaagcacagttgaatgaaaactctattcagaccaagtactttttttttttttttttgagacggagtctcactctgttgcccaggctggagtgcagtggtgcaatctcggctcaccacaacctccgcctctcgggttcaagcgattctcctgcctcagcctcccgagtagctgcgagtacacacacgcgccaccatgcctggctaatttttgtatttttagtggagacgaggtttcactatgttggccaggctggtctcagactsagaccaaatcttactcttgttgtctgtagctgcttagttctgcgctttaaactaagggcaaacttggctcctgcattcttgacagtgaaaagcaggagctaggaatgccgactttaaaaacccacttccaggtttgcctccacccattatgtgattcctgcaagaaagcttcagtctgctgtaagctggtaatcccttaatactttgatactttggtaaagcaaataagatcagattatataacttttccttttacttgtgaactaattattgttttcctgcatttaaaagcagatgttaaactcctcctttgatgttcaacagcagacagactctagttgtgccttacagcccttgatgcatgtctgttgtttgaatgaagatcagctttggcaaattagattttgatggctgcattttgatctggaccatagaagagaatggcaatttattcttttattcaacatttattggattcctgcctggccctttacataaattgtgttcagatctcacaaataccagaaaaccttgcaaaacatgtctattttatagataagaaaaaatagagcatagagagtggttagaaaacttgctcaaggttacttaccttgctgttaagttcctgggtatttggttggatttttttgctgacctcaaacctgttactatataggggctgccttttaagaggacataatcaatggagcaaagatcttgaggagctgggattaagaaaaaagtacttaatatataatcacagtgttgtggaagaaagaaataatcatgagcccctcattcattcatttactccgcagatatttatggactgcctgtgttgtgctagataactctgcaaggtgttggtgattcagwgatgggaaagacacaatcaatccctcaccaacttcaagaaggaagtagggatgcaagaaagagtatatgatatgttgctcccctaaaaggccacagtgtcttgtttgggagagcttttatgaagtttttcaagatgtaaaaatgttgacatcttcacaaaaattacttacttttttattcttttgcttcattatgtatacaaaagtatctgcaaataaacggggggtgacttcgctagcatactttgtagctgcactccttgtttgggctgctttggacgtgcagaagtggaggttggagcaaaaactgtattgcattttaaacaaagtcttgcaaacaaaaattgtggacaattacctcgcaaggactatatctaactcagctttgggtacccctttttccggagaagatagcagagtgcctagtacaactctgattggttggctcagtgatgggaaataaaataccaaagcaaggggagaggaacctcatagatgggggatgagttcagatggtatctagggagagtgtgagggtgacaataaaataagccgacaaatacaccaggggatcagatcacatggcatatcatggacttaattcacacttacagactattgcagtaaccaggagaggaagagcagtgtctaggtagtctggaaatgacattaggttttggtgcttgagagagactgcagtcttcctttgacttctgactcttctgactttctgctcacatatgagccctctatgccttcttccccactgtggtctttatttcattttttgagactttcagctgttatatgcagtaattgtttctttaataagttaggtgaccatacatactaacttgctgggacaatcctagctatgcctgctgttctggcaaaattyttgatactgacccctttcaatatcaaaaatgtcctggtttcgatcataaattaaataaccaccctactaataaaggaatgttgtagcattctatatctttttaaaaaatctttacagcattcagactgctttgatgaactaaatgtggatgtagtatcagtaatattacatagcagactagtgtctgatgtcttataagtagaaaaaggaaaaaatgagcagtagctgaaaaggctcaaatgtactgtagagagaaattaattgatttcaacaaaacgaacttttattacaaccagttgttggcatacccataggagagagggcacttaaaggttgccatgatgatgggtagtgtttagggaatctagcatccttcgagaaaatcttaccatagcttgttttgatttagagtttcagtgtttccattgcagtggtaatttaattcagatgcattttcatttatttcttaagtagaaagtaaaagaatataacttcttagaagaaagattctgtcagaggtttatagaaacgactggakgggaaatgttaaattcaaatttttcccttaaatcttcttttaaattatgtcttctgatgaaaatggtggtgttttaatcaaaggagatattcatatagggactcaatgggacaccatataatttatgtttgggtttttttacttaataagtagggttaaattgccattatagttcatatacatggatttgaagaaacaagctagtgtttcgttatataaatatatgtaaaataaaagctttcggtgttcaggtaatgcttgacaataattgcagtaggagacatgggcgtaggatcaaaacatgcttatgaccactcttttccatatcaatattttatgaaatagtgatgcagttaccttcagatcccatagtgacttgtaccctgcagtawtatctcttaaagtagggtagatttacagagtagagggactgatattatgtaatctggaaattctgtttatctttgaattaaattttgactcttccactggctatctgtgaatgagttttttctttgagccacaactttctagcctataaaatgggaatactaatatctgctgcttagcttattaatagaatttttgttaactcctgaatctaggataaacatgaagtgtataacacaaaggttggtgttctcccaggctcaggagttaataccagatactgaggatggaaaaaatgtgtgattgttgaagggtgagactcaaaacataggttgagcttccctaaaaaaaccgaagtccaaaatacgaaaatagatatctgacactttttgagtgctaacatgatgctcaaaggaaatgttcattggagcattttggatttcagattttcagattagggatgattaactggtaattatataatgcaaatattccaaaatcccaaaaatctgaagttcaaaacccttctcttcccragcattttgggtaaggaatatttagcctatagttagtgagcagtttctggccaatcagaaggatgctgactgtagatgttctggatggtcatcctgacacccacccactggatatcagcctcggttgtcaatgtccagaaatctgtgtttaacctgcgatggtttgcaagraaacccactggatctcttagttaaattaatgccccttctctcagctttgttacctagaaaaaaaaattaatgcccctttctctgagatgatctggaagagaaaccattttcatatggtgaggtgagtctggacatcatgccttgatagctgtctcaaagattcccattttcattgcacaccctgctaagcattgctgccagcactgtggggaccagctctttggggactctgctttcccattttcctttccatccctcatctggaaacatgtccttaattccctagagaagatagaagttgagtttatgacttaaaaataaaacaaaacctgctagttatggcaggcctagacccattcctcactgggccctctaccaggctgcctctctggtttagaccatccaatccctacttcagaagtgactgtcagcacagctagatatagaatctaagcatcaaagaggatgaggccctggaagagggagggtttcctccttccttctcccaagtctttccttgctagtttccatttcttatctcaggatctgcttcttcccaggataattgaaaatgggaaatccacctctcacagcgcagatcctaacccctttccacagggctgcgatggcaatagccacagctgtcaaaaagtctagtatcagtacagaagctccccatataatcctaggaagttcctttgctagggcagggktgagttgataaaccatagtgggtgtatattgatgtggtcaagagtctttgagaaaccactttgtggtgaccttttcaccaacagactaaggtaatactcctgacctttagctcaggagttcgattagagaagatagaggaacacaggaagcctgagtttacaatcatggttgtaccacctccttatgtgaccttggagacatcaagtacctcttctgcagttctcattttcttatccattaaatggtttcacatgtaacatgatttttaaggtccttgtcaatcacgaattctatatatctataataactcctaaaagtacctcatacaagttttgaatagattcagcttgtctgtatctgaaggtgacggttaccattcttaacaccgacttggtttgtgactgcggctgttttgtggaggcccacgcatctattgctggaaaaggctatccccccattatttggtattataccgctgtcttggtatgcttttgaaatacaatggcagaattgttttctgatgattatgataagctcaacaagtctcccctgtgattgtcttatgtaaaatgtcccactgtaggcctgaatattagtgatgataccgctttgtttaaaatactggattctggctggccacagtggctcacacctgtaatcccagcactatgggaggctgaggcgggaagatcacttgaagtcaggagtttaagaccaactggccgtcatggtgaaaccccatctctactaaaaaaaaaaaaaattagccagtcatggtgatgcatgcttgtaatcccagcaatgtgggaggctgagttggaaggatcacttcacctgggaggtggaggttgcagtgagctaagattgtgccactgtactccagtctgggtgagagagcaagactccatctcaaaagaaaagaaaaaaatatgtattggttcctctgtatctgaatagatttaattgcttctgatttgtgatgttgaatatactttatagattaaatacaggtgattgttggtaacttttaaggtatattttaaaagagaataaatgctgatttttccgtttctacagaaaacatcattggggttttaataggaattgcattgctttaagtagtatagatgacttaatgatactaagtgttctaatctgtgaacacaggatgtctttccattcatttttatgtaatcaatatttatttatttattttttagagaaagggcctcagtctgtctcccagactggagtgcagtggtgtgatcacaattctctatagctttgaactcctgggctcaagtgatcctcccgcctcagcgtcctgagtagctaagactatagatacatgccaccatgcccagccttttccatttatttgacttttatcttattctgacaggttttttktktgtgtgtgtgtgtgtgtgtggaatttttaaggttttctacccatgagattatgtcatctgcaaacaaagataattttactgtttcctttccaatttaggtgaattttttttttagccaagttgctctggctaggacttctactactatgttgataagaagtggtgaaagtggacattcttttcttcctcttgatcttacaggaaaagctttcagtcatttaccattgagtatgctattagctgtgggcttttcatatatgacctttattatgctgagatagtttccttctgttcctaattcgttgaatgttttttatcatgaaagtttgctgaattttgtcaaatgctctttttgtatcaaatgagatgatgatgtgttttttcctctttgttctgttaacatggtgcatttcattgatcaattttcatatgttgaactatccttgcattccagagataagtcccacttgatcatggtgtataatcctttcaataagctgttgaatttggtttagtagtcttctgctaatgatttttgcatcaattttcataagaaataatggcttgtagttttcttatttttaaagcgtaattgtttttctttggtatcagggtaatgctggtctgataggagtttaaaagtgttccttcttcatttctttggaggagttgaggattgatgttaattcttctttaaacatttgatagaattcggctgtgaagstgtctactctttgggttttctttgttgggaggtttttgattactaatcaatgtctctgctggttataggtctgtgttcaagtttttcatttcttcatgattcagttttggtaagttttgtgtttaggaatttgttcttttcatataggttatctaattttttggtaattatactcctataatccttttgattgctgtagaaacagtggtaatgtcccctttttcacttctgattttagttagtcttctttttcttagtcagtctacctaaaggaatgtcaattttgtcagtcttttcaaagaaccacctcttggttttgttgatttttcttggaggttggcttttatgactttcatttataacttattattatacaaatcattatagattatttcagtattagacttctttttttttgtttttgtagtttggcaatgaaaaaggcacctttgccttacatatgtagatgcatgaagggtttaaatagtcagcactttaaaataatgaacttgaatgtctctgccattttttgttccttgggtagtrcctttgtctcactactcattgtagtttgttcttattatttgttgcattattgtggttactctcttgtggatagttaaggtagtgtccatgatttgataaccaactggaaagtttccttatgttttcttcatgctgaactgctaaaaatttaggtgagattaatyaattgtcattattatattaaatgaaaagccaaagagtgaacttagggatgaaagcttagaggaccagtggtctgaaaatttcaaattttaattctgattttctgaatcagtgatgttccattcaacatgtagattcattatctctctataccctatacccccatgtaaaagttttgatgttattgtaattcagtgagtgaccttctctgagattatgtgccataggcagtttcagtctttttttttttttttttttgagacagagtctcactctgtcacccaggctggagtgcagtggtgcaattttggctcactgcaagctccacctcccgggttcacaccattcttctgcctcagcctcccaagtagctgggactacaggcgcgcatcaccacgcccagctaatttttttgtatttttagtagagatggagtttcactgtgttagccagaatggtctcratctcctgaccttgtgatccacctgccttggcctcccaaagtgctgggattacaggcatgagccactgtgcgtggccggcagtctcagtcttattttcaaggaaatgccactcaaacaaatcatttaatgacttacttatactgaagctgagaatctcgttcaggcttcttggcttactttaatttctccctcccttccttcatttcttccctgctcctcagaaatcaagaattttctagttatgttttctttttaaaaaaaaaaattaacaaaagttgtatgtattcaaggagtacaacataattctttgatatatgtatgtgtactgattaaaaatatggaatacttcacaaatttgcatgtcatccttgtgcagggacyatgctaatcttctctgtattattctgattttagtatatgtgctgtcaaagcaagcaatttaatttctttttgataattcatttactcaattcttttggaccagaaacattttatctcaggggcatgatgaacacttgtcctctgtagtgcaatgtsttgtgtattttattatcgaaattcttacttaaaacttacatttgcgaatcaagccatttctttttttttctttttctttttttgagactgagtttcactcttgttgcccaggctggaatgcaatggtgcgatctctgctcactgcaacctctgccacctgggttcaagcaagtctcctgcttcagcctcctaattagctgggattacaggcatgtgccaccatgcctggttaattttgtattttcagtagaaacagggtttcttcatgttggccaggctggtctcaaactcccgacctcaggtgatccgcctgtctcggccttctgaagtgttgggattacaggcgtgagccaccgtgcccagcctatttctttaagagatttctatcaaagttttcatagatttattagtttgttatctagtcactattaatgatcactttttttaccaataaaatatttttatattgcagctttataatacatattttattgattctaagacacagatcttttcacattttaatatctttaaaatttgatatatcttgcaatcactgacattttgcagctatgattcacagcattttaatttttattattttttaaggcctatgaatgtaacataacttttatttttattcttagtacagaaaatactggtgtatcttctagtcaacagcagttagatgtgatgaaataagttactgttaatgatcactgtaataattactgttagaaacttactgtgaaacttctacctttacaacaggacctataaatggcaatgaaacttttttttttttttttttttttttttttgagacagagtctcaatctgtctccaggctggagtgcagtggcgtgatctcagctcactgcagcctccaccttctgggttcaagcgattctcctgcctcagcctcctgagtagctgcgactataggtgcgggctaccgtgcccggctaatttttgtgtttttagtagagacggggtttcacatgttggccaggatggtcttgatctcttgacctagtgatccacctgccttggcctcccaaagtgctgagattacaggcgtgagccactgcacccggccacaatgtaacagttttagaaaaagtttagagtggaaaaaaatgacctgtaagccctaaagctatatactttaacaagtatattttgtatgtatttcattcccgtctttttacatgtgtacatatttttatctgtttgtagctatagcatacatactactttggtctacttatttttttattcctgttatatcttaatttctctttgtttcaggccttcatatttgtcttatttatttatgtattgagacaaagtcttgttctgttgcccaggctggagtgcggtgggatgatctctcctcactgcaacctccgcctcccgggttcacgccattttcctgcctcagcttcctgagtagctgggtctacaggcatgcgccaccatgcctggctaatttttttgtatttttagtagagatggggtttcaccatgttagctaggatggtctcgatctcctgacctcaagtgatcttccygcctcggcctcccaaggtgctaggattacaggagtgagccaccgtgcacagcctatatttgtcatttttaatagttccataatctatcagtgtatgaccataataaaactgcatgccgcccagctgctgaaaatttagattgttgccatttttccttttgtgaataatgcttcagtgaacaactcttttgcatatttttattaattttatcattaattttggccatttgttttatgaaatataactttggagaggatctctttagccctgggatttgaagctgcagggagctatgattgtgtcattgtacttcagcctgggtgacagagcaggaccactaactcttaaaaaaaaaaaaaaraaaaagaaacataactttgtagaagcctcctgaactgtgttttactgtgaagaatcaatctttatattcaaataaattcaaattaacagctgctattataacactgttcattcattctttcactcagctatatatcctccaagaaaatacactggatcattatgcgttccataggttccaagagctaaggaatcaaagttaaataggacaccccccgatgtttgatattttgttgcatagtgggagactcaaacttatcaaaaataagtactgtgtgatgagggatgttggaaagataagggttaaagtttcttagcatgtaatttactttgagagcattgttgattggtgttcttttaagttatgaggtgtggacataccatgttacgtttttaaaatgtgtctaataggtttatctgacagaaaatggccccwcctgacctatccataacttccttttaagtctaaacgtgtgtcctgtgatccaatgtttgtctagagttccgtgtcatgttcctccaacatactgtgtcatgttcctccaatatactaagttccctgttgccagtaactgtgtcacaagtctttttcctttctatacctactacaatctgctgtatttgtagtaggtgtcaaagtatcggtagttcatttgacttgcttttaattgtagttttttaaacgaatgacaatatttcaccaatttatactttccttagtacttcattgactatcagttgatattctatgatcaatgcaattttaattctgtcttgtcatatttgtttagttaaaaaaatttcaagttaagatggttgaaagattatataatcccatagagatttttatagtaaaagtttaaaattctggtacttgtgttggttggaagtagaaccttcactggacaaggtaaaacccctgtgtataaatgtttggaggctgtcttaaagctttgttgagatggaaaaaaaattttatataactaagtatcaattcaggcatttgacacaatgaatatattttggaaatagccatttatggttctagcattaaaggtgattagctagctatgaatttacctcctttatacgcatgcattacaaagtggaccctacttttaaatttctcaagaaggtattctggaaacagcttttgagaatgatttcttgggattttttttccctttttgtctttccatttctgaaacctgaatagaattgtgccatgttctttgcagagctgtggtgattagattgtacagtttcacacatgtgtacacacgtacacacatacacacacacagacacacacacactgctgtgcagaatcactgtcctgttgtgtgatcttcaaatgaagcaagagaggaataatctgggattgactgagataaatttatctcagctcttcaaaataccatgtgagcatagtgtaactcacttggacagctgtggaatgaaactcttgttttagtggccattagatacgtcargagaactgactacgtagaagaatgtgtggtaaaggtagtttggcaattggtcaaatttgaagtagcatttacaggccgaggcaggtggatcacctgaggtcaggagttccaggccagcctggcctacatggtgaaactcctaaaatacaaaaatatctcctaaatacaaaacatctcctaaaacaaaaaaactctcctaaaaatacaaaaattagcctggtgtagtggcaggcacctgtagtcccagctactcgggaggctgaggcaggagaattgcttgaatctgggaggtggaggttgcrgtgaggagagatcatgccactgcactccagcctgggcaacaagagtgaaacaacatctttaaaaaaaaaaaaaaaaaaaaaggagcatttacatcaccaactgaaattaaataattgtcccccaaggtgatgtgtagcctgacttttgtgactgagggattgatctcttgacaagtctttatgaaataacaccacaggagggaaaattatatgcaggcatcaagctttgcatttattttgcaagccctctttatcgggtttgtatgatcttgttgtgtacagctaacaaaaggttacttctttgtcatgaaagscgtcctcagttttcagagacagtggggcaccacagagactttctttctctgcatccacatttctattaatgtcattactgcatttgattcctttatgaagcccttttggtcacatcaacagtgcattctaagctctctatcttaacttctagctttgtctgcaaaatttgtgtggttagcctgaggcatatgcagataaattgcccaggttcagtgttctcagactgggaactaaatgtgctgcagaatgctgaattgatgggtgtagcttttcagcaatattgatgtttctacagttgaatgtaaatctttggatgccttggtttgcattttcatagtcgtgtagttcctgaccactggttttcaaactgcctcgtctctctgaaagctgtgtttcagtggaaagacaaagaaaattgttcttcctcacccactactcttctgcccattcacaacagtaagaatctgagcatgtctctggccacacgcaaacagtggcagctcccgattcacaagctgcttacatttccaaastgaggttgttgtgaggtcaattagtggtttagaactctgaatgggttggctaatggtagaaactaatataaagaataggtgagctggccggtcgcggtggtttacgcctgtaatcccagcactttgggaggccaaggcaggtggatcacgaggtcaagagatcgagaccatcctggacaacacggtgaaaccccgtctctactaagaatacaaaaattagctgggtgtgatggcctgcgcctgtagtcccagctacttgggagggtggggcaggagaatcacttgaacctgggaggtggaggttgcagtgagccgagattgtgccactgcactccagcctggcgacagaacgagactccatttcaaaaaaaaaaaaaaaaaattgatgagcctaccaaaactttggtaacccttaacgttccacaaacagttttatctgtatcttaaagcttaaccttcccccatgtttctctatggaaaaatcttctttgttctgctttgaaatcttatgaaacaaacatttcattcttaacttcagtggatggctacctatctctacctgtgtatcctggagcaatgtatcaatcagggttcttggatagaagcaacagagactagcttaatggtttaagcaaagaaataatttattgagaagatattgggtacattctgaatttacccaagttgggggaaagaacaggcactaaaaagagactgcacagccagattcatagccaaggtcatacaataagattagttctatgttgggtagaccctgtcactgaacactggacattagtgttcgtgctgaccatctcttcaggatcagacacttggtaccaactctgtcacttcagcctttgctgcctctgagcagtgggtgttgttgccattgccctcacccatggtaatttccctcctgctcctgcctctttatgtctctggttctagattcagggttgaccacggctaagtcatgtgcaagccttggctataagacactctgggaatgttagtgtctagccatttttgcttctatgttgagagatgtgcctctcatcagaactcacatgatgaggaattccccaaacataggggaacagagtttagatgccggccatttcccagtccttctcccgacataaggataaaagtcaccataagaagcttcagtaagcactctggtagaaggggaggtgttacagtggccaaggtgtttatccatatgaagctgtggttaatgaactctatttaactaagacggccagttgttccttgtgcactggtgtccagggtccccttcaccatgtgttaactaaaactagaggtgtgaagatttaggcatatttgacctctcacactgtggtccttaaataacaagatgcactaaattgaattttaacaattggattagctaggaggagcagattaagacttatctgtttccttgtttatagtagaaaatgaaatttcacattatcaatttgtcttatacagttgggtggtttatatgtttcattgatgaacttctacccttttaaaagttgattttttaattgcaattatacatgtatatagcttacaaattcttgcccacggatttgcattgccgttttccacttctcagaagcaactactccttagttcatttagctcttcttctggtatttacttccttgtagcaaattaatatgtttatattggtaattcttgaattttttttttccattttagtcattaaacatgaattccattgaggaagagaggggtttatctttcttttattcttcctcccttaaatacctgcgcttgtactctctaagatagttatatctcagtttgttttcactgtaaatatttttcacagctgagctatgcaggatactgttattttattttctttcttgtatagcacattaaaattttgttgcttggtattctatttatttactatttatttatccccaaattctcaaataaggtcaaacacaatggcacatctcttggttcttgcatgtgtgcatgtgacatttttcttgggctctctgcttgctcaytctgttctggactgtttactcttgaggcctatgcacagctgttgacctggaatttgtccttagcaatcacgttgggaattcttgattgacctgtttattggatgccatctcttttggttttgaccctcttttggggaggcacattgcctggctgctttgtgagaaagcatgtgtagatggaatttttttgagatctggcatgtgtcaaaatatcatttggtcttcccttacatatgattgataatctaatttaaagttggagattactttccctgggagtttagagggtttgttccattttcttctgcttccaattttgttacagaattgttgcatgctcttctgactctatgtactttgtatgtgacttgtttcttttctttttggatgcttttagggtatttaaaaatcccccagtgttctgagcttttcttgtaatccaccttggtatgtcactttttcattcattgtgaagactgttctcttttttggagttcctatttgtcagatgctggaactcttggatttttttctccaatgtaattattgtttaaaaaaaaatccctggctgtgtgtgggcttacacctgtaatcccagcattctcagaggtcaaggtgggaggattgcctgagcccaggagttccagacaagtctgggcaacatagtgagtccttatctcttccaaaaaaaaaaaaaaaaaaattagctgggtgtggtggtatgcgcctgtagtcctagttactcgggaagttgaggtgggaggatcacttgagcccaaggattcgaagctgcagtgagctactattataccactgcactccagcctgggccacagagcaagactgtgtctcaaaaaaaaaaaaatcctgatttttatccttttatctttttgttctactttaggggaacatttacctctattatctattaacctctctgttgatttttttatttctgtgattataatattaatttctaggagctttttcttgttctcacagtatctgtattttatagcatccattctttattgctttgtggatgcaatatgttttaccctcttggggttcttaattatgtatatttgaagtcttctccctgcattgaccctgttccctcctgaagttcctgtctgtcatgctggaccctatttcacrtgcttggtgttcatcttgtcatctttattcatgaggaggcacaaagcaaggctttgtcaattggtggcctcgcataagatgaccacctcttttcagaagtcaccttgtcttccagttttggtatctgtagatctcttttcttgggcaggttagtttctccagaaaagtctccagtaccaatctcctactggccagtgctctgggaacccagcagaggaaggggctgtggagtgcatagttccacttagtccttctctttttcagtcagtccctccacctggtcactgttcctagtgtccccgagtgcagatcttctcaagcttaacctttgctgaggtgggaggaggggcatagcaagcttcatggtttagcaaagatatggagttttactccttaaaatgacttgcaagccatcccccagttttcagtgctgcctccatcctgtcttctcatccaaaccccacttaactgtgtcttaacttacactttcctcaagttctttgccgcatactggtttgttacttcctgacaattctgtctatagacgttkatgttttgtctgcccctgctttgaaaattcactcatcattgggccattttccaaaaatgttttccatgaattttgtcctcttccattctctcttctcatgaacttatctctgcctctcacttactgtcatttaggggtggttttgggagggaatggagataagcaccgggttgtaatctatcacatgtacctgataatccctggtgatcaacttgtgagattcagttcaatttagatacctggttatctggtccattaaggaagagttcatttgatcactctatacttttcagttttattcagagattattactctcactgtcaaaatgaactaagtgatactgttttgttggtttgagaatataatagaaaaaaggtcagttatctctaaagtatacattccaagtctgacctcagacccagttataagcgtaacataatatttccaccattacaaaaaataatgaccttcattgcctggagccataatcacagttgggtcagtttttcttagatttcctattaggttgacttgagttgggtccaagctggaagaaaacattcttttctaagagcccctttatccagtggtcccagttgtgttctatagggaactgagcttccttgaggcatctctgtagattccatgaataatgttggacccttgatgttcttctccattcccatgctcaaatcacccagagtatctcttacaaaatgcagaaagttttatgtgccagaagcttccatcattgaacatgtaaacaccacagcagaatcaaggccgagtattatctttcaacttttctccttaaatttcattagtacttcaattttaggaataacaactgatttattaaaattatgtttaatatattattaatgtgtatcaaagattactgtaaaattatttttgggtcttgttcaaccattgtaaagtcaaagggcaatcaattcaaattttaaaggttttgtatctccagagtttgaatgaatataggggaatctgatctgatttcttttgtttttttggagacagaktgtcactcttgttgcccaggctggagtgcattgtcacaaacatgactcattgcagcatcgccctcctgggctcaagcagtcctcctgcctcagccccccaggtagctgggactacagacacgtggccagataattttttgtggagtcgagttttgccatgtttctcaggcttgtgttggaattcctgggctcaggtggtccacttacctcggcctcccaaagtgctgggattacaggcatgagccaccatgctgggcctgatctaatttctaatctagagtttacaaaaatccttttaaaaaaaacaataatatggtgaaaccccatctctaytaaaaatacaaaaaattagccgggactggtggcggatgcctgtagtcccagctactcgggaggctgaggcaggagaatggcgtgaacccgggaggcggagctggcagtgagccgagatggtgccactgcactccagcctgggcgacagagcaagactccatctcaaaaaaaaaaaaaaaawaataataataataatatttgccttcatatggtagaattaatatttttctgtttcagacgcctcatgttctttgttgataaatcaatagattgagagtatgtagaagttctgagacgaaatctttctatttgcaggttcctgttgtcactatgataaagagtgctggggcatctgttttgtgctaaagctaactagaagtgtygctgctctgagcaacaggcaggaagtacttctgtccttaaaaccaaaaatagatgctctttctcattatcatagctcaaatgatcatcttttttaatgagatgggcacatcccttgtggttttcacagatttaatgamcagattatttaatgcagagcttggggaagaacagctctggtaagaaagatgatggaaattttactggaagcaaaaataacaactttattccttcttttttctttctgctaatgttttcaacctcttattcctttgtttgtttgtttagagatggtcttgctctgtcacccaggctgaagtgcagtggcaccatcatagctcactgtagccttgaactcctgggctcaagcaatcctcctgcctcagcctcccaagtagttgagactacaggcacgtgtcatcacacccgacttgctagcatattgattgactgcttaattgatgagatgaggtcttgctacattgcccaggctggtcttgaactactggcctcaagtgatcctactactttagcttcattgtatcattgtattcattacacactgtaatgctgagattacaggtgtgaaccacctcactgggcctcctgctgtttttttcttttgttgttgttgttaattatttttcatgattcttaaagggattcacttgtcttattttaatatattggtatgtttacacatttctcactatattttaacttccaagagaccattaccayggagaaaaaaaattatttgttaagagagttggaggtgtcaggatttaggtatactgtatgtggtctgacttgctttggacagctctgccaagtattgtgtattagtatgttggcagttggaaggtgaaaaattgcttctttgctgattttagaaagttctgtttgtatttctgaaagtaaggcaagaaacaaagagaatagaagaaatttaagggaaataaggtaatatatgtgaaggtgccttgtaaactgctaaatcacattacagcaagtgttgaacttaaagtgagaaaataagatccacaaagatgctataaagaaaaatgggagaaagagaaaagaacttagataggaagttgttaagaagaaacaaaatgggaaaatcataatggggaatttttacattctaggttttttttactctgaaaattcaggagtagttgttcttgctatatgagcagtgaagtaaaaaatattttttagccgagaagaatgttctgtggaaataattgggaaaaagaatcttatctggggtggtgaaagttggatagaaactactaggcacaagacctagtctaaaaaaaggtctaaataaagatctgtgtgttgtagggggttatgtacttaattaaggtgtaattcacatttgttaccacttaattaaggtgtaattcgtatttgtagatctcttctgagcctttccttttgttctcaatcatacctttgcaaggcagatatccttagcccattttacagatgaggcttggaaggctaattgatttgccaacagtcacttaatgtatgcaatggtaaagtcctccctttcttcaggttctgagtttgttcccacatttctagattgttcacatcagggcaattggttttgttgtgtttctggagattctgcttattgaatttctccaaaggaggtgcttgttaaataacagtggtcacttagaaataacacgctccgggcaggttttttaggcttggctaaatgacttcaaatgagttctgcttaaggaacactatttgaattccctaagaaccaaraaataaacaaaaaaggcatcacaacagcccaagtatgtgttcagaggccgtgccctgtgcccttcagatcttatctggagcttggtattttaagtttcgttctcttacacttcattattttatttgaattccaaaatcatagctgacttgaagaagggaaaggttggtactataacagaaatgagatgcaactctttaggacaaaggagaggagatagccagactgtgaaaggcagacacatattcccaaagcctagccgccatctgcctttgagtagaggaataaacagccctctgttgcctcagaagcttctgagaacagctgtcttgccactggcctttaatgggcaggttaaacccagttaccagcaggatacacacaaagccaacttcacaccctctccctctattcgccatcaatttatctccaactcagatcctgactctagtcggccacagctcttgacttcagacctggctctgtaacttggatttccccttgggctctccagagtgtatttatatctgtgctttccttgttgtgagaacttcagcagtctcttccttttgattctcattgcaccctgtgctttagtagtaactccccatccagctctctttgtggtggtagaaacccagctcctacccagtaactgctgccactccttttccttggagttagtattctcatgttccagcagagcaagtaatttatagtcatgttgatgatcctgtgtcaccaaacaaagattaatcatattctggattctctgaagaaggcattaccttttagaaaaaaaaattaatccactatggttgaaattaaacccattttgatacttaaatgggtaatccttcagctgttttgaaaatcgtgatcattctcaatgtcttattctttgagatttttttwaaaaaattttaattgttttttttgagacagagtctcgctctgtcacccaggctggagtgcagtggcatgatctctgctcactgcaacctctgcctcccgggttcaagcgattctcctgccccagcctcccaagtggaagagattacaggtgcccgccaccacgcctggctaatttttgtatttttagtagagatggggtttcgccatgttggccaggctggtctcgagctcctgacctcaggtaatctgcctgccttggcctcccaaagtgctaggattataggtgtgagccagcgtgcccggcctattcctggagattttaaaaagcagaaattatattgtactataactgcagaatgatgcagagaattataattattgaattatagaatatattattttggaagagcataagcaaccttttagatagcttacatcacctttctattaaaaattgttgctttaagtaaagccatttaaaaattttttgtgtacaaacttatcttttaggtcaacagcaggaaatgcttaagcagagctattacatatcttaaaatagtgaaatgagcattgtagaactagtggctgttggcatgaaatgtttactttggagagaattcttggcatttttgccccacatcagcatagtaagaacttgtaggagaggagggaagcattaatgtatttgttgaggattaatgactttgtagagcatttgtgatagtgaatatattatggctagtaccgtaaatgcagtaattaaaaagctgcacactaaacactttgtagactggcaaatatattcccttcctttccttgatggcttgcattcaagtgaatagcgtatatttatcttgatcttagcgttcttaagagtagaaagaagtctcaaaggttgatttccttcccgagatattgctagtcagatggacacaatcagatttgatgttttcaggatcaagttattttttaacagttcagaaaaatgtcacgtggtacatactaataaaaaaaactattcctcacctttggaagctttattattaaagttatttttagacaaatattaccttgtgctgctgcgtaatataaaatgtgttcaggccaggcatggtggctcacgcctgtagtcccagcactttgggaggccgaggcgggtggatcgcttgaggtcaggagctcaagaccaacctggccaatgtggtaaaaccctgtctctactaaaaattagtcrggtgtggtggtgcatgcctgtaatcccagctacttgcgtgtctgagatacaagaatcacttgaacccaggaggcggagactggagtgagccgagatctcaccaccgcactccagtctgggcgacaggagtgaaactctgtctcaaaaaataaataagtaaaataaaataaaatgtgtccagtaagatcatgatacctcagggcttcttttattataaaagaagtaaaattgtgagtaatagaaatatatattaggactaaaacagacctgcaaccaaggtgaatttttaaaattttcaaggaagcgagacttggttatctcatgactatttatcttactgccccagcaggttaaactgaagtgggttgtgtgaatgagcatctgggaggagaggcaccatgctgtgagagtaatgatgtcctgtccttcacaggggaggatgacaaagaaggcagacagatgtaaagtctgcaatttctgttgctttgtgtcctcaaaatgttcatacccatctattttcccatttaagaggcatcttgtgtttcataatttctgagtcctcccacttaacatgcagtatttacttacaagttcatatttatgagttcataaagattttcttctgtgaaaagtataaatgcagctgaatgtgatttgcagctttgctttgagtcagttagggtaggaaaagaagaaatagactatttctgttctcaccatttaattggcctccttacctcctagttgtgaaagcttttcactaatgtattggtttattgatttatttcacatttattgactgcttactacatcctatgccccgaggatacagagatgagtgttccagttagtaggcatctgatgcctttgaaaccatctctgtcctgactgacttcagtgcagatagcattggttctaaaatcctttcaagttccagaaatggcctggatcttgttcctgttaacrgaatagacaaaccgcagagcagtcttagagtttttgagatcacaaaggctgtctggggaacataaaagctgcttttccaggtgttttccatcrcatcgggtttctaatgaatcttgctcctttggcattactgggatactttccaagtataaagtcactccactccatttctgaattggctaaaaccctagatggaaaagcgttcaggagatcacagtgggatggcataactactgttttaagaggcagctaggaagtctcagtggcaggtgccactgccaacccattctcccttccttcttgcctttactctcaaatgtctgcctctttttcattttcagtagtttatccatggtaggaaggacctttgaattggagcaattcaagaagctttctaagatggtgggtagggccaggcatggtggctcacgcctgtaatcccagcactttgggaggccgaggcgggcagatcacaaggtcaagagatcgagaccatcctggccaacatggtgaaaccccatctctactaaaaatacaaaaaatagctgggcatggtggcatgtgcctgtaatcccagctactcaggagactgaggcagcagaattacttgaaccaggaagtcggaggttgcagtaagctgagatcacgccactgcactccagcctggcaacagagcgagactccatctcaaaaaaaaaaaaaaaaaaaaaaaaaagatggttggtaatagttttgcttaattaaactacacgtacacctttggaaatgttgacacccaaagcctgagatcattttaagaaaagacatcttccagatcttttgcttataatagtattttttgatactctgaagttctactcttaggggtaraacttataaatgctcttttctatcttggtacaaactgccttgtttgtttgtttaccttaaaacagacttagactactttaatttggggggattgcttgccagaaaccaagaatttcaagatccatgtcctcagaccatttacctgtcatctcattctcaacaaagagacgttgccaactattttctagaaacattgatgcaatttggtctattgcctccaaatcccaatactattcattatgaacttactatagccagatttatcttycctgtagcccccacttacccagtttcatttctgtgattgcagtttcccatagtacagtacactaagatagttatgagaaatagagaccacattcacttgctctattttattattgggtatcattgttaatctcttactgtgcctaatttagaaattaaactttatcatcggtacatatgtataggaaaaaacatagtataggtagatagggcttggttctatccatgatttcaggcatccactggggatcctggaatgcatcccccatggacaaaggggagctactgyactttccttctaatatccgaggattgtggactcccctcttcttcgaggtcagtcccttcatctgtactcctgaccctttggcccacctcttttgagatctcaggccatctttacctcttcccccttagactttcagcctctccccctgaactgagtccttcagcctgtagccatgcgctgtgagcacttagtctcttccagcagccacgcattccctytcctgggctcttccacttgctctgtttattctgttatctctgcctccaccacttcactaaaacagctctccatcaaggtggacagtgacttcttaaatgtcaaatccaaaggtatacttttcattttttatctttattcatctctttctatcccgtggtacctctctaccattcttcctgggtcttcttcaaaagatggttttcctctgcacattctgttatgtgtgttctccaggattctgcactgatcctgtaatgttctccttctgtctatgttcctgcagtgacgtcactcactgacacaatctctgctcctttctatgttgtaatcacttttatgcctttatgtttttctcaagctgcttctccaggctttacgctcaagaatatctcagtatctccccctgaatcttccacgcttcaatttctctctcttttttttttttttgagacggagtttcactcttgctgcccaggctggagtatgcaatggcacgatctcagcttactacaacctccgcctcccaggttcaagcgattttcctgcctcagcctcctgagtagctgggattacaggcatgtactaccatgcccagctaattttgtatttttagtagagacggggtttctccctgttggtcaggctggtcccgaactcccgacctcaggtgatccgcctgccttggcctcccaaagtgctgggattacaggcgtgagccactgatgcctcagtttctagtgccccaaactaaattccttgtcttccttatttcttctcctatgttctctaccttggttgtcactaccatccacccatgtgtaataaacctagtgttctgctttgaacttccggatggttccaagtactaattcttctctcctcttctctacctacttctactgccctaatctccaccctttccttctccctgaatgattgtaacaaccgaacaggtctcctgcctctaccctgcccscttcaaatccacccagagaatcatgcatccaaaacccagatctgacccatcagtggctgtttacacccaggataaagtcagagttctttgagacatgtacatggttgccatctggctccaggcttcttttctggcctcactctgcaggcctcactctagagagtggccagcaactctggactataccatgcggtttcttacctttcccttttccatcgccttgtctcgcatccctagcgcggctaactcctacccagccttaggacatgctaggcatccccttttcttggaaggcctccctgacctgtccatttctggactagacgcccatgcttgatatgaatctcaatgattatgctcatcccatggccctagggtggccagtttgtgtgcatcctttgcctcccctagacttcactttccttagagatagagatggtatcttattcatctttgtagctacagtgcttagcatggtgctgggtgtatagtaggtgttctgcatatgttttttamataaaaaatcaactgacagtaaatcgacttgatggccacaaaaatgggcaaaaataatttctgcgtaggagtcacccttagaagggagcatgaaggggacttctgcagtgctgataatgttctggtttttcatctggtgtattttcagtttcggaaaatacattgagctgtccattgtcgtgtgtgcattttctrtatgttatatgtcactgaaaagtttttttttttttccaatcaacatgacatctaacctctccaatacagaaaaaaaaatttcctcatttcaagcttttaaagttttataggatattagttcagatgtcagagcaaacagccaggcagtgctattccttgatgttaaggaagaatagaaaagcatcagggaaacgcaggtgagattgcctggacttttgatgggggtcagagaaggccagccctggtcaagccttccagtgacctgcacctctgtcacacttattgcagggcctgcatgctaatcatcagcaagccctgggsctgcctgcrgtgacagggagacttcatcttgcatgcgactatgaataattcataaacatggttatctggaaatatgtggtcatcattagcattttaatgaaaaaaaaaaaaaaaagctgtcattatcctaagtctctgttttgtttctaccttttttttttctccccccaccacagctaaccatctcagtctttcctgaggacttgggaactgccgaggcctctgccaatgtgttgactgtcgctatgggctcactgttgtccaggcagctcatgtatgtatgggatcagtctctctcttgcttttttctctttaattttcattgtagaatatcacaagagtactgaattggtaaaagctttaaaggtttaaataaggatgtttagaaatacaagagaatggattgctctagggtaagttttaaatattgcatggtaagaaatgttatctaaattaggatttttgtaattaagtggccctataagaccagaagtgtatgtcaacaatctcctttttctgtttctgtgcatccattctttttttccaaatttttcttttcttttttgagacagggtcttgctctgttgcccaggctggggtccagtggcatgaacacagctcactgtagcttcgaacttctggttcaagtgatccttccaccttagcttacggtgcaattgggactacagatgtgccaccgtgcctggctaattttgtttattttttgtagagatggggtcttgctgtgttgcccaggctggtcttgacctcctaggctcaagagatcccacccacctcagcctctcaaagtttctggattacaggcatgagccaccatgcctggtctaatgtatstattcttctacaggcttttatttttttaagctttcctttttcatcacaatatgttaacatttgaaatgataataatgccataaattaaaaacgtttcacagtgattgtttgaattcctttataatcacaaaattcatggacccagaagagaggtcccctgggtatgtctctgtttaatatgtattagggagggagttcctggctcttacttcttagccttctccaaaggaggaaactctttcagttccctcagggatgaccttcgatgtctcacaacactaaagtttttccagcagtcttttgggaactgctatagttgtagccttttcctatttgtcgttmcccctgattaacctgggagaaaaatgattcttccctttaatgatctatgtttatttctatgaagggcagtgtgtctcagacttacttcttgctccctgcagtcttttggccttggagcagctgtatagatatttatttgtttttgttgctttcctttggaacctgtggaattttggctccaagtcaggggaaatttggggtaattccccataagtgcttttgcccccatatcctttctgtaattatgcttattcatattcatctttaagtcctattaccttgtgcagctcagtttttttctttataggaaagttatggctgggctcatgcctgtaatcccagcagtggctcaagtctgtaatcccagcattttggggccaggcgtggtggctcacgcctgtaatcccagcactttgggaggatgaggcgggcggatcacaagatcaggagatggagaccatcctggctaacacagtgaaaccccgtctctactaaaaatacaaaaaattagccaggtgtgggggcgggtgcctgtagtcccagctactcgggaggctgaggcaggaggatggcgtgaacccgggaagcggagcttgcagtgaaccgagatcgcgccactgcactccagcctgggcgacacagcactccagcctgggcgacacagcgagattctgtctcaaaaaaaaaaaaaaaaaaaaaaaatcccagcattttgggaggctgaggtaggcagatcacttgagcccaggagtttaagaccagcttgggcaacatgatgaaaccctgtctctacaaaaaatacaaaaattagccaggtatggtggcatgtgcctgtagtcccagctactcgggaggctgaggtgggaggattgcttgagcccaggaggtacaggttgcagtgagctgagattgcaccactgcattccggcgtgggtgacagagcgagactctgtttcaaaaaaagaaaaaagaaagcaaagttagaaccaccctcaagccctcacccagacaattgtttgtaaagtaagtcagacagttaaaagcagtggcactttatagcagtagggagggatagctgataatagaatagggattcggaccaacaaccagcattaaagccagcagtgttggggtaaacagctcttcacatattttcagatattgttagcatctccaagggtgttacagatttactctgaaattatcaattttcatagtgagcatcatcagaaaaaagtttacacctgtaccctgtataacagggatctgcatactgtagccaataggtcagatccagcccatgcttatttttataggagctgagggtggtttttatatttttaaatggttacattttaaatggttatataagcacctacataatctcttttttgtctcttggccctcaaagcctaaaatatctgtgagcctgttaagaaaaaatttgcccacccctatgtagaagaaagttgaagggcatgtactgccattgatccaagtgaaattgttagtacttgagcatttttgacatacagaaggttaatttcatatggttcaagctaatatattttgagaacatcgttctttcacagtggttaaaatgctaacatttgggctcttggagtggaagaagtaaatttatctgaaaaattcacatatgtggacttgctccttttttcatcttagagaatgacacattggccatcagctgagtgcctttccagagattaccgaagggccctgagctgcagaggtgtgtgctgtccagtaattgcaaggaagctctttattttcatttgacttgtttcttactaaaagctctttaggagaaaactatcttctcctcactgggtgccagaaacgtgctacctgtgctcagcgtagagattgctgccccgaggcctctgctgagcttgtcactttgtgccttttttctggtggagggagagtgagtgactgcttttccgggggcacacatctgcataacacattgcctgaaatgcccttccctggaactagagtgtggttcrtaccctctcatggtttccatctctgatttcttttcccggtgttgatccctcagtccaaggcatgaacactgttacttattttatttgatttgttctccattcctcccttctacgtactcctttgtagcttgcttctcctgatcattaaataagatttggctgggtgctgtaaccccagcacttcgggaggccaaggtgggckgatcaccggaggtcaggaattcgagaccagcctggccaacatggtaaagccccatttctactaaaaaaaaaaatacaaaaattagctgggtgtgtttgagggcgcctgtaatgccagctamgagagaggctgaggcaggagaattgcttgaacctgggaggcggaggttgcagtgagccaggattgtggcattgcactccagcctgggcgacaagagcaaaactcaaaataataaataaataaataaataaataaataaataagatttgcttgttgaaacctcaagctgacgttctgcagaggctactcatagcagaaagaaatgttaaccttagcagcccttgctgccctcamataaggcaggaaagccaatttgacctggggcctgctcaccaggcctgtgtctgaacagggccacaactgttccctggagaagggaaacgatttcagtaaaaaacaacagcaacatgccatagttaataattttatcatcaggtgtggtcggaatcatcagtcaagggtcagcagtgcatactgctgtgctctacattgtttttgaggcttgtatgtcagactggagttttaattttctttctttctgttttgagattattctgcctttccaggctatctcctttcaggacagggtgctgctcttggatggaatgcagaatggcatccattgagcacgaaaataagaagtaaatagctagagctgttcttgccaggcttttcatacagatatttgtgtttatgttaaaactccagttttaaaatgagtcatgtgccacataacaatgtttcaatctatgatggactgcatgtacaacagtagtcccataagattataagaccctatttctcctgtaccttttctatgtttagatatgtttaggtgcccaaatacttatcattgtatcacatttgcctgcggtattcagtacagtaacacgctgtacaggtttgtagcctgggaacactaggctctgccatctagcctaggtgtgtagtaggctgtgccatctagcctcggtgtgtagtaggctgtaccatctaggtttgtgtaagaacactccatggtgatgtttgcacagcaatgaaatcgcccaacgatgcatttctcagaatgtatttctgttgttcagcaacacatgactatattccaggaattgctaataaaaattgcatatttgttcatttttgtctgtacctatccattcctttggatgactgcrgccaccactgcaactgcagctgtgaggatctggactgttacaatagcttccagaccttggcctgcagtctctttgcctgcaaacttaactcatgcatagtagccaaatgaatctaactgaggcatggctctgaccatgccgcttccctgctgaaaatgtttagtgtgtccccactagtttaaaaggtcaccctggtatttgagtcctttaggtttcctttcactgctccttatttttattacccattactcatgatgaatgatcgttattgttgttagtattattgctattcagtagacatttatagtagtctgtgtgggctgctcctgccagggtacaccctgtgcctttgggtcacgtgcctttgctcctgctgtttcccctctggtatgtggatccatcttttggtaacccgctaaaatcctgcttttgccatggggtgcagcagagtcgttctctttcccagggagttttcctggtttccctgctggaagcacgtgttcctgcagctcttaaatctccctcttgatgcttgcttgtgtcctaaattccttttatattttggcacatgtatataatttgtctgaactccagtactatttccctcctctcctctgtgagtgaggacactattatatctacggtagttgctccagtatttgtggagtcatcttgggctaaggggtggaactggataataaccatcctcagagcctgtgccagccacgactgagggggagggagtaattggagcctgacgctgaataaatgcttaataatatatatcgaatggatgaatgaatgaagtacttgcttagaaacttagctcagcattgataaggggagaaattctttgcatattacaagtttttgcaaatcctgttttccaacacacatggttctctttagctttagttgtattcatggtaactttttcctgaacaaccgctatttacttttctatttctagctcttgggcacaggttttgccagttgtgtcgactgtctcttttggtaaattgtttcttgtttggtgttaagctttcactgtaagtctcttcagtagaggttgttttatgtgggagtcctgtacaactaggattgtgcaaatcccccactttctcattttcctcagttagtgccccatgggtgtcctggcttctggaccagtgttattgttattattattattttwtttttttttgagacggagttttgctgtttgttacataggctggagtggagtggcacgatcttgactcactgcaacctctgcctcccggtgcggagaccagcttggtcggggagactctaacccagcggcactagaggaattaaagacacacacacagaaatatagaggtgtgaagtgggaaatcaggggtctcacagccttcagagctgagagccccgaacagagatttacccacatacttattaacagcaaaccagtcattagcattgtttctataaataataaattaactaaaagtatcacttaagggaaatgaagggatgggccaaattaaagaaataggttgggctagttaactgcagcaggaacatgcccttaaggcataaattgctcatgctattgtttgtggcttaagaacgcctttaagcggttttcckccctgggcgggccaggtgttccttgccctcattcgcgtaaacccacaaccttccagcttgggcgttagggccattgtgaacatgtcacagtgctgccgatattttgtttatggccagtcttggggccagtttatggccagattttggggggcttgcccccaacatcctgggttcaagcaattctcctgtctcagccacctgagtagttgggattacaggcgcctgccaccatgcctggctaatttttgtatttttagtagagatgggttttcaccatgttggccaggctggtctcaaactcctgacctcaggtgatccgcctgcctcggcctcccaaagtgctgggattataggygtgagccacctcgcccagcctaatgttattgttttcttggcttggggacctgatgcttcatgggtgttctgtatttggatgccatacctctaggtgggagccgtttaaattttgatttcttgttggtgagatatgaccctttgttctccagggttcatcaggatctyagcccctacacactaagcctgtctcatgttctgatagccttttacatcttcagagctttaactttctctcatctgactttaagttctatctttggttctggcccagggatttatttcttgtgattttgatttttttcttagtattttcttagttgttaatgatctctccctcagtttttccacgtgtttgaaacaggcagagcccttccctgtcacctcagctcaccatgttgattggaaactttattaccaccatcctattaaagaattttaagatatttttgtcaccaaattgcaatccctgatttctgcagaactttagatgttaagtattaattcagtgaatgggtgctctgcacatccctctactgagatgccatgaacctgagtaaccacatttttgtagtgtagcatagtcttatccgtgrctacctccttacttgtagataactttctgtgcatgtctcagagtccgtcagttagattctagatttttacatggcatgtgaacccaacctgtaaaattggtgatctgaggcctgttgaccgccattattttcagatactcataaatacagaccttgttttcacatacctagtacataatcttacatcttgatgttgagactagtaaagaaaggttacttctatgtatttatctttcactgaagaaagaaatgaaatttcaatagtccaaattaagtcccttctttgtaacttgctcttgctttttttttttttaaacctctcttgtaattcgctacttccagggtagagatttgcagtcttattttgttgtaataaaagagtgtcctttttgtttggatgctctggatctatcactttcccttttccagcaaatagagtgggactaagaagccctgtgacaagtcttcaccaggaggaatcggatgccctggaaagaagcctacctggtgtctgcttttgttgcagaatgagactctggaaacatgccagaatastctttggagggactttagtcctttttcccttccctatactccacatgaagaggattaggatgctgggggtaggtcagaaagggtcccatgtgtgtgagaggacaggctttgcccctgaraaagatgagaagaatgtgttgtcctcagggcaggaggcacagcacctctgctaaaggaagagcggggaggaaatgccccagccagacttgggaagcttaagacctatcttctgcgagcagcctccagaagggaaaggagaaacacatgcaactttttatggggcctcattttgaaaccaaagcaaaaggacttatttttccaggttcttggacacttgctcatttatgcaaacctgaaattgtcctcaggagaagtgaactctgctgaccttcctttgcacaaaaggccacaaaaatccgtgcaagatgaaaccaatagaattctaaacgaatgacttggcatatttatttcagagtcataagataggtcagtttgttgtttgcctctgtagcttctagacctttctgttatgaatatatactaaggaaaagaaaacagcaacatatactattgaacattgtatttatttttgtttttgagacggagtcttactcttgttgcccaggctggagtgcaatagyrctatctcggctcactgtaacctctgcctcccgaattcaagtgattctcctgcctcagcctcctgagtagctgggattacaggtgcccaccaccacacccagctaatttttgtatttttagtagagagggggtttcaccattttggccaggctggtcttgaactcctgacctgaggtgatctgcccgcctcagcctcccaaagtgctgggattacaggcttgagacaccgtgccctgcctgaatattttatagatgatgctttgttaaaggaatatctagactttttagtctgtcttttttgattttatggaaaatacttaagtccatgggattccatttgttttctcccctgaattcctccctaggagtgtccaatttttgggaaagttgatccccctctcccagagtacaagaaaattccacaaagagcttatgttacatattagttatttggaactcaataccaataaatccaacatgacttggctaactctggaaatcaggcatacctgctgccatcctatccttgtgtcttgggcttagttaggggtaaagaggattcctgttgtttttgaacaagagatagtagctttttgttttgaaatcactgatcctcacaccgcaggatccagtttaagcaagtaagcggggtgcagtttataaagacgcttcccttttttgagggaaaaggtacagttaagaggagatagggtgaccagtgccaattaataggtagagactgtgtttgctatactccgaatactgtgttgacttctctggggtattgagaagagttacatattgccctcaattcttatatctcatctgtggatgtgaccaaaggtggtaactgtgtcatttagaatcagtttatgtgatgaagcagtttagaggaggggaaggctggtaaagatgtgtgcagtcagtaaagcccaggagaacacaatttccagatcatcttcctccaacaggacacaatggtctggggaggaatgcaattcagatcaagttgttggcagatcaggcatgggaatgcaggtctcctgggtgggatttgaaggacacattaaatggtacattacggagggatctgatgaactgggatcaaatgagaagggcctaggggagtgcatatgccaataagaacaaagagtatattcttaataagaagttacatttattttacttattttattttttatatttatttatttatttatttttttgagatggagtttcgctcttgttgcccaggctggagtgcagtgccgcgatctcggctcactgcaacttccgcttcccaggttcaagtgcttctcctgcctcagcctcccacaggcacctgccaccatgcctggctaattttttgtatttttagtagagacagggtttcaccacrttggccaggctggtcttgaactcctgacctcaggtgatccacccaccttggcctcccaaagtgctgggattgcaggggtgagccactgcgcccagccagaagttacatttattacyattaagttattagccacttacatagacactgttctgagcacttaatgtgtatacttttattcttcactacaactctgttacatagatgcaactattatcactcaatgacaggaaactgaggcacacaggagctatagaagcaacttacttaagcctacacagacaatggtggagctgagatttgaacccaggcctttcagctccagagtctgtgcttttaaccacgctgtgtgcctgcttcagtagatgagagaggagtcagaggggtgtgacaaccaagaaaagttgttggggagagaggaagttccaaggtcaggattgcagtggagcgggtcctagagatgtagtgttcatttggtggccacacgaaagagtgggtggtatagagggcagtgacaagtcaaccttatcaggcaagtcctggaaccaggatggcgaaaataacagtccagagcccttactccgcgctgggcactgggaatagagcagtgaaaaggtagatgaggtctccgctcccatagcacttctatttgttctagtgatggagacaggtgataggaaagccttccagtagaggagataattgtggatcatggtacctgctatggaggaatgaagagtgtgatggagggatactggtcacggcccacatgatgttgggtgaccagggaaggtgtccctgaagaagcagtgcttgagctgcaatctgaagcatggggaaagcccagtctatgaagagctgggaaaagcccattacagaccaaggggtatggactgtttaaggaatggcaaggagccagggtggccagagcatagcaagtgtggtgggacctggtgggagatgaggttggagaaggcggcctggtcaaatcagagtggagggccttggtaaggagtttcagctgtttcctaagagtagtggggagccactgaaggttcagtaggtgcagggcatctagggtgctaaatggatgtgcctgtttgatcgggaggggcagggaggtggcgagagcagcatgcagacagcacatttaggaggcttctcccccgtatggtagcttaaaggtttccatggcttttctgcctggggaatagcgagctgcacctcaaagcttctcagtggtcaagttgtgatcagagttcacagcaacaagacttcacacccaccttttagccattgactgcccatttatactttatatagagagaaraaccaaggtatatgaacttaaaagattaagcaatttttatttgtttgttgttataggtatgggaatttttaaaacagttactttataggtagtggatgcttttgatattggcagcagaaaacccttcattggatgattttctccttcccaagatggagactcaaaatggagacacaattaattgcccactcactgcccatatcctgttccattgttgctcatagggctatagtttaattcagggtggtgtggagatcagcctcgacagtaaattgtgatgattaagccaatataccagtcctgaaccctgattttccagcattccttgtagcaagtgtggccctgtgacctacttctggccagtgagacctgagaataagtccactgggatgggagtgaggttgctgggaaagcatttattgtctctataaagcctgacaactgagcttgtcagtaycctcccttgctttcccattctttctgccttgaatgctgataagatgcctggatgtacagcagccttcatgtcaccatgaggtgacaagcatgaaggaaagtccaagagcctcagagatacctgccctgaggttgttttcaagccaacacctgcagccctgggccttccaactcctttctttttgttgaatccactgttaggtaggttttctgttacttaaagctgaatggactgttaaattaagcagatatgaagacgcagatgttatgagccttttcctcattattgtgacagccttatacatgtccttgatattcagtatgacctttatcttgtgtgaaaacagtctttgaaaagaaagctctaacttatattaaaagttgttcacagttcaaagtgatgagttgtggagttgtggacttggaaatgtaattttcaaaataaatgaactcctctgtgtgaacttgctgtagcaagtaccgtggagatatacttcatgggcagtatcttccttatggccttttttatgatactcttagttttctggtgaactatattgtgtgtatttatggctttataggaaactatagcagtactggggtaatagcataaatagtctgatttcttgaaaatgttaagctccaacaggctttattggatttcagggtaatggtattattaaattttttgccacttttcaaacttcttgtggctgagttccaagctgctgcttttaagaaatttgggggctggttctgttcatttatagaaaaaagttatcctggaattttctattgctaaattgaggggtagggagaaataatttaactttttttttttttaactgccttggatttgggtataacactcaggattactttccacatggaaggtagaaatggctttgcaatatgtatcatggagataatataaggtatgaaatgaaaattrtcktctctagtttattgggaaaaaaactagaagtcatagggtcatcaaattgtaaagagaaaagaattttgcacatcatatagtaaaatttcacttttttccctagccttggaaacttgagacctggaatgctttcagttattcatttaaaaaataaaaatatgtgcagttaccctatgtatcctcttctttaatgaaaaatttttccagctgggcacggtggcctacgcctgtaatcccagcactttggaaggccaaggcgggtggatcagttgaggtcaggagtttgagaccagcctggccaacatggtgaaaccccgtcactaccaaaaatataaaaaattggcccagtgcagtggctggtgcctgtaatcccagctactcaggaggctgaggcagaagaatcgcttgaacccaggaggcagaggttgcaagccgagatcacgccactgcactccagctgggtgacagagtgagactgtctcaaaaaaaaaaaaaagaagaaagaaagaaagaaaaattgtcccaaaggaacgagaaacactgtataaccccaagaaccttgacaagaaggctttttaagtcacttgtttcaactacstcattttaccgagaggaagggttactgctttaaggtagaccagccaattagcccttgggcaggtaggaacaggaccacagaaactgttaggtgtgttaacatcctcagtgctgttgctggaattcacgatggcagtatcttatgtgggatcagtgcttgatcttgtctacgagagctgtgagggtttgacagacactgatatgacacggcatcccaggcagaacaaatggaagaggcttgtgagtgggagatgttcagtaacttcagtatagagtgaggcactggtgtggtgccctgcttgggatcaggtaggagaagaacggcttatgtccatgcagattagggacaagttggggttagtttgacccatttgggacagaatatagagggtcataagagcctatcagtgaagtgagattttgttttggtatgtatgtatgtatgtatgtatgtatgtatgtatttttgtacagacaaggtcttgctatgttgcccaggctgatctccaactcctgtcctccagtgatcctccttcctcagcctctaaacgtgctgggattacaggcatgacctaccatgcctggcccaagtgagattttatttggtaaccagtgaaaagctttaagaatattcatgttkgtgacagttaacacttacacagcaattactgtgtgccatcaccattctgagtgctttacacacactctcctatttaattcccacaacagacatttggtatagatattctcattatctccattttacagtggaggaaacggaggttagctgacttacctaaagagacactcaaaggaagcagtggagatggaattcaaaccggggtggcccagctccagggtcctggctgttgatagcttggagcgtgtatatgtggtggtgataaaggtggtagatgctcttaggaaggcagctctgcgggagagtacagttggattggcatgagggcagacaggtaatgagaatatcgactgtaggccttcgggacggttaataagagcctggcctagaggcgaccgtggaaatgaaaggatgagaattcacatgttactagcttcagaggatggattagtgccaggtttctgactggtcatggggcaaggaagggatggagtcagaaatgtctgggatattgcttgaatgtccacctaacccagttagggaagttgagagaagatttggtgggagagtgatgatttatttttacagagccctgttttcctactttgtgaccaactagtgcagtggttcttaacctgggactctggggaaaactgtctagaaaagagatccatgtaagtgtgtcctaacagatttctgtgagtttttggagtctgccaagctcacatgttgttttagcatggccttgggcccacagaaggtctccagtgttttgaggcagtttgtggctgaggcacttagaattctatggtggcttgtccccttcccagcttaagaatctgtgggtgtgagctcaggaggaggggatgggtgtgtgtctgcattttagagacccgcctttgttttagcttccctggccctgattcctgacttccgctttccttcctgcccttaagttctgttgaggaaagcaggagactgtagctggagatagaggaggtccttggtgtttctttgtgaacttgcatcctgtgtcgagggaaacaccctgttcctggtggtggcctccgggctcaactcttcctgctgccgcctttctgagaaatgtgaccctggccaggtatgtcttcttggaggcttctaaatgcaggtcccagctgaagggctgagaaggaacagcaggttgttccaggataagtagctgatacctttgtggaaaaaaatcctgacgtggatgagagaacgtagagcttgacaatttggacttctgtttcatgaccatttctccctttctctttccttcctcttctccttccattccttctccctccctcttccttatttcttattagaagagttgctaattgtgcatggttagtaactgtgactgtacctatttttatcttcgactatggttttcaggcttgattttccagggaaaggtaacattggcaacttgcaggtgacgtgtggaatttgtaggaatggctacataggaaagatgaagggaactagaagtcttggctacccctgtcctccaaccccttaaaaccctctggaaaaacaatatgcatgtgtgaatttgaatcctacttcagtcaccagcagaatgtccatgcgtgtgccagttccctaatctctcatctgtaaaatggggatggtgatatttacttctttcccaaagggtgttgtgacacacaaatgaggcagcatatgtgaaggaattctaagcatctctcttatctccttgttcctgtctaattaaaagtttctgtattgtaccttggaatgatcccagaaatactaggagggagggagaatctaagtgctatattaaattgctttttgtatgtttattccatttctacatagtaaccatgtgaggtaaatatttttatttttatttttatttttttttattgatcattcttgggtgtttctcgcagagggggatttggcagggtcatargacaatagtggagggaaggtcagcagataaacaagtgaacacaggtctctggttttcctaggcagaggaccctgyggccttccgcagtgtttgtgtccctgggtacttgagattagggagtggtgatgactcttaacgagcatgctgccttcaagcatctgtttaacaaagcacatcttgcaccacccttaatccatttaaccctgagtggacacagcacatgtttcagagagcaccgggttgggggtaaggcatcccaaggcagaagaatttttcttagtacagaacaaaatggagtctcccatgtctacttctctctacacagacacagcaacaatctgatttctgtatcttttccccacatttcccccttttctattagacaaaaccgccatcgtcatcatggcccgttctcaatgagctgttgggtacacctcccagacggggtggtggccgggcagaggggctcctcacttaccagaaggggcggttgggcagaggcgccccccacctccctcccggacggggcggctggccgggcgggggctggcccccacctccctcccggacggggcggctggccgggcgggggctgccccccacctccctcgcggaggggttggctggccgggcggggctgtcccccatctccttcccggaggggagggctggctgggcgggggctgaccccccacctcccggacggggcggctgccggtcggagacgctcctcacttctccgacggggcggctgccgggcagaggggctcctcacttctccgacggggcggccgggcagagacgctcctcacctcccagacggggtcgcggctgggcagaggcgctcctcacatcccagacggggcggcggggcagaggcgctccccacatctcagacgatgggcggccgggcagaggggctcctcacatcycagacgatgggcggccaggcagagacgctcctcacttcccagacggggtggcggccgggcagaggctgcaatctcggcactttgggaggccaaggcaggctgctgggaggtggatgttgtagctagccragatcacgccactgcactccagcctgggtaacattgagcactgagtgaacgagactccgtctgcaatcccggcaccgaggctggtagatcactcacggttaggagctggagaccagcccggccaacacagcgaaaccctgtctccaccaaaaaaatacgaaaactagtccggcgtggcagcgcgcgcctgcaatcgcaggcactctgcaggctgaggcaggagaatcaggcagggaggttgcagtgagccgagttggcagcagtacagtccagcttccgctcggcatcagagggagaccgtggaaggagagggagagggagaccgtaggggagacgggagggagagggagggggagggggagggatagggagagggagaatatttttattttttgagaggagagaactgaggttcagagaggtttaaaacaaaatagcttcaccacctgctacatatgtggcagttatttactatcttgctgcctgttatgacatctataaaatgaggataataatagttttctctccatggagtggttataaggattgaagtggttaatatatatgaagtcttaacacataatgcctggtaaatagtgtgattgatatattagcagttacggggtgagtgtctcttatacaagatgtttgcgaccagaagtattttggatttcatatttttgtttttggattttgcagtgtttgcattatacttagcagttgaacatcccaaacccaaaactccaaaatctgaaatgctccaaaatttaaacttttggagcactgacatgattctcaaaggaaatgctcattggagccttttggatttcagatttttggatttgggatgctcaactggtgttatcattaagaaaactgccaaatgtcttctaggccactgtttggtgaaatctggattggctcatatgtataatatgttgaaatgggatttcaytataattttctaaactaagagtggatttggtttttgtgcagaaggattgaggaagtgatgttagacatatcacaaaaacttaaaagagatttagagaatgtggggaaaagaggagagatccagggataattaggaggcaggtccaaaggtaagctctgtgttgctgctgagatgtggttgaagagaaaccatgagttggttccttggttatgatacttaaccttctcttggaaccatcagatcrgagatagataaactcagcaaatgaggtctttggagtcgccatgttaccagcttcatcccactttctacttcctggaagagacagtggagtagaatgttaaactaaggattctgggatcgttagaccaggattggagcctgggctctgctgcttttcaacgtcccaatgttatgcaagtttgttaaccttgctacagcttggtgtccttctgtgtgaaacaaggagcatcatggtgccagcattctaggatttatgtgagaaatgaaagggatcatgaacactctttgtatttagcccaaaggaagccctcaacaaatgttagatacttaatattacctggagccctatccctgtgggctttggttaggccccataggcargccacaagtggcaatatttgggggcagtaccctttctgtataaatcctgactataacaataaaagacttgtacctcctgtccctgtttcagttaacaatctctggcatagaatctttgagtttcctttgagatacttttatctgcctctcttttctctcaaaaagcaccttagaccttataggagaacagaaatggagtatcgagtaccttacagttggagtagaacagaaattttttcatcttctactgagttcaaaatacctcattccccttactccagtttttaatttgctgcacagtaggacctttatatctagcaatggagctacttaaacaaaattacattataaaccaacaattttgcaattctgttctgtgctatacagagattttcctctttatctcaactgttctcactaccaaggcaggctaggggaatgaatgatgagtttttctaagaaaaattaacaggtgacaaaattgaaccaggttcmtcagartcacagatcaagaacacaaatcccatgtgtcctgactccccactccagtgctctttcagaaaggccgtgttacccctcagccttccttcccacccctgtgaatagagcctgccagggtgttgcatgctgcctgggaggcagctgcccttgggacggcttcccttgctgatgtagaccttaccaaatgacctgtgtcagcctcatggggaaccgtgagatcctttaaaaaaaatcatgcattcttcttcagaggaaaaaaatcttccttggcccatttagcaagatccttgctccttagtttcctttaattatcttgatttttttttttaaactggagaagaccatctgctttatgaggcagttcatctcttatgttttctctaataggtctttgaaggcccagttaagcatattaaggcttcatctcattcttgtttgggatcattttgtttggtgattttaagtcactgccactggcatctcttggttgtatatttgagataccttgcagtgtagattttacgaagagatgttatctttgttccatgaattgcaggctctgtgagccattttccatatagtgccaaactatcacaacaggattctttgctttttaaattccttcstctcactacaagaagtcctattaacatgttttctgagctatagagtaaaatctgtcaaatatagcatggaaagcagatgggtggttgctgtcatccttttcacaaactctaaacctagtctttcttagtaaaactcagctttgtcaccttcttttaccccagagttttcatttacgaatagaagacgtatgtgagggagagggcacttctttattgtttttttaaagatatatggtatcyatatacccagcttcatatacaaacctttttttaaaaattaaaaatctttgtctctgaatataaaaatgtttcatgctcattattwaaaaaaacttagaaaaatagcaacttayaaaacatcagaaggccattttctaaatcctgtcacccggagattaccactatgaacattttgatgaactcttctattcattcctttagcagtgatttcttgaacatctgctatgtgccaggcactaggaatatgctaatgaatgaaacggacatagtctctgtcctcatacagggagcgagagaaagacattaaataaattatagaaattatataaataagacattttataaaagtacagaacattaacaaagttagatcccatacaaactttttaagaaagaaatagagtaaaatccctactgacaatgaaaacataccagaagacacgctcaattagaaatgattaagactgccaggcacggtggctcacacctgtaatcccagcactttgggaggctgaggcgggtggatcacgaggtcaggagattgaggctatcctggctaacgcggtgaaaccccgtctctactaaaaatacaaaaattagctgggcttggtggtgggtgcctgtagtcccagctacttggtaggctgagtcaggagaatggcgtgaacatgggaggcggagcttgcagtgagccgagatcacgccactgcactccagcctgggcaacagagcgagactccatctcaaaaaaacaaaacaaaacaaaaaaatgattaaaatcataatattctatttcaaaataattaaaagagattattacaaaattatacaggagatgaaagagcagcgtaagtctgaattagcaaaactcagagacaaggagacagaactcaagaaagaattagaaattaaaaaaaatcatcttagaaataaattcaaaattggaaggagcacaaaatcaactaaatactacaaatactgacctaagagaaatagaaggtgaaaaggaggaaaaagttaaaaatccaaaggaaatgaagaaagaagtaaaatttgggaaaagttgacaaataatgaagatagacaaagcagatccaacatacaggtaataggagaggagaaaaataaagcaaagaggtggtgcaaatgatacattttaagacaagttttctggaaaaaaattgaaactactttttgaaagaaaaaatcatgtattttagaatatcaccttagaacaacccataccaagatattctaataaaactattgggttaaaaagaagaaagaaaaagaaaaagtcctttgggcatctagacaaaaaagggaaaaacagtaatagagaattagattgttcttagactttttgacggaaactcttacgctgaaagaaaagtcatacctaaggtattcaaaggaaacaaaatgtgagccagtatttttatatctagcaaaattgaccttcagacataaagaacacaaacttatgaacatgcaaaaaaatcagtggaggaaatattgctcctcatgagctcctcctaaggaaccttctacagagtgagcttcaaacaacaaaaataactggaaagatgtaagatgagcttgggacatctcaagataataaataggtaacaaggaagctatcaaagattattagggcatgtcagaatgacttaggagccaacttgaagaggctcctactggccaaaaataaaattgcaaatatgtttaaatccatgagattatgatattaaaaaaaaattattggttctgcagtatgaagaaaaggttaatggagcaccatttcatcatcttgaaagtagttaggaaagaatcagcttctttcttacatgaactgtaccactggaaaaccaagtggtagatgaaggaaagcatctcctaaaatttttccacccagtagatgaaaatgaaattaaataattggaatgtcactgttttccaacccctgtggatttagtggatttaggcattgaataacaatggctgctaacattagaaatgaatgaaaaccagataccatgtgcttcctgatgaaagatcataccaccacagactgaatttcaatctgttcaagcctctgaatctagctccaatttgcaggcaattcagaggttggagaaacgagttaaacatgcaccaccaaaattcatactgtggaaactccataactcagacagcccagactctttcaacaaataagttgtaaggaaaagaaaaggatagaggcgatgtagattaaataacttaaaagacatcaaaattttaaaaatagacaacactaatggtgactaggattatacactcgggtaacagaatcataaagaaatgccaggaactgattaccataaattcaagagtttgtttactttggaggaagggaagggcatggagggccttctagggtaacaagcaaaagctgtgttttgattaagatggtagttatgggtgttttctttgtagtaagctatttgttttgtgtggttttcttcatctgtgttttattttaccataaaaagattttaaaatatttttatgaaagaatgacactatrcatactgcctttctcccaacttttattatgagaagtttcaaacagaaaaattgaaagcattgtgtaggcaatacctatatactcatcatactgttttacagttagtttttttcatttagtgttatttagtaaatatctttctgtgcaattaaatatagaagcagcctcacttttaagtgatgcatagtattccattgtaggatgtgatcctttatttaatcagtttcctaatgatggacatttaacttgtttttgatttttttctaatagaaataatrctgcttatttgtccttatgataaatacctaaaatttgctttgtcacagcatattctaatatgcaaagtataaatgctgatgtgctgtgaatgaacagttagcagtagagactaaagatgcagcctgtattaatcaagacagccctgtgtaacctagggagaacataaacctcaaagaaaaaaataaaaaatagattccccccgcaggatcctcacatagcattatacctttcttggatcagtttaggtttcatcccacagctcttctacaatctcatttggttgttgtggstataactagtgtatcaattgtgtattgccacaattaatgctgcataatgaagcaccccaaaattcagtggcttaaacaatagccattagtatttttgggatggctgagtggttcttctcatagtctctgctgagctcactcatgtggctacagtcagctgcaggggtagtagacagatctgctgatctttgcagtgttctttcatgtgtttgatggttggctggcttagggtggtcaaaaatggcctgaccaagaagattcagccatcctacccaagtctcccaacacccttccaacaggcctaggcatattcttatggcagtagcacagatcctgtctttttcaggggagcagaaatgggtccatacattctgagcttctgtgtcatcccatttgctaacatccagttggccaaaacaacacagttgagaccagagccaggggaaagggattgcaaggttacggagtagagggcaaggatgcagagacgctgttgattggggtcattaacttagtcctctatagttgtccaatagcatattttaaattggcacatcttagaagcattaaacattgcagttatttctaaattgyagatgttaatgcctttggaatatgaaarttggggatcaggccgggcacggtggctcacgcctgtaatcctagcactttgggaggctgaggcaggcagatcatgagatcaggagatgaagaccatcctggccaacatagtgaaaccccatctctactaaaaatacaaaatttagccaggtgtggtggtgcgcacctgtagtcccagctactcaggaggctgaggcaggagaatcggttgaatgcaggaggcggaggctgcagttagctgagatcacgccactgcactccagcctgggtgacagagtgagactgcctcaaaaaaataaaaaaaaagaaagttggagatcaggtatatttgtgggggaagcataaagcttttgcttcattgaaaaaatttctgattaagtgttataaagataactcttaaatggaaaaatctacatttaatgttatatcttgaaaatatttcttttccagttgttggtgttttcccctgggatacatttcagaaaataggctttttttctgtctgtgcatatttttctttgtttgatagtgttcttggaactggttttgaaatctcacttggagaacacagaatggagtaagataaagagctaggatcataaatcaatgtccttaagtatttttgcgaaagataaagaaattggtgataggattagttcttggacctttattgccacaacttttttctctctgttttagactatataagtggtaaattaaggatctctcaatgctgtgatttttaacagcaggtatgcagtgaccagctatgtgaatggcaaaaaaattattaccagtaacggttaatgttccaaaaatgtaagaaattcaagtttattcccatagagtacaatgttatatgccaattcagtgtgtacacttctgtgcagaaataaaaatattggaatgaaattttgcattccatatacttattaaatactcttcattatgcatgcattacaagactatacacattttacttgtttaactgaaactgtgtgtattgtactaagcaggcaatttaaaggattttttttwaaatagttgactgttattgaattttgctttattttctgactttaaaacccacccccagagtgagttaaaatttcacacatgtagccgggcatggtggatcacacctgtaatcccagcactttgggaggccaaggtgggggaatcacaagatcaggagatcgagaccatcctggctaacacggtgaaaccctgtctctactaaaaatacaaaaaatcagccgggtgtggtggtgggcgcttgtagtcccagctgctcgagaggctgaggcaggagaatggcgtgaactcgggaggcggagcttgcagtgagccgagattgcracactgcactccagcctgggcgacagagcgagactccatctcaaaaaaaaataaaaaaataaaaaatttgcagatgttctcaagtgtgctttattttgcttttctcagctgcaagcaacaagaggactcaggttttgcctaccagcagttgagaggccccttttttttagttgccatgtatatgaggatgttggacacaaacttcaaaagaaccctagtaatgtggtgagaattgtcttgtggcattaattaatttaggctatttgagtcaacttggagagaagagttccaaaaaacatggtgtaatgattttgagcctcttttttagaggtgaacagctggtaccagctccatcacttgcctctggtgggatctttggcatgttacctaaccctctgtgcttcagtttcttaatctgtaaaactgacataataaccatatctttttcayagggttgctggaggtgatcagttagataatccttacaaagtacctacttagcacaatgcctggcacataataagcattcaataaatgttatatagcgttagtgctggaaggacccgagtcatctgatagaagtacttcgctttatagatctggaaataaggcttagttctccgggggaaaatgtttaaaaccttaaagtaagagggaatcggtatgtttttgtagatagatctaagcctggaatgcaatgtctactttaaaagtattcatcactaaaataatcctgtagattttcgagagcaagcatctgccgacagtttttttgacagcccttcctctgcttggcaggttacaatgatgatttcactaatgtcagaaagacaattttctatataattatagtttttagctccattcttggactcagcctactatttgtgaacgttttcacaagaaatcaggatggggcagaaaaagaatacagaagatgtgaactacaaaaatttattgggcacttacttatgccaggtatacaaagatctccaggacattgctttttggtccagaaagcttacagcctagttgaggaaacaagtatgggtgagaaaaaaataacaacagcaataatagcagtgagtattttttttttttttttgagacaaggtctcacaccttgtttcacaactcactgcagcactgaactcctgggctcaaccaatcctcttgcttcagcctctcaagtaactaggactacaggcatgtgccaccatgcccagttaatttttaaattttttgtggagatgagggtctcactatgttgcccaggctggtcttgaattcttggcctcaagcaatccgcctgcctaggcctttgaaagtgccgggatttacaagtgtggaccactgcatctggccttaattagcacttattgaatgcttaagatgtgctagacactaagcaaaacaagcagcctatgataccccattctgttgtcatagtaactgtcagatcgatggttaccacaatttacagtccaacaagacagttgaataggcttccagacattaagtattggttcaggatcatacaggatttaagtgtcaaataagttaaaaggaagagataactctgggccaaggtcataattttcaaagttggggtttgggggtggctagaactcccactaggtgagtgtggaaggggtccactacttgaatttttcaggtggagaccagggatgataaatgtcttgcagtccttaggactaccctgtacaacaaagattgtcttattctgcaaagcttttaaataccctagcaaatattcatgtagttaaataacatttttatataattatctgaccctggaaattctaaacatggttttaatatatactatgtattccagaaatgaaagctccttctcatttaaaaacaagtgtatttaacattttttggaatattccaaagagttgttcagcattttgcaattgatgttattggcagcagtgcaaatcatgtctgagttgtcaatacaacacatacctctttcagtctgcatttatagctattgcactaacaatggttctacacayaggtgagcatctgatacctgtttattacgactgctggaatagtcatacctgagaatttgcttattgaaatgtttccctcctttttttcccccttttctggaatttatgtgttcagataggttatattatctgtgaatatcactttakgataataaaggggttattataagctatttgttatagaaagggagtattgggttttatagcattgcattgagtttctagggaagtagctatttgaaggtaaagaggataaatgagagattctagaatcagttgggtcttagattgtcagtggttgaaagaacttaattctggagattttagataaggtggtgattgtgaccagagcagtgtttatctggcattgtagatctgcgatagatccgggacartgtatggggaggaattagactggctgtcaggggaggagttatgggactgtgcaggactgttttaaaaatgggttggacaaagagctaggcacattgagaaggaggaattggtcagacttgtttggcagtatttggggaacataggtaaaatgtaattgtttgtctgatttttatttaaatctttcattcctctttagaattatttaaaggtacatagcatcttttactgaatcaaatgacaagagggcattttatttatttatctatttatttatttatttatttatctgtttgcttaatggtgcttttgtgatttggggttgcaagctctctctgtggtcctgttggatatttattgatccctagtagcattatcataaggcatatcagcattaagaattttcattaacgggacatgtggaaacactgctagaaggaaactattgttgctagactgtttcacctaggtagctttatgctttgccccaaaatcacaactgtattctcagtgtagaacttgtagtggcctgccattagtccccaacaactctaaactccgtatgtcatttttatggaaacaaggactctcctctcaatgctgacaaaatttctagcatgcagcacactggctaatttttgtattttttgtagagatggggtttcacatgttggccaggctggtcttgaactcttaacctcgtaatccacccgcctcagccacccaaagtgctggggttacaggtatgagccatcgcacccagcctagggtaaagttttgaatttgtctacattctctagatcaggacttcgccagtagaaatagaatgcaagccacattaagtaatttaaaattttctagtaccacgttaaaaaatgtggtactagaccttgaatttttcgggtggagaccagggatgataaatgtcttgcagtccttaggactaccctgtacaacaaagattgtgttattctgcaaagcttttaaataccctagcaaatattcatgtagttaaataacttttttgtataattatctaaccctggaaattctaaacatggttttaatatacgctatgtattccagaagtagaaacttttaaaaaggtgaaattatttttaacatgttttatttaacctaatataaccaaaatattatcgtttcaacatgcaatcaatatttaaaaattattagacattttacattttttccacgccaagtattcacaatcagcrtgcattttacactcacagcaatcaacttggatgcaatattcattggaaatacttgatctgtatttaaatttcataaaatttagagttgaggaagtagactcacctacctaagaagttccaaacctacttaaatgttttccaataagagtcaaatatcaacttataaatctgtatttaaattaattgtagttaaataaattcagttgtcggttgcgctaccttttaagtattcaatagcttctaggtactagtagacagggactgtattggacagcacagctgtatattgttcttaaaagccatcatttgtatagtgtttgcctattttccaagtgctgctttgatatcttctcaggttattgtttatgtagaattagtccatgcccctaagttcctctcagaaactgttttaattagatgagattcattcatcaaggatataagtgtctaggggaaaaagttctgcatagttgtacctcatccccagggccaggaaatgccttgcacattctaggtgtttaataaatgtttatctacctaaatcctagttggtcctcaaattgcaccttaaatttgactttctcaggaaagcatttcctgactctccagtctggcctgtggttttttgttgcattttctcttacacctaagttattttcctccagaacttatttatgtgagtaactttgtgattaatatccatctccccaacaactaggctgtaagttccacaagacggtaaatgtgtttttactcactaaagtrtcccctgctcctagcataatgcatgacacatggcaggtatggagtaaatatgggtcagataatarctcagggctatttataatataaagtcattagcagaatgtctaattcttaactttatagaagttggagtttgtttggtcagggaaacaggaatattttattttaaggattatatacactaaggacagtcatccctcggtatttgagggggattggttccaagactcccttcagataccaaaatctgggggtgctcaagccccttaaataaagtggtgtagtatttgcatagaatctatgcaacatcctcctgtatactttttattttttaattattttttagagatagggtgtcactctgttgtccaggctggaatgcaatggtgcaatcatagctcactgcagccttaacctcctgggctcaagtgatccttccacctcagcctcctgagtagctgggatacaagtgtgtgccaccccacccagctaattttagtatgttttgtagagatagggtctcgctgtgttgcccaggctggtctcaaactcctgggctcaggtggtcctcccacctgtgtctcccagtgtgcatgagccgctgtacctgccccttccgtataccttaaatcaactctagattactgataatacttaatacaatataaatgctatgtaaatagttttgctgtactgtattgttgaaggaataatgacaaggaaaaaaaagtctgtacatattcagtacagatgcaaccatcacaggcctaactttctgatcctcacttggttgaatgcatggatgtagaacccgaggatacggagggccaactgtatgtagattcttagtttttgttcaagccttttcagaatgctcacactagtatgcctttttttgactttctctctactggtattcattttcttgagtatctattacttcatctctttctctgcatagcatttaatgtactgaagacaaaaactaaaatgtaagaaaaggaaaatggaattgtgaaatatgtttaaggaactgagcagaaagttatagggcaaagacagaggagcacagaggaggcatcacttgctgtttcaggacagtttagaataaacccacccttttarttataccagagtaatgagccttacccacagtttgtgaaaatataattaacaatgtatcttggttcagtagaccaggctgtcaggtcattatcagaatcataaatttggaagtgatgcccattaaaggttgctagtttggaaaggttagattagaatttagagcttttgcaaatataaaggtttttcaatttaagttgtgctttagaaaacctctggcatttgatttttttcttttaacttttcatggaagtgcattacrcatatagaaatgtgcacgtaagagcacagcctgatgaatttccacatctcaatgaaaaaaacatgacattctcagtgtcccagaagccacccttttgcttcttccctaccccacccccatcatcctgatatcaatctgtttttcctgtttttgtaattcatataaatagaatcatacagtatctgtatttgacttaatataacatgttatcattctgagtgacattcctgatggcaactcattgaaaataaggtctattttcagttttccttattatgtattattttgttaaactggcagcttaccagtatttctagatctttctattcctttaagaaattttccatgtaaatgcatgtgcatgtgagtatacacctaggtgtgtgtgcacatgtatttatatgtgtacgctttttaaaaatgttactcaaattagatcatgctttgctatgcatattcttcacctcttggtgatgcatcttaaaaccctttttggccaggtgtcgtgactcacacctgtaatcccagcactttgggaggccaaggtgggcggatcacttgaggtcaggagttcaagaccaacctggtcaacatggtgaaacgctgtttctactaaaaatacaaaaattagttgggcgtggtgatgcgcgcctgtaatcccaactactcgggaggctgaggcaggagaatagcttcaacccgggaggtggaggttgcagtgaaccgagattgcgctattgccctccagcctgggtgacagagccagactccgttgcaaaaaaacaaaaaaccaacaaccccttttatataggctcttgtagatccacttcatttttcctaagggcagcatggtacttcattgtatgggtgtattatcatctaatgaaccagctgtgcactgaagaacatctaggtggttactggtcttttgacttcagaagaatagaatccacgttagcttgtctgtgaaacaaattatcagaagtggaattgccgagcagtgggatccatgcattcaaaacttgctcagatatttgtaaatggctctccaaagaattttgccagcttttactctcaccagcaaggtttgaaacttcctgtttccagtgtcctgtccttagattgtggtattatctggcttattaatctttccagtctgatataggaaatccagttagacattgttatttaaattggtattttcttaagttttgagtgaagctagtgatttatgtttattcaacattggtgtttctcttgggacttgtttcttttcktattctcctacagacttgttcatatttttcttaatggttttaaggaactctttctatataaaggaaattagcccttttatgtcatctgtggtggtaattttttcttcagtctgttttttgcttttatcgtgtttatagtcactttttttctaaacagatggttttaatttttacgtggcaaaatgtaccaatttttttttttctgtagtggtgctgaattgtgtgtgtgtgtgtgtgtgtgtgtgtgtgtgtgtgwgatgagaaaaagcattggaaacttgagacagaaaggtaggtwaggcctaccatgaaaaaaatcctcaataaatgtttgtgggaaatgtgacaaagtaggaattcaagtttcaatcaaaagtggtatgaccaactataaacaaacaaaaatttggacattatctgccaaaatttgtttggtatatataacagcttttggagagattttcactgctatgcttttctttcttttatgctttgttatttggarttttaatttctcaaatgatcccttctttttagatttcaaattataacctatttcctgcaccattgctgacgcctggtgatccatgtcagaagtacttccaggtcagatacattttctcatatttcaatgcagagaagcagttgaatattaaaacttaaaaaaagataatgtttaatgttaaacttatgatttgctaaaataacatgttttttaatttcattgttcttcactaatgtaatagaaaaatgaatcttggccgggcgcggtggctcacgcctgtaatcccagcactttgggaggccgagaccggcggatcacgaggtcaggagatcgagaccatcctggctaacacggtgaaaccccgtctctactaaaaatacaaaaattagccgggcatggtggcgcgcgcctgtagtcccagctacacgggaggctgaggcaggagaatggcgtgaacccgggaggcggagcttgcagtgagtcgagatcgcgccactgcactccagcctgggcgacagagcgaaactccgtctcawaaaaaaaaaaaaaaaaaaaaaaaaagaaagaaaaatgaatctttaaaatcaagtacaagaattagttggacttaaccatatttgtgtaataattgcatgaatacttatatcgtaatgtaaaaatattttagttgactatgacaggagcttaaaactgtcaaattttaccatctagcattgtacattacagcctgggtactgctgaaatgtcaacaaaggagtaggtgttggtgttgcgtttctcaatctgcatcttattaatagcttgtagagtttgcttagacagaaaccccccccgcccccaatactgaatgtattctccttgggtctaatcagcagattaatttcaggccttaggaaaacaaccttaattttattgtgcatcccttttttggtctcatgatagatgctagtctacatacaatgtggtgtgggatttaatccctagcctcacagttacataataaggaaaaagcaattgcagaaacatttcatattaaacatcatataggacttcaagtgacagatctggatagatttcatatttattagggcacatattgctcagcaagttctragtttttaaataagtagatttaagccattggcaaatagatactaatgtccctaaattctaaacttattattaaatataatcaagctgttttctcctttatatgacatttttcatgttatatttcaacaaagaactaaaataaaacataaacactaagctcagcagaggyatatgagaggcaacaaatattcttttataaaaaacagccaaaaactatgacaaacctgagtttacacaggaatatcagygtcttagagctgatttttagaagccatataatcatagtgtgatgatttggggagggtatggattttgtcaatacatattttgtcaatacgtattgaatagatatatgaattttggaaaaatcaaaataaatacgtatgttctttagaaaatagattttaaatgttgagaataattcttttagggatcctttaacttttaaaatcatatttttatgagataggttattaatagattattattatagtcttatcttcaaggtactctagtatgaaaacattaaaataaagctggcaagtgtataaaatgatgtgtgttcctctaagtgaaggtggactaatcaaataacttctagaaatttcctgttcttgctatattttgttatgctgatgttttcattcttcatgctggtgctcaaacagctttattctttggtggttataacgtaagagatactggaacagttatctagcctggtttttaaataacagctactactctcatgcatcggtatgacatataacacattctacagggaaagaggtattcctagttcagtggaaaatcctattccagccatttttttcacttgaaaattcaaatggcgactgatgagagagggtcttgactaataagtggggtaaggtttgccttcagctcctttttctaactctagggagctgtgactacagggacatcttttaaaaacaaacatgccagaatttatttatttatttatttatttaaattttttttgagacagagtcttgctctgacacccaggctggagtgcagtggcacaatcttggttcactgcaacctttgcctcccaggttcaagcgattctcctgcctcaggctcccgagtaactgggattacaggcatgtgccatgatgcccagctaatttttgtaattttagtaaagacagggtttcaccatgttggccaggctggtcttgaactcctggcctcaagtgatctgcccgcctcggcctctcaaagtggtaggattacaggtgtgagtcaccacgccctgccaaacataccagaatttataccattgtctgcctctgaaactcctattggcccttcacgattcagctcaggagtsccttctgagcaggccttagcccatgatatcaagtaattaccctattttaaggatcctgttattgtttaacattttttccctttcagaatggatttggggcccagcttatcagtagtaactcaagaaaatatgtgacatttctttatagctcacctacttttttttcacctaaaccaatattctcaagctggatcatcatcaggcttgcccgtaagtctagagctctattaaaaaaaaattatctttgaaagtcactgaggctttattaaagaatggaaacagcttagaaattgagcagggaagagagctaggtgtagtggtgcatacctgtagctccagctacttgggagtctgaggcggcaggaggatcgcttgagcccaggaatttgaggctgtagtgcatgatgactgtgcctgtgaatgcactccagcctgggcaacatagtgagaccctgtcccttaaagtaaaaaagaaattgaacagagaaaatgaccttggaatataatttccaaagttgactactccaaaggtcttaattcttacttgaatatacacattctgcttgtgcttcctaaataactgaccatcacatctgccaggtgttatgttgggaatggcaagctttcccccatctggaatgcctttttctttcttgtccactgctgggctcctttccacccttcaagatccggctcagctcttctttttgttttgagatggagtctagctctgtcgcccaggctggagtgcggtggtgcgacctcagctcactgcaaccttcgccccccgggttcaagtgattctcctgcctcagcctcccgagtagctgggactacaggcatgtgccaccatgcccrgctaattttttgtatttttagtagagacgggatttcactgtgttagccaggatggccttgatcttctgacctcgtgatccgcctgcctcagcctcccaaagtgctaggattacaggcatgaaccaccgcgcccagccagctcttctttttgtgggaagccttccctgaacctctctcctcatccctaacatggtgttctcataagaccctctgccaacttcagccattgtgagtttgtgtaatctgattttctgccaaatctgattttcttttttagaaaataacatttcttacttattttttataatcgacaaataaaacatgtatatgtttattgtgtacaacatgttgttttgaaatgtgtatacattgtggaatggctaaatcaagctcgttaagattgagtttattaaaaagtatgtgatacatctgtcttaaatctcagttccacttcaaacattgaacagagtgagtcctcaggcagttaagtttaatgggacacaagaaaccctcaagtgggtaagatctgattgtatctgacactctgcatcagcagtgtgacattgctcgcctagttagaatattctgaggttcaaatcctcccatctccctggcccggtgacccaagctgccttattgataacttttgcctcttttgttcacagagttcttatcatttttgtcacattgaaggtttcctttcatgagtagtttcgggaagccagctttatttagcttctccctcctaaaaggaaaagaaaaatcagagtttatttcatttccttaatattttgtaatctagttcaaacagtgacattcctcagggtaggtttcactattaactcctcagtggaaatgaaattgtatagcagaaaaataaaaatgaagcaaatgtgaagtttcattcaagcatggggcaaacattggtcttcctttggcccatttatcaaccctgggcccgtttgtcagtttccaattttataagcatgtcgcgggagtaaagggagagcagcaggttattgaagagagaagttcttgtcattactcacaaactctttctttgacaaaaggctaaaggtcttagaaaagggaaaaggaggagggggaaagccaggtttaaccacaggatgcagcacaggtttgtattaggatgtggtccgagttacagggccagtaggcctggttgtatctgtgctggggcctttgtggctgggatcgagagaagctgggcaagtcatgaaattagagtgatcctggcttatccagttttgtttaggtttcataaaaaatactttgtgtattaacgagggctcttttagttgcaaaacagagaaaacctagctccaagtggcttaggcaaaataaacacataaatctatcgacctgagaagtccagcagtatcatatttcaggcatgtcttattttagggattcagtcattagggcttgcacattttctctctgtctcttggcttcgctttctttggtacagtcatgctgggcaggttatctcctcatggtgaccccttgaagctctaggcttatatcttctagttcaagaaaaagagaaaacagagcaccactcttaccttctggcaagtctcatggttggcttcatgtgggtcataagcttttccttgaaccagccactagagccctggggatttgctactgtgattggctgtgccttggccatgtgccccctgaaataaggagtacartcatctctgcctgaaacacatgggcctaatccctagagtgtgcgctctgcgctccataggtatctttactttgttggttttgttcactgctatatcctcagcacttagaagcatatatggcatggagtagtgcacaaaaaatatctgttgaatgattgaatgggtgtaggggaaggctgattcccctagaaaatttgcgaggcttttaacagaaaaggaggaaacacgtgccaggctataatagatgttccttcatcatgcatgcaggagagcaatgacagcagtaatattagctcttgtcacactcttaaatctgaacttatacccacctctggattaggaatcgatcctcttgaattgatgttggagcttcataaatcacactcaacatagcatgatgaatagacgtggaggggatggcagaatcactgggggacccatccacctgccaggaatccaagagaaccacctttatgctaaagactaaccctcattgttactggcattttggttattcattcctcatttagttttgcttattttgttcactgctgtgttcttggccttggtatacatagtaggctcttggtacatatttaatgaattaatgaggaaatgaattaaggagtcaaaaaacatttattgagtcttattacatgctagactttataataaaaggaactggaaattctggaaaatgaaagggaaatgaaaagcatagccccagtgaaataccatttcacaccaactaggatggctataataaaaaagacaataacaagtgttggcaaggatgtggagaatttagaagccttatacactgttggagggaatggaaaatggtacagtggctttgtactacagtctgggagttcttgaaaatgttatatatatatatatatatatatatatatatatatwtatatgtaacratatgtttataaaaatataaaaatgtgtgtgtgtatgtacaaaaaagttactgtactcagcagttccactcctgagtacacacccaagacaattgaaaatgtgttactgaaacaccaggggttcagtctaggtcctgctgctcactgcacagaaagccagatcactgagagggcaggtattgctaaggaagaaggctttaatcgggtgctgcagctgagaagataggagctcagtctgaaatccatctccctgaccaactaaaactaaggttttatatagtagggaagaaatgaaacaaactgtaacaaaacaggatctaggtaggagcaaggaagcaattaggatgaatgagggttcccccatctcattgtctggatgcaatgatctggtgagtttcagttctttgatactttttttttgagagacctgaaggtcatttcctgaggaaggatctcagataaacaaatataaatttcttttaagaccagaagggtcaatttctatgtttatcmaaaaaagctatctgtaggactattgggtcagttttacatatccatagaagaaaaacttgtatatgagtgttaactcataatagctaaaaactgaaaacaacccaaatgtccattaaccagtgaacaaataaaatgtagtatagccatacaatgaaatattatccagccataaagaggaataaagtactgatacatgctacaacatggatgaaccttgaagatacagtaaatgagagaagccagtcacaaaagatctcattatatgattctgtttatatgaaatgtctatcatcaccaagttcacaaaaacaaagattagtgtttgcaggggttggagggagggacgaatgggtcgtgactgttaatgggtacaggatttcatttttggtgataaaaatgttcttgaattagatagtattattggatgcacaactctgtgagtatactaaatagcactgaattgtgtactttaaaatatggtatataaatttatgatataaaaattttttaacttttaggttcaggggtacatgtgaaggtttgttacataggtaaacacatgtcatggggctttgttgttcagattatttcatcacctaggtattaagctcagtacccaatagttatcttttctgctcctctccctcctcccatcctccacactccagtgtttgttgyctccttctttgtgtttgtaagttcttatcatttagctcccacttataagagaaaatgtgctacttggttttctgttcctgcattagttttctaaggataataatctccagctccattcatgttcctacaaaagacattatcttgtgcttttttatggctgcatagtattccatggtatatatgtacyacattttcctttttttctttttttttttttttttttggggagatggagtctcactctttcgcccaggctggagtgaagtggcatgatcttggctcaatgccacctccaccccccaacccctaccccccaccatcccagcttcaagagattctccggccatcagccttccaactagctgggattataggcatctaccaccacacccagctagtttttgtatttttagtggagacacggtttcaccatgttggccaggctggtctcaaactcctgacctgaggtgatccacccacctcagcctcccaaagtgctaggattacaggcatgagccaccatgactggcccacattttctttatccagtctgtcattaatggacatttaggttgattccatgtctttgctgttgtgaatagcgctgcagtgaacattcatgtccatgtgtgtttatgatttatattcctctgagtatatacccagtaacaggattactgggtcgaatggtagttctgcttttaactttttgagaaatcgccacactgctttccacaacagttgaactaattcacactcccaccgacagcatataagtgttcccttttctccgcaatctcaccagcatctattattttttgactttttagtaatagccattctgatttgatttgcatattctttaatgatcagcggtattgagctttttttcatatgcttcttggccaaatgtatgtcttcttttcagaagtgtctgttcatgtcctttgctcactttttaatgggtttgtttttctcctgtaaatttgtttaattaagttccttatagggttgtgggagtgaaggaggaccggagagatcatggtgaaactggaggatttttattgagtgcactcagacccagcggattaacatccaaaaactgggcctggaacaaagacagcacttgaattttagacacatttctaaaagggggtgggctagcctgaaacaagtttacagtggcgcgaatcgtagtggcgtgaaagcaaggatacagaggcagaacaaagggagttaattaaattgtgacaggttcataactcaggattacaggtgactcttcctgtgcagtccagatggctgttatggaggcttgctctagtgccttgcacaggcttatctcttaaccttcactatggcgcccagatggctgcagcccaggcctgctcaggcatgtcttataatcttcactgtgctgcttagataaaaacagaatactcaagttaccggaaaacaggaatctgtaaactcataagttttactcataggggaaaggaaaatttgttttcttctccctatgttgaaggagggctgggagagtctccagggcacattcctttgagctctggcttcttagataatattattgagacttcacctgggtccaggctttgcctgctactgcctttggaatgagtcaccctaatatagaaggcttgtttttctctttttaattttatttttctttckttcttcaatttcctccctcaataggtgctggatattagacctttgtcagatgcacagtttgaagatagtttctcccattctgtaggttgtctgtttactctgttgatagtttcttttgctgtgcagaagctcataagtttaattagatcccacttgtcaatttgttttgatcgcttttggtgtctttgtcatgaaatctttatccattcctttgtccaggatggtattgcttaggctgtcttccaggctttttatagtttggggttgtacatttaagtgtttaattcatcttgagttgatttttgtatacggtataaggaaagggtccagcttcaatcttttgcatatggctagccggttatttcagcaccatttattgaataaagrgtcttttccccattgctgttttttgtcagctttgttgaagataagatggtcatagatgtatggctttatttctgggctctctattctgtcccattggtctgtgtgttcttgtttttgtaccagtaccatgctgttttgagtactgaagccctgtagtataatttgaagttgggtaacatgaggcttccagctttgttctttttgcttgggcttgccttggctaattggactctttttttggttccatatgaattttgaaataattttctttagttctgtgaagaatgtcgatagtttgataggaatagtattgaatctgtaaattgctttgggcagtgtagccattttaattatattaattcttcctacccatgagcatgggatgtttttccatttgtttgtgtcttctctgatttctttgaacagtgttttgtaattcttattgtagagatctttcacttccctggttagctgtattcctaggtgttttattctttttgtggcaattgtgaatgagattgtgtttctgatttggctccctgcttggctgttgttggtggataggaatgctagtgatttttgtacactgattttgtatcctgaaactttgcttaagttgtttatcagccgaaagagcttttgggctgaggctgtgggattttctagataatagtatataaattatatctcaatgaagctgttatttaaaaaaaatgaatggaatagtcactttcctcaaggcgtttgcaatttagaagaagacatagacataggatctaatcatagaagtctgcaacttcttatctactgaggaagtatgcaagaactgctaactcatgccccccatatttaacaatatgcctgatgcttttcagatcaagaaatgagctttgagctgataggattgcaactgatgaacagtcatgtttgacagggaagtaccccattctgctctaagttacaaaacatatgcttttgactctaaatattccttgttctttcgggagccacggtagagttgagtaagaatttatttgagctgagactgaggagcaagataaattggtctatacattatattaaaggattttattttaactcttgctcagatgctacatggggtaacagctgagataactaactgatcattgatcrccctttctctgatatatcaaggatatcctttcctttttttcaaggaaaggaaagatgaatttcctgttgacttaactattaataacagtggtttcctttcagtgtttaataagaaactctcagaaattctgtctagacattttatgtcaacattttttgagatgttaattgaaacacttgcctttcccgttttacttgaggatttattctccaaacatttatgagtgcctactctgtgctaggcctctgtgctggttggtggaggtcacagtctagtgggaaactcaaacaggttaatagtaaaagtaaaacagcatgagtgatgctgtaatagaaatgcatttatgaaggtgtgagaattgtgagaagtagactccagagggacaagagaaggcttcataaagcggtgacatcttttctgaatcttcaaagaggagtaggaatttgctggagggaaggaagggtactgagagtgtgtggagggacaaggaagatgatgtatgcgatcagagcattccatgtgcctctgaaataattaactccatgtacatcattttattcttcccagatctcacacttcctcttccagtggttctccaaattggccacagattagaatcaccgcaagaacattttaatgccctgactgggcccaatcccagaggaactgaatcagaatcttagaagtatttttgtgggtggggcctaggcatctatactgttttaaaagccccccaggtggtttttacatgtggccagggttgagaacagttcctcattcccttcacatctgttcctctgtgtccggaatttattccttctggtgggttcttggtcttgctgacttcaagaatgaagccacggacccttgccgtgagtctcacagctcttaaagatggtgtgtctggagtttgttcctttagatgttcagatgtgtccagagtttctttcttccagtgggttcatggtctcgctgacttcaggagtgaagccacagacctttgcagtgagtgttaaggtggtgcgtccggagttgtttgttcctgccagtgggttcgtggttttgctgacttgaggaatgaagccacagaccctcacagtgagtgttatagctcataaaggtggtgtggacccaaagaatgagcagcaggaagatttattgtgaagagtgaaagaacaaagcttccacagtgtggaaggggacccaagcgagttgccattgctagctcaggtggccagcttttattcccttatttggccccacccacgtcctgctgattggtccattttacagagcactgaacggaccattttacagagtgctgattggtgagtttacaaacctttagctagacatagagggctgattggtgcgtttttacagagtgctgattggtgtgtttacaatcctttagcaagacatagagtgctgattggtgcatttacaatcctttagctagacacagagtgctgattggtgcatttttacagagtgctgattggtgcatttacaatcctctagctagacagaaaagttctccaagtccccactcgacccaggaagtccagctgacttcacctctcaatccccctctaaacaggacaccccacctgctgttgggaattgggtgatgactgctctagccacttcctgctggataggggcgaagaccgggccgtgcagttgtagtgtcctccagaggggaactctttaggccagtgaaagggccagcgggtcggttcaggggtcctcggtagaagttgttagttgagctcatttggggttccatttgtaagaccatctgtagcttgacggcctcaatcccagaggaaacaaatttgacaaggagattaaaaatacagggcccgaaggcaagtaatagcaagatggctgtcatgggacttagaaaggggagaagccatgttgcttaactccagaggttggtataagagtttgaaaggcgttgtctgatttcagaagccttttcctgtaaacgctgggcggcatctcttactatccctgacctgttagtgtaaaaacaacactcttcccytaagaaggtgcagcagtcctcctttctcagcagtgaggaggtctatgcctcagaggcttcggagtgtcactgctgccagagtctatttgggattgtagagtaaggataggtttcattatttcttgcaaactgagaaatcctttgagagtgtgtggtagtaggataatacatgttacactgttaacttttagcaaactttacttttgttgaaaacsttgtaagtttgggattaccttataacctaataaatttgggattaccttataagttaatatggactgaacgccctgggttctttgctattaataagatctcgttcagtccatattaacttagaattggtatagatggttccttcctgattctgtaagtactttaaggtttggctgagtgcaaacagctggcactggtttgagcagaccaattattaggcaattttcctaactgcttctacaggagttcccttatcacttactgaatacccattgtgtcttttttccttaatcacctgggaggaaccatctattgtcctgtcctgaaggagttcctcctagatctagttggacctttgtatggtaattagttaagatttagatcccctgttaggaaacctgcagggttaaggatttttgataggaaggctatgggttgtcagtggcttcagygctttcgggttacacccttgtttacactggcaacaaggtggtattggagtgttacagggttacagagaagaccttcaattatcaattataggttttaaatttaccctggcttttaaargaatagggtacactgttttctctttactgcttctgtctctttctctctgactcctttgtctcttcctctctttccttctctctttgactttctgtctctctgtctcttcctctctctgtctctgtctttccctcctctctcttcgactccttgtctgtctcttcctctctctgtctccttctctttgtctctctgtctcttcctctctctctgactttctgtctccttgtctctttcctttctgctgcctctgccagctgcttatgctgctgttctcccctctccttcccctttttgatggcttcggcagtggaagactgccacctccttgggtttttgcactgcatgcaatacctctaccttcctgggacctctgacctctggccttttccttttctcccacttctttaccgtttctactgtgcagtcccctgatttcctgctttctccaggccagatcccagggtgcaccctcatctgttcatctcaacacgcccgacgacttcatcaccttcccctctgtgactatttctgaacgttgtctccctttttaagtttccttctacaccatacccctagactgtttcctctctgggaaaactttctcttcatagagaaaattaaggctgccagtttcgcttttgctcggttttgtgtcactgtagtgacacacgtgtctgtccttgtccttaccgcctctcttccctcctagcgtgaaggtacccttatcttgggcagtgctgtttccagtccggtcttgtcccttctcttctctcatcacgtggattctaccttactgttctgttactcttttgtgtttccacttttactctctttattggcttctgcttttacagcctttaaacaataaaccataactaagaatctcatctttaaaaagtataaagtccctcccgtaaacctgggtcatcctccagctactgtcctgtctcccccaacttgaataaagttcactctctgcccacctctgcattctcctgaagctgatatgatagaagtcaccagtgtctttctaattactcaattcaccagactcttcaatcctcacttctgaatccaagtggctaatgggaaccttatctttctgccctgttcaagggatgattgaccagagctggaactgtagtagtgggagagtaagactttcacccccatacctaagtctcttgtgactaccttgtcctctcccactttcttgactggactgttgcaaagaacctcccaactggtcctgcttccctttggtaaatggcagagtccactctaaggccagagaatgagcctaaaaatggggccagcttacctctttgttggttcagaagacactgtctgtgtacctctttccactgtttctctgatcaccactgatgttttaattgcctggtttacattacttctttaatgtcttttcatcatagtcatcgccttctcggagaatatactagaggaaaaaggctcaacatatacacagatacaacacacacacactcagaatatacacatcaaccttccattcattcctcctgctgttgcctcagggtcaagtccaaagtgttagagcatgcttcagaagaacccctgcctttgctcttctccatcataccgcctctcctttcatgtcttgatttgttcaggctcccttgatgataatcctcccttccctgaagatcctctccaaccctaggtgagtagcccacttattcctctgcatctgcccacccgtcaccctctgtgatttctgtgactttattgtgtgtttttcttctgcaagcctgaaagcacatagcaggtaggaactttatgttccttggttttccaattcctagcacagtacccagcaagaagaaagtgctcagtcagtggtggcttgaggtatggtggtcagaaataaaagtgtgcaaggaaggagggagctatawgattatgataatccctaacatgtattgagctcttacagtatgccagccattatgtcaaaggtttgacagtcatgttttagtccccagcaaaactcaatgaggtgtagatactattataatttcattttacagcaaagaaatgggagtttaagtaacttgttggttgtgttaaagagtttggtcttatttcttaggccttttgattccaaagaaaacagttaaatattagaaggtttaaagaaacattgtaagattttcttttatttaaagacaaacacaaacctctatcctcttaaacccgaggaatgtatatttttttcataattaaatcctcatagacccaacttctttgttccttcttagtctctttcctctctgtgtgtctctgcaacaagaccatttcaatcactcagaccaattagagtggggggtaatctgggggccctggtaggcagccccgcgctatattacttgcgtacaaagtagtgagtggagctcacatttattgttataaactcgtacaaagtggtgagtggagctcacatttattgttataaactccctgtaggcaagtttacttgtcatgtaaaccaagtactattattatccccatttttaaccaggaagtaggttggataggtcttgagcctttctctccttgaccctgagatctgtgcttttaacccttacagcatttcctctcccttggggctgctttcttgtagccttgatctttctaggattttgctaacctgtagctacttcatgacccttttgagcccaaggacttcctagctgatatgtaactcctagaggaactctatagttcatgggattagcttggctgccgtagctctagaattgaactttttcttttgcctccacatgataccattatttaatgtctaagatattactcaaactgtgttcaggctttgatatataaaaacaacatatacaggctgggcctggtggttcacgcctgtaatcccagtactttgggaggctgaggtaggaggattacttgaacccaggaatttgagaccaacctgggcaacaaagtgagacccctgcctctacaaaaagtcaaaaaattagccaggtgtggtgtatacgcctgtggtctcagctacttaggaggctgaggtaggaagatcgcttgagcctaggaggttgaggctgcagtgaggcatgctcctgccgcttgtactccagcctgggtgacagagcaagaccctgtctcaaaagtaatgataaataaataaccaaccctgtctcaaaagtaataagtacgtaaataaactaataaatatggcatatacagagctgcattttttcatccagtttgtattggatggtccttttctattcagcctcttacccctcctgcctgccctccattatttctagcaagcagaagagttacatggcccctgatagggtaatgggatcccaaagactgtgaaaatatggctagaagtctttttttttcttttttgttttttgagacagagttttgctcttgttgcccaggctggagtgcaatggggcgatctcgtctcactgcaacctctacctcccgagttcaagcgattctcctgcctcagcctcctgagtaccggcatgcgccaccatgcctggctaattttgtatttttagtagagacagggtttctccatgttggtcaggctggtctcaaactcccgacctcaggtgatctgcccgcctcagcctcccaaagtgctgggattacaggcgtgagccaccgcacccggctgtggctagaagtcttaatctgtcatattgaggatataaaagttatttatatattaaaaatcacctagaaattctgatggtattctttctgaaaatatgtatgattataaacaaagcaaataaaaatatctccctaataacattgctagaatgtataatagtacctagcatcataaagcagcctaatataaatgttttgccatgccttttaggaacagcagatttgcactttctcataatctcactctaaatacccaagagtctaaaaataactttctctcatgtatctatgctctggatatgtgtctcagggaaaacttcatgtaggtttcaggtaggcccttctcatatgaaatgccactcttgagtgaaattaaattataaattgaaacatgtttcccataaaatggtataatagttgtagccaaatggtaataaaaattgtttttttttaatttaattgtcaagagtattgtttaaaaggcagaaaccttccattggactgggtggaggaaaaggaaattttgaaaaaggaaaaaccacactacattctctgtttctgtaaaatgaggcctaagagctaaggtgaggtgctaggtgagaaggaatcccgataaataataactttaaagaatggggcccaagatcctaacccttggggttacagcccttgactctcttatgggccacatggtcatactgttataaaaatggccatggcctagagtggaggattgatgttgccttgcttcctggaagcatagggactcyagaatgagcaacttttttctaaaattgcccaacctaagtatttggtgatggagagatacctctaagctcccaaacaaggaaattattgcccttctctcctgcaaagatccctgttttgcctgggggaggaagagggaattgtcagaatataatttcaggaatttcaggagctgtgctttggttcatctgctgctgaggtagagatcaccaaagtctctgtggagggcaaaaggatcagataagaaagaagtcactcctcatagattgagaaatctgaaaccttaggaattcttgctgatgaattttattcccttctagtctaagaaacctttctttcttcccagcgagagacatatagaataaatcactaacggcgcaaacaatatttgagataaatgcggttgccagatagtttcctaggagttctgcagaggcatgtgatgactgcaaacagctgagtctgtattttaattcagtggaatatattcagactcctctgggagctctaacatgttgtctgtagccaagggctcaatgctacagtaatagttttgtgtgcgtgtgtacgtgttcttcagaaattaagccatttcttcaaaatttcagtttagtacaaacagtaagcccaggtcaaaaatgttcaccaagacattagcaaactctaatggagggttagttttccaggcattcagaacacagtttctaaacgtggttgagaaaaattaccttggatgtatggagcatcattgaacaatgacctttcaggttaattaagaaagctgaagccccagaggaatcttgagcaattttttgttgttgcctgaaggaaccaaagaataaaaatgtagtgggaatatttggaaaggggatgatttttcaagcttgtaaaaaatgaagaccagccaccagaagaaaatgcttttatgtgaattcaaagagaaatgcttttttattttaagtaaaatttaggtcctcagacttcttagcttttctataaattggcttttggttatccacgttaagccctttatttgctcctgtttaatataggaacaaatggtgaaataaagaggaaaatgggtccattctatgagaatgtatgtgcagtggaagcatttcttcttttagttttctatataaaaatatttactcacactgtatactaagtagtttaatcatggcaggtgtctaatgactttttttttccccagctgactcaggtgttgacaccttggcagtgtttatggccagcagcggaactacagacgtcacaaatcggaacagcccagccacaccaccaaacacccttaacctccgatcctcccacaatgaactgttgaacgctgaaataaaacacacagaaaccaagaacagcacacctcccaaatgcaggaaaaaatatgcactaactaacatccaggcggccatgggcctctcggatccagctgcacagcccctgctgggaaatggctctgccaacatcaagctggtgaaaaatggggagaaccagctccgtaaggctgcagagcaagggcagcaggaccccaacaaaaacctgagccccactgcagtcatcaacataacttctgagaagttagagggtaaagagccccacccacaggattcctcgagctgtgagattttaccctcccagcccaggagaactaagagcttcctaaattacyatgcagatctggaaacctcagccagagaactagagcagaaccraggcaatcaccatgggactgcggaagagaaatcccagccagtccagggccaggcctccaccatcattgggaatgghgatttgctgctgcagaaaccaaacagaccccagtccagccctgaagacggccaagtagccacagtgtcatccagcccagaraccaagaaggatcatccgaaaacaggggccaaaaccgactgtgcactgcaccggatccagaacctggcaccgagcgatgaggagtccagctggacaacgttgtcccaagacagtgcctcacccagctccccggatgaaacaggtacccctggggaaggcgtagcctcagctggcacttttttttttttatcttttcaactattggagtaaatctctagactgaccaaaaatgtccattatgcagagaggaacgtgagcctcttgcggtaaaattgggcaatttatttgcaaaatattactgcattcctcaaccatattttaggtcagtttcattttggatcgtgcataaagttgtttgttctgggaagcatttttgtaaaataaacagatccttggtgttaagtacagtaaaatatcatatatttagaaattacacttccagtgcataggtagatcatttctatatgctatctagaaatactgggttttggtaagcaaaataataaaagaaacaaagttgttgggggaaggatataacccaattaagagaactattttaaagtcctcaaaataacttatttatggtgaagckcataaaaagttaaaacattagccatctgttcattaaaggcatttctctttttgacatttactgaggagtgttttattagccttaagtaatatttaaaagtgggaaaatcgtatttcttgaaaaatatattcagaagtttagacttttaactagtctaattgagaccagtctttctggacttttgtctatatttgtaatattttggatttgtcggaggtgttaaaatggtgacagaaatgaacaggatcctaaaagtcagctactttaaatatcattttcttatagctcccactatactgattstaagattgaaaaatgtggagaaccttattgtatctgaattcagcgtaaacaagcactcagaaaggctaattttttaaaagtagtccagcagttcccctagtgggtcccagggctgtgttaatatagatataacaaagaaaatagatagaaccaccagggaaggaaatcacatttttacaatcgataaggtagataaattacaaggactaaagataaggaaaagaggagttaagayattaacttgtttaagaagaaaaaaaaagtagcgtttttgaagtgccctttaaaaatcccagtactttcaatgatgcatactactgtggaatgtggcagtagggaggttgagatgaggccatttcatctcataactgtctggccctgcacattattggaatcataattatgttcagtaatgtccctgagttcacagctctctatcctttttacccatttagagaattcatatcctgaagctgatagacattgtcacctgctggagtttgaatctattaatacatgaaagactccttgcacatctttcagccaagctctacttcctgtgtttggcgtttactgacaccttgctgtctccctctggtcatggcaccctttctgctgctcttcctggtatagccggttctgttgtagttaagttttaaactaacctaaagttttgttcaggcacagtggctcatgcctgtaatcccagcactttgggaggctgaggcaagaggatcacytgagcccacaagttcaagaccagtaagaccccatctctcctcctccaaaaaaattagttgggcatggtggacggtggcatgtgcctgtagttccagctactcaggaggctgaggcaggaggatcacttgacaccaggagttcgaggctgcagttaaccatgattatgccattgccctgtagcctgggtgatcgagcgagactctgtttcaaaaaacataaatgtatttttaaatgaataattaagctgcctcttcccttcaccccagccccctttcccagtgatgaccattaccttatgtttttatttcctctcagaaaatgtttgagtcatagatccgcatattaataataaattttaagaccggcatgrtggctcacgcctgtaatcccagcactttggaaggccaaggtggagagatggcctgagctcaggaatttgagaccagcctgggcaacatggtgaaaccccttctctactaaaacattaaaaattagccaggcatggtggcgggtggctgtagtcccagctacctgggaggctgaggcacaagaattgcttgaacctatgaggcggaagttgcagtgagccaagatcccgccactgcactctagcctgggtgacaggcgagactccatctcaaaaaataaaaattaggccaggcgcagtggatcaccaggtcaggagttcaaggccagcctgaccaatatcgtgaaaccctgtctctactaaaagtacaaaaattagcttggtgtggtggtgcgtgcctgtagtcccagctactcgggaggctgaggcagaagaattgcttgaacctgggagacagaggttgcagtgaaccgagattgtgccactgcactccagcctgggcaacagagcgagactccatctcaaaagaaatttaaaaataaaattaaattaaattaaaattaaaaaaaaaaacaataataatcaattttaaaatttacccaaatgttgtgatgatgtttttagaatccctatgttttagagatatatactaatataaaatactaatctatgtcatagtataacatatataatacagtataacacatactgatggaaacaatattgtgtatggtattttctccaaaataattgggattagaaggataaaaaaagaaacaaaattgcccataagctgctgattgttaaagctgcattatgggtacgtgcgggttcattattctattctctaattttgtatgtttaaaatttgccacaataaatagttaaaaccaggaaaaagttactccaattagattgttttatgaatgctttgctttttttcacgtaagaacgtattttgtagatcagtccatttttctacgtcagtctttttaagtattatgtatactattccactatatacaagttccacgatttatttagcaagttccctgctgatgagtatttaggtatttctgtccatagccccttggcttattgagtgctggtgtcagtaggggcctgtggagagggcaaagtttgtgcactccagtctacctactgggactcttgaaatgtacacgttaactccctctttccaggaagactttcaggggcccctctgctgtgacacttaccactcatttgctcagtgtcctgacattacttgctgttgggtttccacagaacatcttacagtgcttggcctgtgatgagaactggattagagttttttttacatgttaagaagatatgcttagttttctctctgaaagttggttttgacaggatgatggtggcccttgataagttgctgaggataggtatttcaaatcaaatatgctcgaaaaaatgtattagctgtgaccgaaaagcaatgagattgtgtttttaaaaaatatactagaagccaaacctatgccagccttcaaaatgttcacttgggatctctgcacctgcttcagcatgttgcactgtctcaatattaatagtcataattttgggagtcctcttttggaattgcctcagagtctgctgtggatccccatgaaatgaaatcactttgctttaatcacacttcaggtttcaggtaatacatagattggtgaatgaaataaaataagcagttttttagcattgtatttcttttgatttcatccttcctgtgaaacatactgttagtgtttaaaataatcatgatcagtctaaattaaacattgtatgtttcacttgtaatgataaagttagtgtttattatgtatgttttatatagtatatacatgtgtatgtgtatatatataaaataaacacaaataccaacagttgaaagaaaagagaaaacgagagcaaatatcttgtgacatcttagtatgccatgccatagtacatgtataaaaagggtatagttgtctgttgacttsctgtgtgttaaatacatagtcatcacagtggtgtgtgttttatgactaaatcatgatgcaattatctttggatcgtagactgcactttggggagcctagaaaaatagactcatttctacctcaggggcatcctttccaagttagaatgctatttatacaataaaatgcaatggctaacctagagactgactactttctattttcctttactactgaatcgccccctccagctgtttagtaacttctttttgtacaatcaatcatgtatacaatatgtggctgcccttttcctcctctgtagtctgtcctttaagaaaacaagaggctatttgaaaaaggaaaagcatctgtgaaatgactattttcataggagtttagaaaagttaaagagtgccttggccctgattctaaaagaaaggttgtatcttgctactgcaaagtgagaactttgaatctagttagggtttttttcaaagatacagttccctcagtggccccaggtagtaagcatgatggctcagataaataaatacctgttggtcacactgtatatagtctctctgttaatcacttagtgtttcatrtttgctttatgaaaacgttgaaaagatgcatcattttgaaccttcctgggtacaggtttcagtggtacccacatgtaattttatgtttagtttgggatttaataaaattgaagacacagagtatgaaactagatggatcttgtgtagtaactgtttcaaaatsagattcattgctaaagtgtacaaaagcagaattatacacagagaaaaccaagtcccaagtctagatgggtgtggcaatgcgcctcatgatccattaacttatcattaagagcataggctctagagtgagcttcctgagttcaaatcccagctctgctatatctaggcagttctcatagcctctcatctataaaatggggataagagtgttttggcatagacctgctgtgaagattaagcgagagcatcttcaaagagcttttaggagcagtatctggcatatagcaagagctcaatgaatattcatgattattatattagagacagtatcagtacagtggtgtgttataaaagtttgcttttctcttaattatgaattacctatattttggactctgagttacgactttctggaccttaagagcaagggttggttcatcttcatctttgtattttcagtgcctggaatatggcaagtgagcttaataaataaataatgacacactgaatgaaaatgggagccatctgcatatcccaaaatgaactttatgtgttgaataagacactcgatgttatatcttaatcaatgcctggttttggcattggctacatattttataacttcattgatcctgttgcctcacagtaggtgaagctgaataacccgagttactggggaaggcacactgagattctgtgggtttacaatgtgccaaaccctgttggtggtactttctcactctcaggtggccatgctgagacttgaacctaggttttccgacacagctccagtgttttaccacagaggctaaatatatcagatttcatctggttcaactggaggcatatagtagtatcttgagaatccggaaagtggaaaattatattttaggggatctttccattcctctaagcaactgaggtttagatcaaatgccacttccactaygaaacctttctagaccctccgagctgtataaagtccttataaagtcctttctctgtattcccaaagaaatgtttctaagtttctgctatcatgtttatcttagtggctttcggcattactcaaaagtttccatttagacttagagctccatgaaagcagcagccacgtcttcattatgtgtgtatatgaacttcttcacacggtatgtggcacatagtaaaaggctccataaagttactcatttgctggttggatggatagattcacgatcattaaygcatgctctctgatgtttgctacatcaatatgcttgtagaaatagaaaaagtartaacaatttgtataaaatagttgtttagaacactcagatagggtgattcttatttatgttctaggctcctggaaagaatgaagaattggggccactaattcagtcttccacaaacattcttttattctattcgagtctataggtctatatgttgggagggccagtgccaaggaaaagggccattttggtttcagttgacytcacgctttgccttggattgagattgatccatggttgtcrtagattgttttctgttgctataacgaaatacctgagactggataatttataatgaacagaaatatatttaggtcacagttctggaggctgggaagtccaagagcataacaccagcatctagtgagtgccgtttgctgcagaataacatggcgaggatatcacatggccagagggaaagagaatgcatgtcagcttaggtctctcttcctcttctcataaagacaccagtcttactgtgggagccctgcccagatgaccttatctaatcgcagttacctcccaaaggccccacttccaatcaacacataaatttggggattaagtttccaacaacacatgaaatatgggggacacatttagactatagcagtgttgctttagagtttgaatcctttgatgtcttaaattgattggtttccagtcttgaggcaaagtggaactcttgcatagttgatgagagcragagtcacaaacctaattatgtcaacacaactggcagcacctcttatttctggctttagctagcttaagtgatagagctttggataagtctgtatttttcacacttytagaaacctcttctaactgttcattttagctcagatggcttttggttaattttaactgtaaatatttttcccccttttttcttacaaatactaggcccatggctgggcgcggtggctcacacctgtaatcccagcactttcggaggccgaggaggttggatcacctgagctcaggagtttgagaccaccctggccaacatggcaaaaccccgtttctactaaaaatacaaaacaattagcaggctgtggtgacacgtgcctataatcccatttacttgggaggctgaggcaagagaatcgcttgaacccaggaggtggaggttgcagtgagccgagatcacaccattacactccagcctggacaacacagcgagactccatctcaaaaaaaataaaaaaataaaaaataaataaataaatccctaggcccagtcttcagctggtttgccctgctgcattaattttaatcttttaaggaccttgggtgactcactagccttcctgttatgtcttctcagttgagagttccataatgcgacaggaagaattcaagaaggcagatgtgagatgtttccaaaatagtttaggcatgctgtgttctggggtagatagtgtgttttccgagtaagattttagcacttcaagggtaaaatgcataaaagtattttttattttacccccctgaacttaagaaagaaaagagtttgttcagtttgtgtttttggaaagttctatgcaaaaatatatgttccagtgaataaagtagttttgggttgccttccatcataaggtatcatacgaggtacttcaggggacggaaaggtgattacaatgagatgagtggcagccagagtctaacaatggttaatgagcacaagacagcagatgtattcaaggtggaatcaagggaggcctgtgagaggcttgagtgctaagaaaaggaagaaacgtcagtcagttgggatgtggatgttagggcacttgaagttatctgtgctggagattgaatagattttcagtgatggagatctggggagagcattgtccctcagagctgttgaaaagtaaaraatctttctttttcaaaaattaaccactaaagaagtttatgattgttttctctctctttacttcacggatattttgaaaatacagattttagttcttagtytggcaagttgtttagcttctggggagagggtcctgtggacagtggcagcttaggaagcaactggaggtaggcctctaggagtcctgtgtgaggcttctcagaagtgccaggtgatgctctcataccttggaggtgggcatgcagcccccaagattgtgaaggagtggctcagtgggatcagagagacaaaaacactactggacactttcagaaattttctggtcaaatttcatcatgagctatttgcccagattagttttcttcaccaaaaacaaaaacaagcaaacaaaaaaaaaacccttaagttggccaggcgctgtggctcatgcctgtaatgccagcactttgggagaccaaggcaggcagatcacgagatcaagagattgagacgatcctggccaacatggtgaaaccctgtctctactaaaaatacaaaattagttgggcgtggtggcacgtgcctgtagtcccagctactcgggaggctgaggcaggagaatcacttgaaccgggaggctgaggttgcagtgagctgagattggcccactgcattccagcctgggcaatagagtgagactccatgtcaaaacaaacaaaacccttaagttaataaataataaaagaggctacagaaatattcagatagcaaactcgaacagctctacatccatggggaattgaaatgcatctgtaactttaccatgatttttcactgagcagtattggtcatataagttaacaatagttcaagaatttgtgaatttgttcatcatgactttgttgatgttcattagttcattcattctttcatttgttacatgtacacatgccagtctttttttttttttttttttttttgagatggggtctcgctgtgtcgcccaggctggagtgcagtggcacgatctcagctcactgcaaggtccgcctcccaggttcacgccattctcctgcctcagcctcccgagtagctaggactacagacacccgccaccacgcccagctaatttttttgtatttttagtggagatggggtttcaccatgttaggcaggatggtctcgatctcctgacctcatgatccacccgccttgcccaaagtgctgggattacaggcgtgaaccatcgtgcccggccacatgccagtcatttttaaaagtcaactctgtgtgctgagctaggtgcctgagacatagaaatagattaaaaccagtctgtgatgtcacatagctcacataaagtttcctgtctctgtgaagccctcaccatacgcagagtgcctgacaaaatgtgtctttgtgttctttgctccattttgcccatcatacctcagtaagtaagaaaagataaagcccactccaaaccttggatagcctaagcaaagaagaggaggagatgttaagatgttttgttggtttcttacggctggtgtaacaaattatcacacacttggtggcttaaaacaatagaaatttgtggccgggcgcagtggctcacacctgtaatcccagcagtttgggaggccgaggtgggtagaccatttgaggtcaggagttcgagaccagtctggccaacatggtgaaaccctgtgtctactgaaaataaaaattaaaaaaaaaaaattagtaataaacaatagaaatttgttcacccatcattctggaggctagaaatccaaaatcaggctgggcgtggtggctcacacctgtaatcccaacattttgggaggccaaggtgggcggatcacctgaggtcaggagttcaagaccagcctggccaacatggtgaaaccctgtctctactaaaaatacaaaaattagctggacatggtggcaggtgcctgtaattccagctactcaggaggctgaggcaggagaattgcttgaccccaggagacggaggttgcagtgagccgggatcatgccactgcactccagcctgagcaacagagcgagactctgtctcaaaagaaaaatccaaaatcgaaatgtcatcagggtctcgctccctttgaaggctttagggtagaatccttccttgcctcttccaagcttctggtggttcccagaaatgtgtgacattccttggcttgtagctgtacctctgttttcacatggccttcttatagggacacaagtcatttgatttgggacctaccctaacctagtatgacttcacctcaatttaattaattatatctacaaagactgtttcccaataagatgatacatgctgaggttctgggtggacatgaattttcgtgggtatatggttcaacccagtacagacatcttacagataattccttaatagatgcaacatggaggagatgtgaaagaatgtttgcgagaattatattcaaaattttcaggaaggaaagctcatagttgcaggtcttgtgagactttgagtggaatatactgtaagggacttctagatagtttggggttacctttgttcaaagtcttcattgtaaagatgaggaaattttggtgtggactgatgaatccgaaactacaacctcaactgagattgggaataagtgtggaaatggtagaaaaacatgataaaaataaaagataaaaacatgataaagacatggcaaagcttaatatttagtagtatggctcagttctggagggtggcatagttgaggggtgctggcatatggaaatggctttattcctttgatcaaagcttagaaacagacagacaagactatcagtaatagccatgtttttcttatgttagttcaagagacatttatttcttaggaaacataaggattttattaaggagctatgcagaatataaaataaaaggatatgactctgactttagggcactacaaaggcaatatgatgccataaagcatcagagatcacaaacagcaatactgaagaacgcacaaactcacaggcagattttgttccatggacagtgttacagaaaatgcttaattagatgccagtgcttagaaattgagatattttacataaaaatagaggacctctcattcctcttgtaaattcagaaatctcacaatgctgagctcaaatgccaaagagacaacagtcagcagcagcccctttagatgggtcctgtcccctccagctcaaggcattgagcttgcagccccctgctcccactatcaatggacttagccattgtatacacatggaactgttacggtagaagaaccaggctaatgttgatcttgcctgttacagctgcatacaagtgtgatgccatagtagcagcatccttggatctacagtcttcttttaatcatagtcatcctagtctcagtcccttgccttctggtagaatcaaagtgtgacatgaactgttaagcaaaacgtgcttgaaatttctaaagacatctctagatgacttctcagagtcttccatctgttaatctggttaagaagagggaaaacattagcttttcaaaacctaggatgtgggtggttcataaattttgtgctcaagtctgactcagttaatatgcccagtttgctttcataaatgtgggggtagttaccagttacccttgtaatttatttattgtgtttcctcattagaacccttgggtgcaaaacagtgagataaaagcttcatattcaaacagatttgactggaaaaatcaaataatttgactattagaaaaccatatatggttagcattccatgtggaatggtcagaaagtgagagaatgagatgaccccagccattggtgttggtacctaagaggtgagctgatgcttattgtgtgtaagcttttgtctttttctttttctttttctttttttttttttgaggcggagtctcactctgtcacccaggctggagtgcagtggcgcgatttcggctcactgcaagctctgcctcccgggttcaagcgattcttctgcctcagcctccccagtagctggaattacaggcacataccaccatgcccggctaatttctgtatttttagtagaggcagagtttcaccaggttggccaggctggtcttgaactcccgaccgtaggtgatccgcctgccttggcctcccaaagtgctgggattacaggcgtgagccaccacgcccagcctgtctttttcttgagcttttcatagacttactcttgaatataattggatttcatcctcacaaaaattcatccttagtataattagatgttgttagttgatatttttctccctgcgtgttacttgaagaattcttcatatagaactacactgaattggtatatctgggatatcataaaggtagatctttatcctataaatggcttgttggagaagctggttttgttgtgttgtttattaccagaacatgttttctcatatacatgatggtgtatgtgatggttaaggtatacaaggtggtttgcccatgaaagtctatttaatctctaacagacatgaagagtgttattaatagaacctttccccaaaatgttgtaggggaaaatgtcccagttccatgtggaattgtcagaaagtgagaatggagatgactccaactccatgccattgggaaggggctgatgggaagtgtaccaaaggaagttcaagaactgatggaggcctctagggatacttctcagtaatggactagctctgcagttcctgctttgctttacagtgggggacctctgaccagtgtttccattcatcccttgctctctgtggacaaagaagctattccacagcctgtgctcttccctttctccagaacaagcctcagcctcttcsaggatttcaaagtggctttcgtcttttagttgatgtcctatctctctctctgtctccttttttttttaactttgtgtgcttggaacaagggccccaagttagagaatggactctatgcagaacacatcagagagaagccgtttcatctcaggctcattatatctttaatggaagattattggattggtaataatctggaatgtgatatgttaaccttaaaccactcacagagttccttgcagtccatgaatgtctcttatatgctaggaactgagtttagtgctctggacgatttcaaaattgagggacaatatttccatcagggaactcatgggttccttcttcaagattcaactctgatgacatttaccactttctgtggtttagggtcagacatcctgcttgttctagctccatcacttgcttaacctgtgagctccaggttccttaatctctaaaatgagaatagtaatagtagtaatctgctttataagattgtcacatatagcccttggtacaacagctggaccacagaaagcattttttgaaatgttagctgtcactagaattactgccttatttctcctaggagaaggaaagtttcccaggatctaggccagtttgactttgccctttttaaatatttatttatttatttatttatttagagacagggtctcactctgttgcccaggctggtgtgcagtggcgtaatcacggttcactgcagcctcagcctccctggactcaggtgatccccctacctcagccttctgagtaactgtgactacgggtgcacaccaccacacctggctaatttatatacacacacacacacacacacacacacacacacacayacacacayatatatacatatacatacacacacacacacgtttgttttttttttgtaaatacggggttttaccatgttgtccaggctgttctcaaactcctgggctcaacggcctctcaaagtgctaggattatagatgtgaaccactgttccctgccttttttttgttaagccccagaaataagttcttacaataggtatttatgtttgaatgattagcacgacaattaaacaattatttatactagtggtagaacaaattcaaggtaatagcgtacctccaagaagttcacaatagttagggagatgcataaatcctttgcttctcaaactatgcaggagtatgcccttgggatcttactgaaatgcagacactgattcagtaggtctgggttgggacctgagattctgcattttaaaaattctaattttcagttgtagaaatttgcattttaaataaactctcaggtgatattgatacccctgttgcttagacacttgagtggtgaaactgaactgtaagctgcagaaagaaggaatccaatctttgttccctgccatatccttagtgcctagaataaacagtgcccaggacattcttcttatttttactgatttacttttgagacaggttgtctgtcactctttgcccaggctagagtccagtggtgcagtcacagctcactgcagcctcaacctactgggctcaaatggtcctcccacttcatttcctgagtagctgggaccacaggtacataccaccagacctggctgttttttaatttttaatttgtagagacagggtctccctatattgcccaggctggtttcgaactcctgagctcaagcaatcctcctgtctcagcctyccagagtactgggatacaggtgtgatgcagagtagtaggatactgtatctcaggatacctggctcctgagacattccggtgttcaataaatattgtggaataaatataattacctcaaaatatagtagtccttrttcacagtttcactttctgtggcttcagttacctgcaatacaccgaggttggaaaaaattccatggaaaattctagaaataaactataagttttaagctgcacaccgttctcggtagcgcaataaaatcttgtgccatcctgcttcatcccgcccaggatgtgagtcattgctttgtcctgcacacccatcctgcctatgaaaccgacctgtgagttgcttagtagccgtctgtctctgtttccagatcagctgttgtarcattgcagtgcttgtgctcaagtcacccttattttacttaataatgrcccaaagcayaagaggagtgacgctggcaattyagatatgccaaagaaaagctgtaaagtgatgttgttttatgtatttgaaaatctctttaatgtacggcttcatcaaaggcagctgaatttgcttatctgcctttatccttagtgtatctcagtaaatttggttttggttgaagtaggtaaagaaaaccctgctggcctaatacagatacataggttaaaaagggacgactattttaatagttgttcaggcaattgtggatattcttttttgatgttacaccaaaattccataatttctaatttcttaaagattagttttaatgtggaatctgaaatgataataataagcttgtttgcactcttatattaaaatctattggtctgtcatacattttgagtggatatttatccatacataattttataacatcatgcgttggttatttggaacatattggttcagtgagttatgaagatcttccaaatgttgaaacatttcattatgcaatatgaaaatattacatctgtgaatcttaaccatctcattagaaaagtcttccattattgggaagctgtcaagctcactgtgatagatacaagttttccaaaattctgatttttgcttaaaagcttgcatttgatcattgccaacaaatagtgtcagttgttttccttgaagtgacaggtccacctcatttatttttgtgaaaatgtctacccaatacccaaatttgaataaccatagtttgtctgtcagttgttctttcacgtaaatgaggtattgtgtggagaagcagctagttcaacttgcaactcaatcacgtgtacttttccttgaaatgacagccctacttcagtatgccatggaagcactttatgtgtaccttcattaaaaacataatactttggggttgagatttaataaaattaataatttttaccgcttcaaggacgttattacattggggaacacaataaccactaatatagcttatgctactgtcttgcttcatgctgagatgccagcaatgttatcatttattttttgtgccctatcacttaaatgtcaacacagtgaaaagggttgtaaataacatctgagtgttatgaaaatagcttcaatctctgagactcctcgaagttccctttgggamcttctgctctaggtatgaggatcagtgctcttagcaatttggttggaaagaagagtctttgaagaatgataactgtgagagagaaagtcaaataggtaggtagaggccagagaatgtgctaatgtacttaactgaccttgcttttgttaatgaaacatgagtgatgcttatgagaaaaggaatgccctttgtaaggtagagtttraagaaagtatatctgatattggtggctagaatatgtttgtggggtaaagtgttaatgttgctgaaacaccagaggtttggtctaggacctgctgcttgacgcacagaaagccatttaatgagatgagtattgccaagtaagaaggctttaatcgggtgctgcagctgaggagatgggaaatcagtctcaaatgcatctccccgacacactaaacttaggggtttatatagtagggaagaaatgtaaccacatgtgggaaaacaggaattagggaggtgtaaggaagaggagctggtcaacaggaagcaggtggttggataggcaatcatgataggtgagggtgaggggtctggcatctcattgtccatatgcagcggtcatgtaagtttcagctccttcatgctatctgggaggcttgatggttgagttcctgaaaaaggaactcagctaagacaaaagtaactttttcaagttttaagactgggaggatcaatttctatgtttattcaaagaaaccataaatatcagcactgtgggacaattgggtcagtttcaaaaggaggcaggtgattatgagagttttacagtaatttgtttagattatgaggactggacaagattagtagttttaaaaatagagtggaagtagaggaaaggatgaatctctagaatttagtgattgattggatgtgggtggagagggagtgagtagaatcaaatatgtcagattttcaagttgaagactaagaaaatgttagttttcagaaatagtagagatgggaggaggagctaattgttggagaaagatgatgtgtttgattttagacatgtcagttgagatgatgtgggaataatagccaaggactgacatcctcaagatagagttgtcrtttttagggagaagtcagagagattcagactttgtcacctggacaccaaatttctgcaccctgtctgggactcgtgtatgtcctttattttaaccaagattcagaggggtgatcagatgaggatggggtggaaacatgggtggcttaaacagattgggtgttattagagaactgccttaaaaaacaaaacaaacaaacaaaaacagtgaaatacttataatggtttaaccagtcttcgtttttcctcatcttaaatattaaattcaacttagccatagttctagaaaaatggctagatatctcattcaccaatgaactctcaaatacagtgatgacacatcccatttctctcatttctagttctctacagtaaagtgaaggggccacttgtagaaagacaagcatgcttgagcactcacaaactgatgttcagaatctctgccaagtgagacactcaacagatgtaacctcagtgaaataactgtggccaacaatctagctaagaggctctaaaaccaggcattaaaagcagatccatggcggggcacggtggctcacatctgtaatcccagtatgttgggaggcttaggcaggaggatctcttgaggccaggagttcaacaccagcctgggcaacatagtgagtctctgtttctgttaaaaaaatgtttaagggctggcacggtggctcacacctgtaatccccagtactttgggagggtgaggcaggaggattacttaagtctaggatttcaagaccagcctgggcaacatggcaagaccctgtctctgtaaaattaaaaaattagccagacatagtggcacatgctggcgtcagctacgtaggaggctgaggtaggaggatttaactcaggaagtcgaggctgtagtgagctgtgtttgtgccactgcactgcagcctgggcaacaaagtgagtctgtttcaaaaaaaaaaaaaaattttttttttttaaacattagccagatatagtggcacatacctgtggtcccagctactcaggatgctaaggccagaagatcgcttgaccctggcatttgaaactatgatggtgccactacactccagcctgagcaacagagcaagactctgtctcaaaaaaaagatccatttctgacggatggacttattaatcaacttctcgagaaatactaaagccaaaataagaaacactggagccaaaataagaatctattaatttgttatgagaattaccactctcctaggtgttagatttcttggtactgcatgttcagtgcacattctcaatgccagtgtattattttccaaatagaaataattactcaactgcataggaaacccaagcataagcttgtttgcttggggaacatggtttcagccaaaggggtgttggatgaatcaaatatttaaatggtctcaggctgggatagtctgaggcgcgctgtccttctttcccttgagatgatgctacttgggacctagaatccttgaagtgcattgcctaagagtccctcttcagagaaaagggaatgattgcttttttttttaaggtacttacatttttgatcaatacaatctttcttaagatacagtaatattttccttctttatttctttccctccttccctccctccctccttctctctctccttccttcctttttcctttcttcttttcttttctttttttttttttccggagtcttgctctgtcgccccaggctggagtgtagtggcacaatcttgactcactgcaacctccgcctcccaggttcaagcgattctcctccctcagcttcccgagtagctgggactataggcatgtgccaccacgcctggctaatattttgtatttttagtagagatggggtttcaccatgttagccaggatggtgtcaatctcttgacctcatgatcctgcccacctcaccctcccaaagtgctgggattacaggcatgagtcactgcacccggcccaagatacagtaatattttctactgagttaaagataagtcatactatgtttgggagacatcttatctcactcttactccatttcttggttttgatccattgactgattcaactatcatactttaacttcaagagcaatcttattttcttcatttgcaagtcttggagaaaatctcgttgcagctagtaagtttggcctgtagtctgtctgcatcagaactcctaggtgtttcttttttttttttttgagatgagtcttgctctgttgcccaggctggagtgcagtggcgcgatctcggctcactgcaagctccacctcccaggttcacgccattctccttcctcagcctcccgagtagctgggactacaggcgcccgctaccgtgcccggctaattttttgtaatttttagtagagacggggcttcaccattcacaggatggtcttgatcttctgaccttgtgatctgcctgccttggcctcccaaagtgctgggattacaggtgtgagctaccgcgcccagcctctcctaggtgtttctttaaatgtagatacctgggccctacctgtgccttacagactcagacgcaggtagtgggtctcaggaacctgcattttaacttcctcctctatgcatcatttgagaagcatggctcagattctgacacaggaactgctttagttagggccttctgttgtgtttgaagtgctgtgttcctattataatggatactgatctggctaacatttaacaagaatcacagccttaatgaaaaacrtggaaaacatttattttcttttaaaaaataatattttcttttgtttttgatagaatcaagtagaagtggccaggcatgatggcttatgctgtaatcccagcactttgggaggttgaggcaggaggattgcttgaggccaggagtttgagaccagcctgggcaacataatgagacttcatctctataaaaaataaacaaaaaattagctgggtatgatggcacgtgcctgtagtcccagctactcaggaagctgaggtgggaggatctccttgagccccggaggtcaaggctgcagtgagccaagatcacaccactgcacttcagcctgggagacaaagggtaaccctgtctcaaaaaacatttttgttaaaaaaaaaaaaaaaaaaaaaarrgagagaagagttcttaattgctcctgtgctccagaaattaaactactggaaatctcttctcttgttcttgtccctaaaatggaatttgtgccataagctttactgcactatgaacactgaatatttaaatcccagctgtgctattactaaatggatgattgtggctgagtcacttaacaccatacgtttcctcctctgtcaaatagggttaataatagtctctgccttgtggggtggttgtgatgattaactgaaacaagacatgtggggcacagaacgtagtgattgccatgtagtaagggctcagcaaaaattggattttataaatattctggtatggaaaattaattctcccactgaaggaaaagcacagagagagagtaaaagagggactacgattgtgtacacaaacagaaaataacttcagataagcagcagagtagactagaacaagtaggcaggaagacagtgtttcacaacgtagagatcctgcacatggcaggccggcctatctccatccggccctgtggtttggcttgttcgtcattgcccatgagcctcggtcttacttgaaggggtgaggaaggtgatgggtcctgagggtggtgcagctccctggcctggacatcgggggtcggtcttctgctcgtgatactcctgctcgctggcttcatacttccmgcgttacttccaggggttaccagcgtttccatccagtcatttcacacacctcattgaacaattttccaagtgttggtttgctctcttccttactacatattaatgaggtgtccaagactgctgttcagcacgtatctaaaatgttgtttaactacatcagaaggtaaatctatagctgctgaagcgaactaaaaagctgtgtcaatctggtgcagtggctcacacctgtaatcccagtgctttgggaggctgaggtgggaggatagtttgaggctaggagtttgagaccagcatgggcaacatagaaagaccccccccccatctctaccaaaaataaataaataaataaaattagctaagtgtagtgccgtgcacctttagtaccagctactcgggaggctgaggcagaggatgtcacttgggcccaggtggtcaaggctataattatgccactggcttccagcttgtgcaacagagtgagaccctgtctcttaaaaacaagcaacaaacaaaaaaggcagctgcattgataatcagtcaggtaaagcatcgtcattttcactttcaaaaagttgttctgagtattaagtgttagcaaagatgcttttctctctgtagtatttttagccttaacagttttcactcttaatttcagtgtgagtgtggtgtgtgtggtgtctgtgcgtgagtgtgagagagagagatggggaggaggagggagagtgagagcagtgttctgattgtagaacaccctcacaggtagaattgttataactttctaattgcagaccactctcatagaagattcttaaggaaacctcagcccaccttctgaagggatgagacgagtagcatcttcaagtgaaatgccctctggggtctgaaggttctaaaaaaaatcctagaaaaccaaggaagatggtgaattatggaagaactacccagatgattttcaaagctgtaaattaacaagtgtgtctgttttaggaggagggggtgaaaagtctagggtgtgtgtgtgtgtttttctttcttcttttctctgttcacttgccaaaaacaaacaaaaatgacctcacttcagacacagggataaaagcaggaggaaattgctatagttagaacactataggttttttttccccctgtactttttggatacatatttttaaaaaaataaataggatcacttactctggcctagcacaatttcatctaaagtgttttgaaagttatagtcttaattttagggacagaataggttatcgtaaggggtgtgagggtttttaaatgcaaggcattttccaggggacttttaaaaatcaataccaggaagcaaaataaaaaatttaaaaatcaaaacccagcaaggcacggtggctcacacctgtaatcctagcactttgggaggccaaggcaggcagatttcttgagcccaggagttcgagaccagcctgggcaaaatggtgagatctcatttctacaaaaaaaaaaaaaaaaaaaaagcaaaacacacacacacacaacaaaattagccatgcgtagtggcacacatctgtagttccagctactcaggaggctgagacgaaagttgcagtgagccaagattgcaccactgccctgcaacctgggcaacagagtgaaaccttgcctccaaaaaaaaaaaaaatgaaactcagtccaaaatgaccagaaatctatgtagttagcagagtaaatcttacccctccctgcccccaacccccattcagggtttccttcctttctttttcctccatttgcctccatagagcatatcaacccaatttacaccttcatgagctgtaacctagagtctttgctctgcttggcagaagaggaagagaagatgccacatacagtttggagtaggatgatgacacagtttttaaaatgayggatgcagtttggtatgaaatgaatcactgtttaatctgtgttactttgctcatatggacacacttggactcagcacccacttcctgtgcaatggcatatttggtctgggttacgttggggtgaagcatttcccccatgagcttgccacaactccatcaagaagccttctggaagtgcgaaaggtttggaatggtaggctgtggaaatcctgagctgtttgctgagtttctccctgccttcctccctttctcctttcttgtgtgtgtgaaaagcggttatggcacagtgtctttcatgagaaatgattggcttgggatgaatctcaccactcctttctggcacttttgcaaaaaagaacactttttttcacggtagacaccggatacaactggaatattcttctgatgtccaacaacagctggagagagaaagagagagagagacaagaggggaggggagaaagagagagggagagagaagaaagagagaaagcctatagcacctggtattctcatggtggtctcccatccaagttctaactagacctgaccctgcttagcttcccacatcagatgagatctggcaagttcagggttttatggccatagaccccttccactttaaagctgagtaattaatattccactgtctgtatataccacgttttgcttattcagtcatctatggatggacacttgggtggtttccacattgtatcactcccgcttttgagaacccttgtggagcagcaacccaggtatcatttaataaaaggctcctctctataagttttagcgttttatatgtactctttagttttcttcttttctttcccagttgagcagacagtttattgaagatctctttgaggcccagagttgcttttcctgaatacccagtgattgttatcttgctgccattggattaggaagtctggtttgcaatatttaatctatgaatatgttgtctgcgacactgcccctaaacaaacacattccccttccgacgaggctcggatgacacagagatcagcttaaagcttgggacagcgagacctggactcagtagggggctgtatcagtctgtgcagtgcatgcacctctgcacatcatgataaattgtttattggagtacagtagagaataaataaccaaacaagcaaattaacaaagcaaataggtagctagtttggaaaactggccacatctgggatggatttgggaaaaaaaaaatgtagtttctccttctactcaagggaaattaaaaactcttgcattttattgatttcctctaagctcatctgcacattgtttttacaaaagctaagtggtgacataaagcccataattttgggaggcatagatttttagatgcagagattttggttttgctcccaggaaatgaacgttttctgcagaggaggcatctacctctggaagccatttctcatgttcaatctagtgtgatcagtgaccagttgagggggaaaaccattctctctgagctttgcttggcttttccttttgccaccaagccactgaaaagtataggaagaggcaaggcatcgcaacatgggatagcygcctcctatacgagactgttaatactgtgtatcagtaagtgaggtggaagagggagttaggttatcagtttgtttctcacccactttatgaacattgcaaattctagaaaaaaagtactctggggccaggcgcagtggctcacacctgtaatcctcactcttgggagaccaaggcgggtggatcacgtgaagtcaggagttcaagaccagcctggccaacatggtgaaaccctcgtctctactaaaaaattatctgagtgcggtggtgcataccagtaatcccagctacttgggaggctgaggcaggagaattgcttgaacccgggaagcggaggctgcagtgagccaagatcatgccactgcactccagcctgggtgacagagtgagtgagactctgtctcaaaaaaaaaaaagactttggattgcaaatgaaaactcattatttatttatcattcgtcacagtaatattaattatatttataccgcatagtagcccctggcttttttttttttttgagacagtcttttttttttttttttttgagacggagtctcgctctgtcgcccaggctggagtgcagtggcacgatcttggctcacttcaatctccgcctcctgggttcaagtgattctcctgcctcagcctcccgagtagctgggattacaggcacccaccaccatgcctggctaatttttttgtatttttagtaaagacaaggtttcaccattttggccagactggtctcgaactcctgaccttaggtgatccgcctgcctccacctcccaaagtgctgggattacagggcatgagccaccattcctggcctagcccctggcattttaaaacaaaacagtgggttgttgggaagtagtaaactttaattaacttgaattcaagtacatatgcatcaaaataaagacttccagcacaagtgcaatgggaataacacatttgggttaagtctggatctggtgctgttgggattgtgtgtggctttgatatgactttggaattcttgtgacagaattggctttgagttatccttggggcatagtcacttagtcatggtgaccatttgtttctcaccatatgaacagtctgatcatttccattatctcatttagttcacaaaataatcctgcttgtaattattcgtatatttcagacaaggacagcgaggtttkgagagatcaattttatctggtgaacactaatgtttgaatataaaaatctcattttaatatggtggaagaccatgaaatcttagcattcgagggaccttaacttttatttacccttctctcctttctaattcccttstgctccattctagagaggtgaccattcaacacatgcttaggatgaatcygctagattcttagagagaggcttaatagctcacagaatcatttatagtttaaaagagttctagaaacagggcactcacaaacatgatggtacatatctacttaccgaagctcttctgccttttccattttgtggccatcaaccagaaccctcatgagaattctcacgtcctagttcggagagttagacacacagagactgtgtgcagtccttcattttgcagaaaagatgactatctaattttaaatacatttcaaagagttagccattggattgaaaggtcaaatctaaaaaaaaatgaaatatgaaatagaccatcttatcctttaggcacaaatcaatacttaaagagaacgaggcacattaaaatgaagaataggttcagtataatttgtaatcaaaccgtcaaaccttcccgctgatgattgtgtaactttacattttaaaaattgctaaactgagaaagaaaacaacttctgccaaatgctgaagtatgttttgtgcctgttaagttttaaataaatcttttaaactttggcaggaaatcagatatctgagtaataaaagaaatttattattattttgatgatatgcttagtatcatattgtttaactttgaaccctttcttttaaagtgagtaaaatggcaagctgtggaaaagagttaaaatttttacctactacttctcttaaggataatagtaatttcttaagagacactaatttaattttcctcctatactgtgcaaaaagaaatgtcctggtccttttaactgatrtgatttttggctttgctttaaattattgattacattttaaaaggggagggactttctgatgagaatagcactctctttaatagcctttcacaaaatcaatttcccccattcctgtcgtactcctttgccgtattgacggttaagaaccttggaaagaatctttgtttcctaaatttatcttaataatttttcattattttacacctgcatgtttattcaagcaatttgaaataaagatctttttgaatgatttcttcagtgctttcaygagggctgtgtaagggactttgctatttaggtggcactcatgagtgatggattaatgcagtagattccaggaccagatgtccctgtttctagatctcagctcttgaatggagtaagtcagatcctgcatcagtgtctttcaaactggaggcagttcagtatgaacacatttttcctagtggcctcgttcccagctcatccagacaaggaagcattgataccatttgcacgtggaacttcagcaatgtaatgtccaggcaaatgagtatgtgtgcattatgtgtactctcccacacaaaatctgattctacttgggctaattcactaaattcttgtttacacatgaagctgtttattttgctttgaatgggaagctgttttggagtcatgtgaagaaggatagaaaactactgagaaatgtagctcaaaaacctggaggatgctggtagcagatgagttgggagtggattgcatggtgacaaccagagagcgtaagtagtctcttattacgtacagtatttcattggttatatcttgcttctggattgttttggaatttttttagccttactattttattagactggcaggggaatcataaatggaggaaataaataattttgagttgatggagtagcttgagaagattgtctcaaattcaagtttttggctttcttgtgtggtcaggtattgaagtttgaaaattgtgatctgtggagcttaaaggtttttcaaatagaactaggagcccttacaaaacttctcttttgttatttatgtgtcacttatttcttctctgggacaacctattaccggagttgaaaaagtctgtacttaagataatttggatcagcaagcttattatcagtgatgtttttcttgcccaatttgacctatatctagaaatgctttgctcaactttctagaaattactgatactcatctttttccccagctttgttctaactcaaatttggataattttgtgtcattatctttctgttgttttaatacttagagagttggtgtggtgaaattgcaacagaataaaaaaatactattttaatttcagtgtttctggtaagaaatctgcctttactaatgactgaaatggacctggtttttgttttcccctttattacagtttgtggattagtcrgtgtattgaacatgaaattcaatataactaaagtgggttttaaaagataatgaaatcaatactaacgtgaaaagacttgtcttcatcagagccaccccacaattggccctgtgctctctgttkctgcatacttaggtcctacagttcttcatgtaaccgcmtgaaaagctctacttttctactaagaataaataatcctgctgaaatggaccataggtaactcaattaaacatagcttcctaccactgggttgtttaattatttttcaataattaaatagatagattgaaattttattaatttattaactgcattttttttttaagaaaagacatactcattgaagacaaagttaggaaacatagataaacgtaaaatttaaagtcatctggggctggacacagtggctcacgcctgtaatcccaacacgttggaggctgaggcaagaggatcatgtgaacccagragtctgagaccagcctgggcaatatggtgaaaccccatctctacaaaaaaaaaaattagctgggtgtggtggtgccttgtagttctaactacttgagaggttgagatgagagaatcacttgarccacgaggttgaggctgcagtgagccatgatcacaccactgcactacagcctgggcaagagagtgagaccctgtctcaaaaaaaaaatcatctgtaactacaacagagatcaaaactgttatgtaaatgctaaatacggtgttcaccaagagggtgtgatttaaaaaaatatctagtaccacgtatttttaaaattaatttcatgtactccccacaacatgagaactggggtatgtcagcctctttatgcaaactattctttaccaaaaaataaataaataaataagaataagcaatgcactgaattcccagctttgtctgggcagtttttctttgcccctttgctacttgttagctgttactccactccttgagggttccaggggcctagatagctctagaagaacgcttatcactccatggtgaaccagaaaaccatttctggcctgtattcttttcacagaataaaatgttcttgagtgggagtgtcagggaatttggcctccctgacctccctgaccccccacccttcctttctttggtggaggagttcctttggccagggaccacttaacttctttcaaaatcccaaaattgttgcttattttccatgatcaacttctgtttttctcagaaattaagtcctttaagttccctgaaaggtagaaggaagactctgaactcactcaaaaggtaaccgactctgggctcagtcacatgaacttttgtaagacacacaaatgttaacgatccagacactggccagcttcccaggagwgcagctcctggcatttcatccatgacaaccattgccctgcttctactgagaaagggtwtctgtgtctgtgtcgtacagtatgtatactgatgagccctcagcttccaaacctcatccggccatcccttgcacaggtagttgtgcactgctgctttcttttgcttctaaagatcaaaaccaagttttgcatagtctgaggattagtccacccccagcactttaaccagatggttgctgacratggattctctttggatcatttaattaaccattgaactcactagcagttttgcaattacaaatttttttcccttacaagaaacctcatgattcagggatcaaaaacaccatagtttaaaaraagttaggcacaatggctcacgcctgtatccccagcactttgggaggccgaggcgggaggaacacttgagttcaggatttcgagaccagcttggccgacgtgtggaaccccgtctttaccaaaaatacaaaaattagcggggtatggtggcatgcacctgtagtcacagctagccaggaggctgaggcaggagaattgcttraatgcaggatgttgaggttgcagtgagtagaggtggcaccattgcactccagcctgggcaacagagtgagactccgtctttaaaaaaaaaaaagtcataattaacaggactcttcgttaagaaacttggactccctgtgacattgtactaagtcagctttagctgttttgtccactactgagagaaataatatttacctacctcctagaatgatasggaagagaatttctgtgaaatatctgctatttcccaatattttacatttaaattataaaaatgtgcatttcattcttttttcgagaaacagtactcttcagaatatggatgtgagggtagattactgtaagaacacttttaaatcatctttgctctggtgtctgttctgaagggagaatgaatagtgtgatggttaagagcacaggccgtggagcaagactgcctgggcttgaatcccagcaccaccatttatttctatgaaccgaggcaagtcactttgcctccctgttcctcatttccctggactgtgaaatggcgaattttgagaattaaatgagtaatagacatgaagtacttagaacagcatctagttaattcatggtamrtgctcaataaaatgtcagctgcttagtattttcatagccccaaatctaggtaatgggtcccccatgtctgccttcatacttatccaccttcaccctgcaggtcaggctagaagggcatgacaaagggccatcgcagttccctagagaggacagagtgactccttaaagtccaggtacatggcaggagcctgtcacatgttgagggggaatggtttgctacttttgtacttgctgcatttggataagtgaaaggacttttggaactctgatattctttttttttttgagacagggtctctgttgcccaggctggtgtgcagtggcgtgatcacagctmactgcaacctcaacttcccaggctcaagtgatcctcccgcctcagcctcacaagtagctgggactagaggtgtgtatcacctctaatttttgtgtttttggtagagaccagctaatttttgtatttttggtagagacggggtttcactgtggtccccaggctggtcttgaactcctgagctcaagcaatccacctgccttgacctcccaagggttttgctacattgggagctggttttgctacattgcccaggctggtctctggtctcaaattctttctttctttctttctttctttctttctttctttctttctttctttctttctttcctttccttccttccttccttccttccttccttccttccttccttccttccttccttccttccttccttctttcttttctttccttccttccttccttccttccttccttccttctttctttctttctttctttctttctttctttccttttttttgagacagagtttcactcttgttgcccaggctggagtgcaatggtgtgacctcggctcactgcaacctccacctcctgggttcaagcgatttttacgcctcagcctcccaagtagctgggattacaggcatgtgctaccacgcccaactaatttttgtatttttagtagagatggggtttcaccatgttggccaggctggtctcgaactcctgactcaaatgatcctcccttctcggcctcccaaagtgctgggattacaggcaggagccactgcrcctggcctggtctcaaattcttacgctcgagaaaccctactgccttggcctctcaaagtgctgggatgcattagccrctgtgcctggcaagttgaatggcattttaaggcatattccactttactgcttgttctgcgtataggagaagcatagcccccaaacaagaatgtaactgctgcagtggaagaattacaggggctccaattggagtgagtatgggcagaccacatgaggtacatcatcatggtggcctcattgtctgttggtagcagagaccatgcatacaacccaaatgaactaatcacagacctttgtgaagtggaatttttttccttaatgtgtttgcatattgctgtcactacgaagtcattttatctttaatgcttaattatctgtactaatggaggagaatattagtggggaaaatgtaacaacactgattcattttcagcttcccaatcaacatcagtagattttacatcattctggattcgaattaattctggcttgctctgtctctttttttttttgagacagggtctcactctgtcgccaggccagagtacartggtgcgatctcagctcactgtaaacctccacttgcctcagcctcccaagtagctggaactacagtcgtgtgctaccacatccagctaattttcgtatttttagtggagatggggttttaccatgttggccaggatggtctcaatctcttgacctcgtgatccgcccgcctcagcctcccaaagctaattctgattctctttcttgctaaccctagcactataaacaagttacttggcctcatgttcttcatttataaaaggatgggcttggccaaggtagattgttggcttgcagatttagtgtgcagaagattcagtgtgttataaatgtgcattccctgagtctcatcccagagagattctgattcagcggggtctttaattgggcccaagaatcttcattgttaacaagaatttctaaatgaatctaatgcaggtggttctctcatcccacttcaagaaacttacttgaaatatctcctagtcaagaaaagagattggaagctggaatagatttgagaaaaagcctgagttggggaaatagtgcctttggacatttcttattgccttctttggtccttatacccaaagctatacaattcaaatttcattttrtgcccatgtgcagcagttaagccttgagaccacaagcacaattcattagattgcacaaaataaagaagagatctatctaactttagggctataatttctactgtttttgacactgtcccaaactttcccctccttggtattatgcatccttgaaacaaacagttgtacccaagttggacactcattggctctgcagtgccccctcgtgggtcctgtgtgggcattcttccttttctctcatgcccatagtgggttggctacygctgctctctccagccagagttgtagaaaagtaaatgaatccaaagtggatgcaaaagaaataatgaggagatggggaatcctttccagaaatgcatgaactagaaaagactaagaaagttccagctagggccaggcgcagtggctcatgactgtaatcccagcacttcgggaggccaaggtgagtggattgcctgagctcaggagttcgagaccagtctgggcaacatagtgaaacaccttctgtactaaaaatccagaaagtcagccaggcgtggcagcgtgcgcctgtagtcccaactactcaggaggctgaggcaggagaattgcttgaaccgaggaggcggaggttgcagtgagccgagatcatgccactgcactccagcctgggtgacagagtgagactccgtctccaaaagaaaagaaaattccagctagtggtgaaataggcaagtagttcctggttttgttccaaaaaacctaggtgtcttatattagttttctattgccgcataacaaataatgacacatgtagcagcttaaaacaacgtccatagcttctgtgtgtcagaactctgaatatggatgagctgcatgctctgttgggagtctcaccaggttgaaatcaagagctcagccttgactgtgatctcttctgagacatggggtcctcttccaagcacacttgtcggcagaattcatttccttggggttgtgtgatgaggtccctgttttcttgctagatataagccaggctcactttccatccccagaggctgccctttggtccttgctgtgtggcctccttttgtacatggcagtttacttcttcagggccagcatgggaatatctgctgctgcttctctcttaggagcttgcctgattaggtcaggcccatccagaatacagaatagtctctttttaaattagaacaaaaacagttgactatggatcttaattaaatatgtaaaatcctttgaagctcagaattcagagataaaaataagtaaataaatacgtaaaatcccttcaccttacaatgcaacataatcacaataggatatttctaggtcttgcctatagttgggggagggaactgttcagagcatgtgcatcaggatgcaggaatcttagggccatcttagaattcttttatgtgtccaaagattgtctgttgtatgttggacatcaagtcttttagttgctagcaactccataaaaatattaatttctagagatctcaaattaattgtacagattctattatacagcttttttgagacatgttgttaagcagaaaaaagtatatagccttccttccagattcttaaactagagagtgttagaaaaactcagagctcatcaagttacccgaactcattgtgcagatgagaaaccatctcagtggaagaaacttcccaaggtcatggagccaggaaaggctgagaatcctttggctccagtattagggccttttctatcattacttttcctgtgtatctcatagttttcttttaaaaaaaaaatcatgagttccaagtactcttattaatctgcagttcattgactttaatgagcaattttttttgtttcccgtaattgtattgaattagaacatttttcatctaatgtgtatacgaattagttactaactgaaatggaatcttggagaaaatgagcttttgcttgtttatttgtaagtataaaatcttcataattttcatgatgactcmtatggtcaaggaactgtggaactgaggatagggataggaaggaaccacagaaagcttatatgatccagctaccttgcaaaaaacccttttcgtgattgacggttggattgacatttgttaagtaattttccacgcttttttttcccaaggaaaatattcaggaatgcttgatttaaaaaaaatactaatttaattataaatatgattgaatatttttctctttttttctagagtaaaatcttgttgataagacagtgtttttctctagtggtttgtattcaggcttcctcttcagtctcactaaatggcctcacaggtgggtagatgcatttgtcttgaaaggtgactgttaccaaatacaaatcttgtagatgcacatttatcttgaaaagtgactgttaccaaataaaaatttaagttatatctcagcatggagaccacggctctggtcaggtaggagccaaatgtccttagcctgaatgtgtgactagaagaatatgtgacttagtccagtttcatagctgcctgatttggggcaagcttgctgacttgggtctgggcaccacatctttgacagttgtcaagtatgctgtgggctaaatacccaaggttaagaaaacaatccaggcataggctatttctggccaccctttcttccatcttctatatgagcaccttgttgtaggtacaaaagagaacatttctattatatttacacgagagttgctgaaccatttttccactgcttctaccatgaagcctctgattgcctgccacatcactatgtcacaccctcctgagccttggagctggagtttgtgttttacattctatcttatatgaaactcctgtgcacatttgttttatctccattagaactaaggctctttgaggtgacagcaatgtctccagtgtctttctggtgatcatttttatatctgtcacacactgtagtcattcctagcctcggacctcttgggaatcaggtgatatttcagtctgtatgtacaccatgtgttttatatgtgtgtgactctttttcaaatattaatatatatagacgctcttgagactattaaaacacaagtttctttaaaagtttattgagaccaggtgcagtggctcacacctgtaaacccagcactttgggaggccgaagtgggrggatcacctgaggtcagaaattcgagaccagcttggccaacatggcgaaactctgtctttactaaaaatacaaaaattagttgggtgtggtagtgggtgccggtaatcccagctacttgggaggctgtagcatgagaatcgcttgaacctgggagttggagattgcagtgagctgagattatgccagtgcacagctggggagacaagagcaaaactccgtcttaaaaaaaaaaaaaacaactatattgaattcattacagtatggttcttttcttaattagtatttactaagaataaaataaaagacacctacatgcttccatgttgagagccactgcccttcagcatctagcaaggtgctttgcattttgagatatttcctcatctcaagccttctttggctctgtgtttcttctgtgaggtatgtgaagaagatggacagtgcatttcctttgtatcagtaataaccatttcagttctttaataatttgaatgaaaatctatttttttttgagacaaagtctctgtcaccaggctggagtgcagtggctcaatcatagctcactgtagcctcgacctcctgggctcaagtgatcctcccacctcagcctcccaagtatctgagaccactgccatgagccatcatgctcagctaattttttttattttttataggatggggtctcactatgttgcccatgttgctcaggctgatctcaaactcctaggctcaagctaatcctcctgccttggcctcccaaagtgctggaattacaggcatgagccaccttgccccatctgaataaayaggaaattaatgttcacttccagccctagactggaagctcctgagccccagtgctgtgtctgtttaggatctattgcttaacagattgatgaccctcacataggaagttcagtacacattagtggtcagaggctccatgatcacagctgttaagtgtttttaactgctgtttaatctctaggcactttactaatttttaaaagttggaaattcctatggtaatatgattcccaaagaaaggtctccagtcycttaactaaaagatttagaataccttagctaaccttagagttaaagcaaaatgtctgccccctggtgtcagatcaacaactagcatcttagctaattctcatagtgagttccattaattatatgatttagtttttacagtaaattatacattgcacataaaattaaaaataagcaccattttaaacttgccactcgctgctatgaaactgggatttttggcttatattcaacattgttggtttttttcatgtctaaataataatttgaaattaaagtctaattttagtaaattttctatatgctattaactctgtagcactgaattttatagaggagagaaataatgaaggttttatgtgaaacaaaaatagccttaaacattattaatattttatgagtttgtataaatcttcatactgcagatagttttcctaatatttttggccagaaagaaggataaaaattcatttaataaaagtctttgaatatttccatatttctatattgtgtggggaaaaaaagaaaaaaaaagcatttgagtaatgtaaatttactggtttggattaaatgagaatgaargtattcatgagagtccctagaatcagttaatccaagtcctgggttaagaaataagaaatcagtagagaatttgttctctgtttttgtagagaatgaggtttatataggggaaagtagagtggttgttgtgtgtgtgtgtgtgtgtgtgtgtgtgtgtgtgtgttttcttactacatttaaattctttatttacctgaaagctgtttgtgtgcactgtagggaaggcatcatgacgtgatggttctcttgctaggccaactctaagattatatgagataaagcatgtggagtatttcatacagtgcctggggcagtaaggactcataaatgttagaagaggaagatatttattaataacgtgcagcatgtaccagggattgtgctaatgatacgtccatgaggtttatagcctcaaggagctgaaattctattgcagaagtcagacaataattaaacacaaaattagacaaaaatggttgtgattagtactcaacatagaaaagcactgtggtgcaggggagtgaggggagaactggattagtaatttgaagccaaaaaaagggtgaaagccttttgagaaaccaaagatagattccctgttgtccatatactggaacacgttcaattcacttattgaagactctctgggcccttactcaaggcctgtttactcggatttatgtacatttctaacatggtttcatagttgacaagacattatttgcagtgggttagaagagagtggatggtgggaggacggatcagcagaaaaaataagctgatagaaccaagccctctggtattagggagtgatagcctagcattggggtggggaggaaggagagggacccagaccaaaccctaaatgctgaaaggacatgtcagttagcagtggtagagacaaagggttgaagtgtctcttgttgtagcagttagcagttgtagcagaaattggagaatattctgcacatttgggataaaaggggtatgtaagtaaaatcatgttttgagcactttttttaataaagcagagaaatgatcaatgagcatcaatgcacatgcccctcggcatttgtaatgtaaggttgctttggctccactagaaatgtgagttccttaaaggcagcgactgtatgccattcttactgtgtattctcagaatttatgttagaatccagcccaaagtagtgagtcgttcagtagatattctctgatcatgttagattaaagaggtttacttctccagacagatcttcatggagatattggaattagatatgcctgaaattggatgtataggcaagctgtaagttcagcatcccttcttataattctataacagagaagtggttaggcaacttctgttcttttagtctctgtttactataataaaactataaatctttctcctyttaaaaaagtagctgtatatgccatttattaactggtttactgatttgttggtctgtttgagcacacatgtattgctccttctgtgtccttggccctgggctaaaacctgagagtatagtgtggtgaagatttctccctaccctcaaacagttctggtatctctgagtacattcactatattaataagttgaattgtgtccgcccagaaagatacattgaagasctaacctctggtacctataagtctgacattatgtaggaagagagtcattgcacctgtaatcaagttaaggtaaggtcattagagtggtcctaatccaatatttagtggtgttcttagaagaggaaatttggctgggtgcagtggctcatacctgtaatcccagcacttttggaggccaaggtgggtggatcacaaggtcaggagttcgagaccagcctgaccaccgtaatgaaaccccgtctctactaaaaatacaaaaaaattagccaggtgtggtggcgcgtgcctgtaatcccagctactcggaaggctgaggcaggataattgcttgaacttggggggcggaggttgcagtgagccgagatcgcrccactgcactccaacctgggcgacagagtgagactctgtctggaaaaaaaaaaaaaaaaggaaatttggagacagacacacacacagaagaaagagaatgccaggtgaatccagaggaagatggatatgtgaagacaggcagagattgcagttgtgctgccacaaaccaaggaatgtctgggactaccagaagctcaaagcagcaaggaagaatccctccttaatggttttgcaggggagcatggccctgccaacaccttgattttagactttttgccttcaaaactatggaacgatagatttctgttgttttaaaccactcagtttgtgatactttggtacagcagccctaggaaataaatacaactgtaatacatttctgtgtgaatcagagacctggtgggaaataggtgatgactccagtgagacacaggggtgagagcacacttaagaaaaacttccaaggtatggggaaggcttctagggttggcagcggcaggttttcattagcacgtccaggcctgaagggctaagtcaagagaaagttcttggaacccaggtagagctagattgacacctgtgaatttgagaagatggcctgactagtccaggctaacttgtgccatggtagagaggaagctggggtgttaatatcctgaccttcttttcccaggctctctgatcacttgctgagcctcttattggtcgaacctgccaagagagctcattgatgtagtccatagagtttacctcaggatacacagcagggtggaaaagagggagggtcgatctggaagggaaattggagaatattctgcacatttgggataaaaggggtatgtatatgtcattcaaatatatgtttatgggaaggaaagaatctaatgtgtaagacagtgtttattgtacataccactggttctcaacaaatacttctgattaaggatataaaatatctagaaatgtttatgttgcagtctaagattyaaggctgtggaattcatttagcaaattcttattaagcactcactgtagtgccaaatcttagacaggccctggggataagtactgagcaaaattgactctatcctttgccttcattgagctaatagtctaatgtcaccaactgtattcactagggttaaaacttcatgggattcgttacttctctcatgacacwcaatgtaactggaaattactaactggattccactcttcacctgtggactgcaagctttgtgaagtcagcagtgtggttgcctctgtttacttctaacayctagttcaatgcctggttcctggcacatgtgcattgaatgaactgatgaatgaatacatgaatgaatgaatgagtgccttgtatttactatttaggagtttctgaaaattagtggatgacttaaagtatataaaagtggacaaattaaatatattagggattttgctattttatttatttatttattattattwttttttttttgagatggagtctcgctctgtcgcccaggctggagygcagtggcgccatctcggctcactgcaagctctgcctcccgggttcatgccattctcctgcctcagcctcccgagtagctgggattacaggcgcccgccaccacgcctggctaattttttgtatttttagtggagacggggtttcaccttgttagccaggatggtctccatctcctgaccctgtgatccacccacctcggcctcccaaagtgctgggattacaagcatgagccaccacagccggccaggattttgctattttaaaggattgttggattaatcctgtataaaattgagcagtaaaaatagtctataatttatctaagtgtggatttttatttgtgggaattttattttttgttgagagcacttttgttcgattttagagattgaaaccaaatattatattttagttttctctggtcactcttcttatgaattaattgtcccgtaaggatacgcgctaaagttgaagctcaaatctgaacatgaaaggattcattatgcactataggcttttcatacctattaataagtcaatggtttgaatgtagatcaagaatttaagggattactttcactaattttaatgttaaagcaaaatatctgccacctggtgtcagattaagactcaaaaggtgtcaaaagaaggggatatatgataggttttctttctctacttttgaaacattttctagtactaaattagagatattaactccttcaggcctcttaagttctattgctaaatagagatcagtgctcctttgatgaccatataaggaaaacgtttctgggaaaaatattgcagaagccatgagcggttatgttatctaatagcctcagaatgggaaaatttaaagagaatggaaagcagctgacttaaccattttcccagagaaagctcctcctgcttctgcataaagatgtatartgtaatccttagagatctcacttcaattattgtgtcctttattcgaatgaataagtagagaatttagtttttgcacttgtcagtactataacatgccttctcagcttaaaagtaatggaggaaattacttgtaaaaaaattaatgaaagagatgaaagataagagaattcaggtttaaaaagtcactggtttgtttctcagtatgtttaaattttaggattaattttttttcttcctcctagagttcgagtctcataagaaagaatygtgttaatagcccccgttatgttttgctggagtttatcagtcggtagaaatctactgagcaataagaagatgtttcatagccttggtataggaatcattgcgagcttgaaggttcacccatactaggaacttctaaggttacaagtatgtatgaaggaaaatgcttcttctcttgagacataaactgtaaataaatggcacagtcagaaggggactgtttagttattggaccttggagaattcttagaagacataggggcaaatgtatatgtactgtctgagagagaggaagccctccaatgtttgggaagggacagtctttggttttgctggacttaaggtgatggtttgcctgggactgaggggtttcctggcttgtgggacttgcagtgctaaaactggccaggttccaggaaacgagggcagtgggttacccttaactaacgtgacctgctcattgcaggtcacttagtgtgcctggcctctacctaccagtggtgcstcattgtgggaacccatcactcccatacattttcatgtgtcccgagataggaagtacccctcgggagaactactctgagtctagcccgtggtgtcagagcattctagtctcactggcaagaccattgctgaagtagaatggatgcatgaagctgtcttcagtcttaaaacaaacaaaacccaaatgcagttagtttaaatgcctttggttcaaaaaaaaaggaggagtggggagaggttgcaatgttaatctaaaatcaatgcttggaaaaaatgaggaaattgattctgaggagaatgagaaaaaaaatgagattgaaaccatactaaacggggcatcgagtgcagtgccatgcgaagggaagtctttcattttgttcataaacgtttaagtcaagttctcacttattcatgatccttattaaggagtaattagtggttcccatataatcttcaaattaatttatatagtcatgccaagatgtccaacttttagaagatttgggagggtaggaggattaagggacttccaggataatgggccctcatccctcttccccatctcctttgaataaacggttgcttcctaatgagaaaacaatcctgtagaagggatgaggatgagggcagaaaaaagatggatcccctctgacgtaggcaggtttagggtaatatcaatacatgtaagggcaggatatgttttgaaaaatccctgactaattacagggctgttatacagcacttaagtatgtgttatcattatatgtgaagaatatagatgcaagcacaattttattgattgaaaaagcccagcctgattctattacttaaagggattttaaagakattatattgggtaaccttgggttgaaacatgttccctttacaatccaaaactggtcaatgtattctttatttaacctgattgattcttgtcctctccctttaaacataagcttgttcacagagatacagctggaagtcatgttgtcatgacaacagttacacgctgggaggaaggactctttaaaacatccagggactgggtttttaatcactgatttatattgatagcaaaattaaatggggatgcagaattcataattatatgttactttggctccatattttcacttattgacatgtaatttttgaacacgttaggataaatagctttttacacttatacaatttcatctcatctgttgtctatgttgtcagtaataataatctgaaaacatatggatttccctgctccaaactcttgatagcattgtgttgcctgtataataaattctaaactcatgaatgtggtacatacagtcctgcaaaaaacagcttccacttttcattagattttcttcttaaaagcatttattatggatctcacacatgtaacttcagggtccttaacttcagggtgtaggagctaaaggaggtggrtgtgtcacactagaaactataatgctaagttgaaatttgccctgaataatttgtctctaaatggagatggtagtacagagatgtattagtctgttttcacactgctgaaaaagacatatctgagactgggtagttgataaagaaaaagaggtttagtggactcacagttccatgtggctggggaggcctcacaatcatggtggaaggcgaaagacacgtcttacatgacagcaggcaagagagaatgagagccaagcgaaaggagaaatcccttataaaaccaccagaccttgtgagacttactgaccaccatgagaacagtatgggggaaacctcccccatgattcaattaactcccaccaggtccctcccagaacatgtgggaattatgagagctacaattcaagatgaggtttgggtggggacacagccaaaccatatcaagagaggaacaggtttatttcaacagtgggtgattaggaaaagttttgtggaggaagtgacccttgaagaatgaacaagttttagtgtcagatagaaaaacaggagattccagcccataggaccagcaaaggcacagggatacagatatgtaaggcatgttgtgagaccagtgagtgtccatttggatactggattggaatggggcataaggaaatgagatggcaaagagaggagaagccatattgaagagggcattgcatgcagtgccattctaaaggaaatcttactttgcacaggaagaggaacaagaattggttgaaatggatgttcatgagaaattaatagctgtagtatgattagaggaagcactgtagtcacaacaagcagtcataaagccagttttgaatccaagcgaggccctggaaagtgtagactgaggcactgttaaggaggttagcaagcagagcatgcatctacgagcactgtacttttctggagtcagtttctgaaatacaattttatatattgactaataggtactcaggaacataggttctggtatatgactgcctggctcaaatcccagcctactgttactagctctgggaccgtagtcagttacttccctcctctgtttctgctgtaaaatggggagaagatgacaccaaccttaaagggctgctgatacacagtaagtgcttagaacaacagtgcctggcacactgtcagaacttcagtaaatgttagtgtggctgctgctgttgatgaaatgtgaaaacactgctcagtgtttggcactttttatgctttttaaaagctatctcaagaatgtaaattatcggactctatttctacccagcatctcagcctacccctctaaaagccctcccttccacttgatgggtagctgttgtctaaccattatgtcccaggcactgtgcttagtgctaggggtacaaatgtcacaggatccttggaggtgtagctcttctggcatgaaacctctggctggttgcacctttgcccgagttttgctcgggcctgctgggctcattccacccacttggcctgggagactgcactcggctcackcttctagcctggatcccacacctgccaaaagtgagccagacacgagtggcaagggctgtgtgagtgagcatggggtccggccactgcacacagccaggcatacctagctgtggtggggcaggcagctccaggtgctggcatgggtactggctccctgtgaggctgtggctggaccaggcatactgcaagtaacttccatggctggcaccagtaaacgcatcggtgcccagaagcttggagatgccaggaaccacagagccccaaagagggagtcatagccctggctcagggagctcctaggcctgggctccccaaaaggctgcagytctttttctcatygcctgcaacgtggcaagcaaggggcgtgtttcaaccctgtttgtgttacagctctttcagccctgccattctgcaggtcccgagttcttgtcctacgtccaggaagaatgaggtatgcagacaagtagagggtgagcaaggtgaagaggtgctttattgagtgacagaacagctcagaggagacccacagtaggtagctcctctccacagccaggtcatcctgttgtctgcccagctctcagcagagaggaaacccactgggttagcgcctctccacaggcaggtgatcccatcatctgcctgagtctggctgaacctggggtttttatgggcttcagaggggaggaagtgcatgctgactggtccatgagtgaccatgggcaggcctaaaaaagcaccataaattctcaccctggtccatggaactggcagcccagcccctaggcctctggttgtccctggcctgaaggtgcggtttcactgtggacctgamcctttctgcccaggagcctatctgcctcctgccgccattaacctgccattcacagtgcccatggtgcccaggctgttcatgctgaggggtgcctgcagacctgtgccgagccacccttaacctcccctcagcctctctgctgtgcttgttggtgcccaaagtttggagggggctgaggcagcagggggctggtatgccagcactgcctcaagcacgcacatgcccatccaggttgtgacagtgcccaggctcagccacaactgctccaaaattggagtggggagaggccaggcagcaggaacaggcacttctgagcctgcaggggcagggggctttctaggcccccaagagtacagagatgcctgggtccacattagcagctgggtggctgtagctgcgcccaggagggtagtgcccccctccctccaacttggaaggtggggcagcattcacctgttcccaactccctctggctggtggagtccacagccctggccatgcctcctccactgcagccagcatcatagcagcactccagatgggctaccgctgccatcacaaagacgaaaatgcaaggatcttgtcataaaagagtgtggcagcctttactacatagcagttcgtgcatacaaaggagtgtgaggaaaatagtacacatgtgacagagagaaagaacgaggggggaggaattactgaatatataatctctaaattgttaatacaaaggtcattttgattataaaaacacctcccagtagtagatgcttaagtcacatatttgtgcatctatattggtaaattatcagttttttccaatttaaatcatagtttcagtatgagttatattaggatattctttgtgtttagtttcaaggattggacttgaatttctaaagaacagcattaattctagagaagggtaaaagtgttgaaagtgagagcagtagaacgttaygagtgcttcaaaattgttggccattccttacctagaattttaatatttaattcagaacaagttttgtatccttccagtcatgggaccacatgatgttttccaggaccttccaatttgaggctccaaataaattttataaaaagaatctctcttgaacctctggctcactggaagcctctaaaatactgccattcattagaaatacaatgtgagccacatccctaatgttaaatatttaatagccacattcaaataagtaaaaagcaatagacgaggttaattttaatcatctattttatttaactcaatatataaaaaatatcattttgacatagaatccatataaatattattattttatatcctttttattgttttccaaattcatgtgcgttttatactgacagcacatctcaatttggactagacacgtttaatatgctcagtagccccatgtggccactgactcccctattggacagcacagctctagaacttggggcttttcagagccttgggcccctccaataattatttaaacaatgtctgtatctttggtgacttttcattagtatttttacagttaaggaaatatataaatctaaaaatgcaagtttgttttggacttaaattgtaagcagttaattatatgtcataattcgtgatatattttcatccctgctccacgcatgcaaagcatccctcttatttaatggacttattgtttacttgctgttatttccttacctagctgccacgtttttccacccatagtcaaccatttttttttttttttaaattttttgagatggagtcttgctctgtcgccctggctggagtgcagtggagtgatatcatctcactgcaacctccacctcccgagttcaagcaattttcttgcctcagcctcccaagtagctgggactacaggcacgtgccaccacgcccagctaattttttatatttttagtagagacggggtttcactgtgttagccaggatggtctcgatctcctgacctcgtgatctgcccgccttggcctcccaaagtgctaagattacaggtgtgagccaccactaccggctactattctaatgtgtttaatgggtaactttttgttcaaaactatacttgcaatgtgcattgttgtgtgtgtgtgtgtgtgtgtgtgtgtgtgtgtgtgtgtgtgtgtgtgtgtgtgtgtttattcaatgggtattttcccccgtgtactgtgttttggagatgtatccataggctatgtgtacatgggctgcattgtttccagtggctggatggtgctccattctgtgaatccaacacattttacctttcccctggtagagtgatagacttgcaggttgcccccattttcccagtaccacagggagcaccccgcacattcctctaattgaactgcatgagaaggcatgtggcatacactctcgatattgctgggycatagggtgtatgtcgtttacttcttttggggaaaaaaatgatttgtttatcttatttttattgatgaatgtatggatataattttacgtggttttgctcagtgaaaaacacagcattgcaattgttggttgaatcagatgacaggtaggtgaatcagttatggwytgtttttttagggatagcttactagttcaatgcttgtaggtgtatttctcaaacagacccagtggccacaaaagagggtcaagcttttccagggtgaccagttgaaatctgggccaagtacaagtgtatgtagcctttagtcacagtaagaaaatcttcagttcttgttctatcagcagagcagaatttattttttttttaaatgagttagtcatggaagcagaaagttggtggggggttggagggataaaaaaaggtattacccttaacaaaaagaaagcccatggaaaattcatgatgaaactgcattcttgcttttaaaagtaacttgtactgttgcattcttcaaaggaaattttttaaactctgtattttctttcaattcctttctgttttgggctccatggttgggtacttcccactgtaatattttctgaagagaagggtaaatgcactcagttcattcatcaaagcatgtctgcaacacaggaagacacgcagtgttttcttctatgaggaagaaagcacraacagctgtctaggacaaacttcttgacacagccatgcacttggtcccactgatgtttgccaaaataggcgattattgtcagtatttttgtcagcagtgaggaagactttgatatagcatcggattcatttgcttccaaagaatgtttctctattcccacttctgagagctaaggatcatttatgtgtgatgagcagagtcttctctcaaaggcctttcatttatagtaattcctttcatagaaaaagtaatagaggctgggcgcggtggcccatgcctgtaatcccagcactttgggaggccaaagcaggaggatcgcttgagcccaggaatctgagcccagcctaggcaacatggcgagaccctgtcttgctagaaaatcaaaaaacatagttgggtgtgatggtgcatayctgtggtcctagccactcaggaagctgaggygggaagatcgcttgagcccaggagtttgaagctgcagtgagccatgtttgtgccactgcccaccggcctgggcaacagagagcaataccctgtctcaaaaaaaaaagaaaggaagaaaaaaagaaaaagtaatggaatgagtttgaggaggaagatgcttagaacatgccagaattcaagagcagaaagaccatcattaacaaatggacgctaactaccagtagatccagaaagaaggaactggagctagcccaggacaaaaacctggtataaatcaagattttcacaagcgagaggcttagattttgcaatgaggaaggggaaaaaaagaaccaaagtatttctgtagtgtaacaaatttggaaaccttcccagagaccctgcagataagaaacctctaacgcttcaagagcgtttttctcataggaaaataattttagctactggctggaattcgaggcctagtgggttaactggtacatttgtgggtgaataaaaaatagcaaacagcatttctgaatcttttttggatgtcatagcaaaggaggactcagattccccaggcaggctgtatggtgatatgtactccccaacccccacctgaatccctcccttcctccttccctcccttcccccacttctttgtcctcctctttcccattcatatagatactatctaggcaacctttgtagtttctcagaatgagataggaaaaaaaggggaccactcctaaatacattctcttatattcagaaaacttacattgcccacctatgacgtatgggacatgtttgcggtaccttggttgattacagtaaaaagaacaagaagtctggtctttgctttaaggaacttagatctgttcaatttgtgattaatagcatcgrtaagagacctttttgaacattttgcaaccgagaattcacaatttagacaccaaatagttctgtgttctcatctttacagaaaggaggatgtccttctaaactttgagcatgaattatcgtttgaaaattttgagaataattatttcatttactggttctttcctggaattttggctcaattacctaatattgtcttatgctagattctatttttgagaagcgttaaaaaaaatggcagtttctatacatgcatccctggcagatgggatccacaaatacccctgcctcctttctgtcaatagcccctgcatctttgaaaaactcagagctctgcatatcactttttcattgctgggaaagaaaaaccaagctattccacaggtgtgtggcagctaattggttttgccattttgttaaccctctagagaacgtttgctttcctctcttgacctagaattggagggtcttgaggaggagaatggcatagatcaaaaaytgaaaaccttgagtcagattaatgactggatgttgcttgtggttggctgaatcctgcaggtatttcttgaagtttgtgaaaaaataagcccaatgcagtgtctgcatttggtctgcatttgtctgcatttttgacaatacttggaaatgaggttaagatgcttggattggtgggtggtggaaaatgaatgaatcataaccgatgaagttatattccaacaatatgatgtttcagaaggagtcttgggccagatgagaatcaggaaactggtttcttttttttttttttttttaacacatcttttttttttctttcattattatactttaagttttagggtacatgtgcacattgtgcaggttagttacatatgcatacatgtgccacgctggtgcgctgcacccactaactcgacatctagcattaggtatatctcccaatgctatccctcccccctgcccccaccccacaacagtccccagagtgtgatattccccttcctgtgtccatgtgatctcattgttcaattcccacctatgagtgagaatatgcggtgtttggttttttgttcttgcgatagtttactgagaatgatgatttccaatttcttaacccaactctataatttagatgtctatatgtttgtgtttgaataggagattgcaaagctaatccattagaagctgtttctttcctagactaggcctggaatttagttttttgctgtgagatgaatgaaataggatgaatttcaactattagtaatacaagaccccaaaataactgtgacttattacaataaaaatgtacttccctttcacatagaagcctggcagtagcagtccactaatatgatggctctgccctacaaagacctcrggaaccaaatttcttctgccttcctgctctgctgtccctaggctatgtcctcatagtccaaggcagcatctctgttgcaggcagaaggaaaaagtatgcccgactgctttttttttttttttaaaggagggctcttggaaattgccatacagtccttgagctcacacttcaatggttagaatttacttgcatggccacacctagctgcaagggaggctgggaaatgtagcgtttatatcgggtggccatgtttccaactaaaagtttatatggctgtaggaaagactggctgttgatgaacactggctttgatgaacatcaaaaacagaaaaaaagtggcggggcacggtggctcacacctgtaatcccagcactctgggaggccaaggtgtgcggatcacaaggtcaggagatcaagaccatcctagctaactcggtgaaaccccgtctctactaaaaatataaaaaattagccgggcgtggtggcgggtgcctgtagtcccagctactcaggaggctgaggcaggagaatggcgtgaactcgggaggcagagcttgcagtgagccgagatcacaccactgcactccagcctgggcgacagagcgagaccccrtctcaaaaaaaaaaaaaaaaaaaaccgaaaaaaaatttctgtttttgatgaacttcttttattatataactttgtaaattttttgaccagtaatttaaatatcttaaccccatgggtctattctcttgtgttatttattgactgaaatatatttatatgttttatatagcctgcctcaaattctttttttaatgtaggtagaggtactcctcttattactgagaggagtaataagaaagaagcttttactctgatccctttaagtatgttttcacaacataatctcagaaaaacrtttttctctgtactcctcctccccatccatagtctaaaatccttttttacatcaaatattaaagcttgtccattaaccactctgacaggctgaacaatttacctccgttctactgatttttttaagggcacttaacctttaaaatacacttaacgaataggatggctcccaaataaaaatacaccaagatttttctgcagccaaatgataagcattttcctaacctcgatcaagttatttaacattgctgaaatctgtttctttagtaaaatgggaataatatctgctctgcatctgtggcaagattttgtgggatcaagtgagattggattaattatagctctttggaagtcctgtagtgctctggaagtgcatgctatagttcttatatcagaaataaaatgtatatggtttatgcatatgtataatataatattcattctaatctatgagagtgtagtataataatgttcccacacacagatttggattttacaaaacatgacgcccacttcagcttgtaattgtaatatgctgataaaaggccaaattgtcattgaatactgtgtcaattgcccaaattctccataatgatcttttgttgaagtatctaacttaagtgggaaatcaagtcctggcatgccaccatttagaagaataatgacgttggagttgatcaaggccacttctaaatagcttccattttgtgatcgttgctgttgtatactagccagaggactgcagctctgagagaaaagcatattgaagatcctgccaaaataacagaaaagaaaattgtctccatttaatatattttcaaacctgcctaccttgaaagagtgtgatgccactagtaattctattctgtttaattgtatggaagccaaagaaagattcatgcccctggttgtattttgtcttctcttctcctgctgctcactctgaaataagaataaaattaagttgaaagattaggttgacagaggatgtggcagcggggcacattctctgaatgatgttgtgcagttacacttagcttaatgtccatataatcatagatctttctggaatactgtggttaggacgagtgactaggtagtcttcctgccaaacctaaataaatcctgcctggtattgaacaggttgtattgctgtcactcattaggtgggtgggataggcagacagctggaggagaaagtaataaagcctgcctagctattttatctaaatatgatgtgatctctactttttaaaattataaaaaattaaggctgagtgcagcggctcacgcctgtaatcccaacactttggaaggccgaggcgggaggatcacttgaggtcaggagttcaagaccagcctggccagcataatgagaccccatctctacaaaaaatttaaaaatcagctgggcatggtggcgggcaactgtagtcccagctactcagggggttgagacaggagaatcgcttgagcccaggaggtcaaggctgcagtgagttgtgatcatgccactgcactccagcctgggtgacaaagcaaggccctgtctcaaaaaaggaagaaagggagagagatagaagattatcaaaaattgctgatttcaagaccattctcacctacacccattctcctttcattattatgcttaggcttttggatttttaagggttgtgatctcartgcagtttttttcccagtacttctcaagaaaacaaaattgagattaccataattgtctctagttttcttaaagtaaaatacaaatcttcactcagattttaagtttttattaagcttttttggaaggagcacccttaagcctgaggttctcagtagtgctatgttgtatactatgtgcacactctaaaaggaaatagtgttcttaggttatacttcatstcaagactttaatatcactagttagaaaatacgtgttttattctgtgtggasgtatttagaattagacattccagtgataaaatattaaaatattttactacatctaaaatattctataaccaggtcatatgattaaccttaattatatataagtttatggatggatggaccgatggatggttgaatatttacaaatacagagtttccttctaggtaatttttagctgcttacatttcatgccttttagttttaagtttgtatgcagagtcctcctgactatgttgtgtttggttttggttaatagtctatgaacggagatgtatacttttatcttctaccaacctctgatcatatcctatctgcatacttttatgagaatatgaggtggaggccgggtgtggtggctcatgcctgtaatcccagcactttgggaggccaaagctggcagatcacctgaggtcaggagttcgagaccagcctggccaacgtggcgaaaccccatctctactaaaactataaaaattagccgggcgtggtggtaggcgcctgcaatcccagctacttgagaggctgaggcaggagaattgcttgaacccaggaggcagaggttgcagtgagccgagatcgcaccattgcactccagccggggcaacaagagcgaaactccgcctcaaaaaaaaaaaaaaggaatatgaggtggagcagaagcagtcccccatcaagaatgtcttaaatagaaaacagatttaaactattttgttctaacttcctttctgtttctttaagggctcaactacatgacagaaaacagccacgtgctaatgaaagaggcatgatgtactcaaacaagtgtgttctcacatgatacatcatttctaaattgacatgtgggtggccagtgttattatctagttttcttgatctaagtacaaattacctttttaataaaaaaaaatgtgattgttgcagactctcagaaatcatatttttttaatgaagaaatacactgtggttgatggcatttaaaaaaatgttttgaattacagaatatttttttccaaagccacatatgaatgtagcaattgatagctaatgataataaacatttactgagtgattactatgtgcccggctttgcgccgcctttgttccacatccaccctgtgaggtaggagctgaaatcagtcctgtcttacaaagagcagatgggtcattagaatttaagccattktctytgaggtcacacaactagcaggcatcggggctagattcaattccaggctgttggtgtggctacagagctcctgttcctgatagtaatacagccccgagaaaatgtagttgagtaagcccagcaaagactatgcctccatgtgtttaaattaagaaacttttgtgttgattttatgccaacatgcttgataaaaatagacaaagtatgtaatgttaaaaagcccaaatttaaggaccttttaagtattgagttcttggaatatttactcaagaatcttcaacagaaaaatcctcarctacaaatagcttcctatttcaaagatactcagaaatcttaacattaattttttaatgaaaaatatggggaaaggtgttagggaattaacactcccagaactgttaaggtttttttttttcttttttttaaacaactgttaaaataatgctaccacagggaagttcaattgaatacaaagtgtaatttttctgaggctgtggtagacatttcaagacctaaattatgtcttggaaagacatattaagaagtataagggccttgaaactcttcaggcaggctttcctcccctctagcaggccagtgggtcaggattctgggcgctcccaaattttggacactttggggcctgtccctttcttaccatagtcagtgtttctgccgattcctttggttgaagacaatttcacctcagattctaagcagcctctgtttgctgcctggaaccctcagcaaacctattcatgatctaaacccagagtcctggctctgggctgttgattgtcttccaaagttggtggtgaagctggaggaagtgaagagccctgcttgctatattctgacaacacaaaccttgggccagaaaaaataaagggactaagtagtgagagagaaaaaaagagagaggcaaaagaggagggccaccgtgtgatcagaaaaatattttttgggctaggtgtggtggctcacacctgtaatcccagcactttgggaggccgaggtaggtggatcacatgacgtcgggagttcgagaccagcctggccaacatggtgaaaccctgtctactaaaaatacaaaaattagccgggcgtggtggcacacgcctgtaatcccagctactcgagaggctgaggcaggagaatcacttgaacccaggatgtggaggttgcattgagccgagatcatgccattgyattcagcctgggcaacgagagcaaaacttcatctcaaagaaaaaaaaaaagaaaaagaaaaatatgttttggttaggggagggagatggaatctttttatgttgctcaggctggcctcaagctgttggcctccagcagtcctcccacttcagcctcccaagtagctgagattacaggcacgagccactgtgcccagcctgaaaaagagttttaaggctaaattcaaatagtttggattgaagcgttaagctccgtcgagaataacattgctccaaagagtcagtagtagcagctgccactaagactttgtaagagatcagaaagatcccttcaagaatgggaacattgtgcagattattcctctgatcttttcaaaatacaaatcacatcacataatagcttcagataatcctttgcataaaggatgaatctttagccagtggggctttacgccttatcacagacctctcacccctaatcgagtgacctttctgttgtaatgacatacagtctttttccagccacatgaccttgcccttgctgttccctctttcagaaatgctgttctctctttcagaaatgctgttctcttgtcccttcccaaggctggctccttctcctactttagggagacctcactcccttagaggccttcccagacatcctcttaaatagcccaccctatccccagacatgattgtttgcctctcttatttattgctgtattcccagcttctaaataatatttggcgtttataggaggtcatcggtacagaagaatgagtaagtggatgaatgaatgactgagtacacacgtcacatttcttcttctgtggagccagtagttagatagagtttgatggaaaagaatgactacctggccgtacagtggtgcatgcctgtaatctcagtacttagggaggccgaggcgggcggatcacccaaggccagcctggccaacatggtggaaccctgactctattaaaaatacaaaaaattacccgggcgtgatggtgtgtgcctataatcccagctacttgggaggctgaggcaggagaattgcttgaacctgggaggcagaggttacactgagccaagatcgtgccactgcactccagcctgggtgacagagcaagactcaatctcaaaaaagagaaaagaatgagtaccttttcttttcctaggccagtggttctcaaaagtggggactgttagaaatacagattcctgggccccactccagagtgaccgaggctccccagcagtgtacgttctcacaagccctccaggtgannnnnnnnnnnnnnnnnnnnnnnnnnnnnnnnnnnnnnnnnnnnnnnnnnnnnnnnnnnnnnnnnnnnnnnnnnnnnnnnnnnnnnnnnnnnnnnnnnnnnnnnnnnnnnnnnnnnnnnnnnnnnnnnnnnnnnnnnnnnnnnnnnnnnnnnnnnnnnnnnnnnnnnnnnnnnnnnnnnnnnnnnnnnnnnnnnnnnnnnnnnnnnnnnnnnnnnnnnnccctgggtgcacaaatgttggggaagggagcgattgccttcctaagacccgaggaaatcttgtgctctgtagtacagaccttgctaaatttagactttcagctcaccccttcctccttcctgtgccctccgcagcaggagaggaaatttccagctgctgctagaagcaaatctattttcatttgacccttggatttctgcaggtgagcctagggggaagagggttattagaagtgggtttgcttcacacactggccccacccgggagtggtccttgttcagaagccaggcccctagccctggcgcctgaggtggctggaaggagccggtccttgctgctcacagatgggcttgttctcaggccaagtattgcttttggcccaagaggctcccagcacaagagagactttgtggggctcttcgccttgctatttttacactttgacttccaggccctgcttcctgttccctcacaaaagaacaaaaagcacaaattacraagagccgcagagcccctttgaaaggacaccgatggctttcagctcccactcttgacctgtcccctgtcagcaggtgacagtgccttcagtcagaggcagtgatgacaggagactagaaaggagggaaggtggagaagcatgtggatctcagcctctgcagcatgtggagagaggaatttgatctttaaggcttctagcacgagggttttagaaatatatgggccagctggagtggctggcctggatttactggagcagaattcgggggaaaggcatttaaaggaggcccctggatagaggcctgagttggaagtgttctcatttttaatatccccagaatgtcggggtggattggggctcagggccagtctgcgggcgaatctcggtgcaatgacacaccagttgaccatggtcaagccagctgtggatctcatagcctcagccttgtagccattgtttggttatgttgtcatccttatttattcatcttctaatttcccaatgctgtccatctgggtttttctcaggtctctgtagaatcctttttttttttttttttgagatggagttttgctcttgttgcccaggctggagtgcagtggcgtgatctcggctgactgcaacctacctcccaggttcaggtgattcccctacctcagccttctaagtagctgggattacaggtgcccaccaccacgcctggctaattttttttgtatttttagtagagatggggtttcaccatgttggccaggctgatcttgaactcctgacttcaggtgatccaccctccttgacctcccaaagtgctggaattacaggcgtgaaccactgcacctggcctaaaatccatttttatatgaggacatagtttacctttttggctgtaaacccatctgctgtcctctctgagccctagaaatggggataaagatagtgcctccttcatagggcagctatgacaaaccacaagctcctgcaacgaaggacacagggcgcgtgatacagcacctagtggcgtcagtgtccttgcagttgttgctgttactgttactagcttttataacatcccagcgggaagatagcacttgcattcaagacctgaaggacctggattccacccttgacttctagctgggattgatgtgagcattaaatgcagcgatatgtatgaaaacatgctttgttttatggatggggaacttttttccaaataaaggcctcacacccagtcagggggaagctcagaatcatgtacaaatgcaaagcaagtttattcatttggggttggtttatgtttgagagaaacctagaagtttcacaagtctacttaaaaatggagaatgagggcatcaatctttattttaaaaattatgaaatatttaaattaaaaattatgaaatatttttgcttcctcattaattgagagagaagagagatatttggagaaagagaagatgtcttgtcacaatagaggcgtcaccagccaggggcatacacggtgtataataaggaagacagtcagcaaggcaggtggggtagaatctggacttgccggacctcctcagatcctggaagtccggccctgctgagggagcctractgaccttcttctcctatgaaagtcaccataaaatgatcttttgtccttttttttttttttttttgagacagagtctcgctctgtcacccaggctggaatgcagtggtgcaatctcggctcactgcaacctccacctcctgggttcaagtgattctcctgcctcagcctccttagtagctgggattacaggtgcctgtcaccacacccggctaatttttgcatttttggtagagacaggtttcactgtgttggccaggctggtctcaaactcctgacctcaggtgatccacccccccttggcctctcaaagtgctagtattacagagatctttttgctttgaaccatgatgataatttgaccctagagattctgtagtgagcattttccttgggacctatgaaaacatgttcttatattgtgactttagtgactcgaatgtgctgctgtagtattggcttcttgagacctccaatttctagtgatggtgatgataacactaacagtgaccatccatgcagtgaacacggctgctgcatgccaacctttattctaagtgttktatacactacccagtgaggcaggtactattatgatccctgttttacagatgtgcatctgaagcccaaagaggttgaggaacttgtccaaggacactcacatagggagtggctgagccacgatacgaaggtccctaccgcattgacacttcagttgccacgcagttgcaccaagccatggctgcactgagccgtatcgcgtcttcgcagactctcctctggtttcctggtctcattggagccagcaggcatcttgaatgaatccattctttttgcttggattatcttttaggtactgaaaaatacctcgactaggccggctttctattccggcatatctctgtttaagaaacaactgaaacttttgatctcagaactccactgaggtatttttttttaattgtgcaaaaaaacatacatagagaaacacccatacatgtaaacatacagcttaacacataattataaagggagcgtcgatggtcctgccagcccagtgaagaaataaagcatttctaatactccagaagtccttgagaaacctctctgtgagcttcactgtctctcccccactccaggtattcatcctccagtttttggtgatgactgtatccttgcatttctttatagttttaccatctacatctatatgcctaagcaatgtagttgagttcttggacttggcatggacacttaatatattctgttttgtcttccttttgatcaatgatatgtttgtaaaatacatccatattgttgtgtatagctcatttttgttcatttattctgctgtaatttattcattgtcttttttaaatttaattttaatttttttaattattttttttttgagacggagtcttgctctgtcacccaagttggagtgcaatggcacagtctaggctcactgcaacctccgcctcctgggttcaagtgattctcctgcctcagcatcttgagtagctgggactacaggggcatgcaaccacactcggctaatttgtgtatttatagagacggggtttcaccatgttggccaggctggtctcaaatccctgacctcgtgatccatccacctcagcctcccaacgtgctaggataacagctgtgagcccccacacccggccaattttgaaaaatttttagtagacatgcatctccctgtgttacccaggctggtcttaaactcctagactcaarcagttctcccgccttgacctcccaatgtgctgggattataggcatgagcyamtgtgcctggccaattcattctgttttaaatggttgtctaggttgtttcaaggttttggttatttcagtgctgctgatatgaatatgttacctggtgcacataccgagtgtggaattgttgggtcatagagtagagatatcttccactttactagttaatactattttctttyctaaaatgattgtaccaaattacccttctacgagcagtagtatctacaagatcctgttgttctacatgcctgccaacaattggtattgtaatactttttaatttttgccgagctgacaggtatggaaggaaatctattgtgttgtgacttgaggcattttaagatgctctgcaggctttttattagatttctgcagtttctgtaaaccttgccttcagtagcccccgcagttggtccgaattccagtcctccaggcgagtcgctctgagttgggttcccacggtgcgttttaggctgtccagtgyygaatctcaccccctaagaggactgttgcacatgacacacccaaatagaaaaacattctccagggyggaggttttttaggtattcccacagcaaactaagaataccacattgtgatttcaaagctctaagcagatccgtcaaaagggggtgcrtggcagacgctcagtttaagcaaattgctgagagtcagaagggcagtgaagctggcagccactgtttcctttccagttttcagccgcttgccttgtctccagcaaagcttcactaagtaattttctgagaacaaaagagattgaaactttctcctcaaatcgcctggtgttgtcgaatactcctgttttgttttgttctgcktgtgctccctctcgtctcgttggtccactgtgataccgtgataaccatcggagggcggccattaagcggctttgcagtattctgaaaatcttttacagaagcagctgcttggtatttcgataacttgaccccactgttctcttggcttagctatggttttaaactttattgtaagtaaacattttaaagaaaaactgacgcttgttttcaaggaaaatcatacataaagaccaatgtgtaatgacggacaaaatgggtgctgctgtggttgaaaagatcaggaaaggtctggacttccacctacctgcaccactatcttcttcccctccccccgccttttttgagacagagtctcactctgttgcccagactggagtgcaatggcacgatctcagcttactgcaacctccacctcccgggttcaagcaattctgtgcctcagcctcccaagtagctgggatcacaggtgtttgccaccatgcccgactaatttttgtaaagatgggatttcaccatattggccatgctggtctcaaactcctgaccttgagtgatctacctgcctcggccttccaaagtgatgggattataggcatgagccaccgtgcctggccttcttccccagtttgataacagttgaaaaccactgactgataaaattaataaagtmcaaagtacttatttaaatgtgtaatttttttttttttttttttttttttggagacaggatctcacttctgtcacccaggctgaaatgcagtggcatgattatggctccatgcagcctccacttcttggrttcaggagattctcccacattaggctctttttttttttttttttttttttaagatgggagtctcactctgtcacccagattggagtacaatggcacaatctcagctcactgcaacctccgcctcctgggttcaagtgattctccttcctcagccttccgagtagctgggattacaggtgtccaccacaacacctggctaatttttgtatttcagtagagacaggatttcaccatgctgaccagtgtggtcttgaactcctgacctcaagtgatctgcccgcctcggcctcccaaagtgctgagattacaggcatgagccaccgcccctagccgtcctcagcctcttgagtagctgtcactacgggcacgtgccaacaagcccggctaattttttctatttttggtagacacggggcctcgctgtgtctcgaactcctggactcaagcagtctgtctgcctcagcttcctagagtgctgggattacaggcatgaaccactgcgtccagcctaaatgtgtagttctatgtagaagaacaaagcagattgggctatgaaggttaaacaaaatgaattatgatggtgctgagagtcttcactcggcatacttcctgcctttccttgtggaacttctcagtatgaaaaataaacaaaatctcactcaagatttcttggtctccagcccagtactcttcctaatttattgtattatatttctttttatccatgaggacgttcacatatgccatcaagggatagataaatgttagtaagtcttgggagtcatgaagttgctctgttctgtgaaatcgcatagaactgatttctttagaatttctcttttgctaagtgccaagttccagttcccatcattgaaagacctaattgatttgctcatttcttccttctttatttattctttctttccctccctctctccctccctcccatctctccatccatccaattttgattgaatacctgccatgctggatgtcgaatatgatggtgaataagacagttatggtatctgcctaccctcacaaggcttaaatcccttaaaccaatgtgagataatatgaagggattctataaatgattgtagacctattaataataccgtaggtgtgcccactttrcatctgtcaccagcaccattgttaccacctatttctagcaacagaataaacctcctctttttatttcaacaaaatctcagcgtaagcttagtaaaactagggtgggtttaattgaagataaacagtcygattcgtgccattcagcataaagttcctctcatgatacctctaggtacctccttatcagcccaacttgaaagccaccaaccttggcctctgccgttggtctgacatggtgtcatattttgataatgtatgtagctattcttcatacacgctaatgtctcagtggtaaagacaactaggctaaatgtgtaaattcaggcctccagtcctcataaaccacagaaatggtaactggcagcttctttgtatcttttcagtgtctagttccagagctcgctgtctgtgagccactagaatgggacgagggaacccacttgctagggttttctccaactttatcccaaaacctatgtatctaaccttatgtgtcccagttgagatgccgaaaacaaaataatagcagaagtgaccccttcgtcccctgaaaaggagacaggacaaagaaatgtaaacacatgtttgattagagttgtttctgcaaaatttggttaacttgaaattatttaattatgcttcactccctgtggggacagggggaaattcccagcataatttgagactagtggcacttttgcttctggcagatttaaatgaggaaagtgactgcatgcatgcacatccgtggccacagtcttcatcagcccctttgtttgatttctctatttctcacggtggctctgctcccgtgatgcctgcgcacgtgatgcagcgacacttgcacagagccaggcccactcgtgttctcctttgaattgccggaaagcactccggttgcttttgtatggccacataggaaacagcctaatccttagaataaaattgatccctgggtttagagctcaagtttttaaagtttttcttcctacatacattgattcagctgcctgtgattcccttattacccctccatctcggtggatgtctcattctacttcctctcccctctgttctctcttctctagcactgttacccatttcctagtcaactcaaggccaaaaatgagatttttaaaagccagcagatattcagtaaactgataagatatgtagaaaggccagatatgatgggaattgtctagyagacgtattttatttggccatcgcagtgtttaaaggattattttctggaattgggatgactggactttgcaggtgcttgcccattttccagtcacccacctttgttgtctctcacactctgcttcacatgtttacatcactggcctgtctgtagagtcagtstggtccattgttgacttccgaggcttttccaatctgctttccttgggaatstttttttttttttttttttggagatagagtctcactctgtcgcccaggctggagcgcaacggtgtgatctcagctcactgcaacctccgcctcctgggttgaagcgtttctcctgcctccacctccsgagtaactgggactrcaggtgtgcgccaccatgcccagctaattttgcatttttagtagagacaggctttcaccacattggtcaggctggtctcaaactcctgacctcaggtgatccacccacctcggcctcccgaattgctgggattataggtgtgaaccaccacgcccggccttccttgggaatcttttgcgtgcaattagaattctagagtattggccaggcacagtggctcacgcctgtagtcccagcactttgggaggccaaggttggcrgatcacgaggtcaggagatggagaccatcctggctaacatggtgaaacctcgtctctattaaaaatacaaaaagcctggcgtggtggcaagcgcctgtagtcccagctacttgggaggctgaggcaggagaatggtgtgaacccgggaggtggagcttgcagtgagccgggatcgcaccactgcactccagcctgggtgacagagcaagactccatcttgaaaaaaaagaattctagagtattataaaagactactactattgctattttgtaggtgtcccaatcaaatgagagagattcttaaagcacatgaaagatataaatacagcactcatttacagaaagcattttaggaaaattagagttatagctgggaatgacatgatgccaaccaataaatcttaataattgacaaaagcattcagtacactgtgtataactatgtgaattttgtttgggaaattgattctggtttggagctttagcttgttcatagggttcttagagctataggatgacttgatagtgaggattttgtgtccctgttctcaggtgttagccttcctttccaattcttatacttgtttccatattacctgttttaccaagtacagccacacacatcagtatggatggatttcacaaacataccaggaagaactaatcatttggactatggacacgtctgcctttggggttcacctgacgaatagtgctgacattcttytaataaaattctctctttctccccccgccccgccccccaatttttcagcagatatatggagtgatcactcatttcagactgatccagatttgccgcctggctggaaaagagtcagtgacattgccgggacctattattggcacatcccaacaggaacgactcagtgggaacggcccgtctccatcccagcagatctccagggttctaggaaagggtcacttagttctgtaacgccatctcccaccccagagaacgaggtaaaacggagtgtctttttaccagcttagtagaatagatgtaacttgtggtttctctttacactggttgcttctgccccaacaggtcatcaaggtaagctttttgattattgtgcatgttgcatttgaaawctcagtaatgcttcctcttagtaaatagtgttaatatccatctttcagggatgtttttattttttaatggcttttggtctcttgaaacagcattccaggtacagaaagcaagaggggctgattaatgagaagtggttaagattccctagggctcactgaggcagtactttactctgcaggtaccattgcatggtgctggctccataaaatatttacacacagaagaacatctcttggccagacrtattataattactgcgtatcttattagccttgggctcgtttgatagcgtggagggaatgtctgcaagaataaccctgagagccctcagatgcttaatttctattttaaaaaatctgtttatttagtagaagtgacattattttagaaacgattaacagcataaatttctgctgtccctgaggaagaaatctggatgtttaaacaaagaattgaggcattaaaaaaatgtcattgtggtgtttattagtataaggatccccacagtgaacttttgtgaatccygaaagcaaactgttcaagagaattagagttggagaaggtcacmattaagtaatgacttcttttgacccctgacacccaggcatttctgcccctttctgaccacagtccttggttctttgaacaagcccatcttcttttgccttgaggcatgagggcattagaactactgtggaagcttctttatctgtttgcaatagatatcacccttcctgtttttaaaagtagacaatgtcttatttcctaaatctttgattatgtacttgttcttctctgggaggtggtaagccttatattctcatcacattcctgctgttagagggctttggcctctcatttacccagcctggacctcagattctccaacttgaaagtgatgggctggggcagccataccctcattggtaggcaaggactttggtttacctgtgccatgycgtggtcatcaggcacatgcttcaggactgctgaaccccatatagggctttgttgcttatcactgggcagttttaacaactttttattgaagcataataattcctactccctgggcaatttttgttcagccttttgttcatcttgcattaggtgtgctgggggataaagatgaaccaacaccgtctcagccctcaaggagtttggtatggagaggagtcctcttcctgtccccacccagttggatcctgggattccccctgtaccacagtgggggcctcctagaagctgagccggccaggatcaatctctgttctcactaaggcacagacgtgctctccctttcttatttgtacaccttttctcttggcatctcagttggcaagaatctttctccattcctctattccaagcctataaccattttcatttccctattccaaacctttagccatcttcccagccagagagtgccctatagccagagaacaccagggtgtgaaggcaccatttggtgccagcattcatatgttacagacagggacactgaggttgtagagaggccagtgaccggtggcagctctgggcctagagctcagagttcctgaatcctcccagatcctaggtcagaggtcttctcacttagctcccctggctttgagatttcaacctgctctgcttcctcactgtcccagattggggagattggactgactttgagagacagtttttgtgccatgaatctccagtcctctgcatctggcagtggtgaagtcctttgtaaaggctgcctgcagaggcccaggcgggggtgtgtggactccaaggagggcatcctgaggcttacggagctcagagttgtatttctttgattaacacgttagccttttgtttccgtgatttgggcagaagtcttgggaagaatgcagcacaggtgggtgctggctctggggaaaactgccaggtagcagagtgcatctctccccttcctggagcccatttttgcctactctttcccctctctgtgcctgcatcgtaccccttgctaactactgcccagggcccctcccaggctcagaagggcacacccttggcacctyctgccctggagttcagtgttcccccccaacagccccgctkctcggcctcctcactgctcttaaaaatctgttgtggttttcagggtattttcctagacatcatttcatctgatcttctcaggagtctcctgaggcagaaaagtcagctggtatgttctccatttaaggaaagaggtaactgagactcaatgagttaagtgtccctcagctggggttagggtgggatgtatccagttccctgactccagaccccaggactctagagcccgaggactctgagaatctccaccttctatcagttccattcctctcttctgctgctcactgtaccatttgtattgacaaaggcttatccctccgtggaagctggttaaaggtgcatatttttagaagtttcagagacagggactcatatccagcactctcagaaagcaacagggcaaaagtcttcaggctgacctttcagttgttcccataatacacgtgtttctccccctacataaggtcctccgttaagtcaaagaaccaagcagatttaaaaggaaataaataagtcatagaggcaaagagttgagcagatagaagaggaataggagaactggggaaaagacttagcctgccacatacgctgatgtgcagaccctgtcaccaatattaaaccagaggcactaagagaaatcaaatatttacagtccagcctaatgccttaactctttactccccataaaacccttatgtggtcaggtgctgcagctcacgcctgtaatcccagctctttgggaggcctaggcaggagaatcacttgagaccaggagttgaggagcagcctggacaacatagcaagaccccatctctamaaaaaaaaaaagattttaaattagccaggtgtggtggtatgtgcctgtagcccaagctacttaggaggctgaggcaggaagatcacttgaacccagaaatttgaggctgcaggtgagctatgatcacaccatagcactccagcctggataacagggtaaaaccctgtctcttaaaacaaacaaacaaacaaaaaacacaccaaaatccttatgtatctggtactatagttgtctttctcattttacatttgacactgagagacagagaggttgaggagtttgggcaagacacacagctaatacatggtagagtcaagcttgagttcaggtctcctggcccctatttccaccccgaacttcacaatatcatatgtctgggaggcttggagactcttgaatccctttaactcaccctaagggaggctatgtcacatatggagccttctagaaaatgacctttcttaatatcattgtctacaggtgctaatgacagttgaagagaaatgattatttttctaannnnnnnnnnnnnnnnnnnnnnnnnnnnnnnnnnnnnnnnnnnnnnnnnnnnnnnnnnnnnnnnnnnnnnnnnnnnnnnnnnnnnnnnnnnnnnnnnnnnnnnnnnnnnnnnnntcctaaatagaatctatttcaaccaatttcaaagcatgagaagagagcaaaatcttaagggacagaagaagcttgtaatatgttgtgttagaaatgcatattttattcagcttttttctgagctggcttcaaaaaaaaaaaaagaatcaaataactaagtgctaaatctgttgactaggcttcacaaaagtttagaactgaaggcttccttacagtttgaaaattttacatttcacattccaaagttcacttgggaggtgttaagcgcagtggataatgtttccgctgcatatgccagcagtatttttgaaagtttataaactggccaggaagcatttgctgctgaaatttagcacgtggtgctcctccccgcccaaaccatttatttgttccaaattaccttgcagactgcttggatrttgaattttagagagaacggagagccacacaaaatatttttatgamtatccattggcttgtggccaagtcttcccatcttttcaaatgaaggtgttttggtcttcctacagaagaaagtatggagaaggcgggtctgaagctcgagaaaatgaattgttgctcaaactgtggtttcctcttggtcctaaatcagcctgttcttatgaagtgctcacagcctcacgggcgtcatgagagcctaacccccccaggagggtgcccagtggaataccttaagcctgtgtattctcatatacatgtagaaataagatgacaacataaaagggccgttctgccgtcatttttctgaacttcttcactcagtcaagtaatcatgacattgagtgctggaaggaatcttggagcagggcctgttgaatgtgcaggccgtatttctcagccagtgagccgaggaatggtgccaggagaacctctggggatcacagaatgggatggggcctgggaacctttgcataagctctccaagtgatttacgctgagtaagtaggacagcaggtcctctaatgactatagcctccctatttttatttgcatgtcccttcctcaaaaattatttggcctcaccccattgtctccccagagctactgctcttaccccattgctttgaaagccctgtattctatcatgtcccattgtagtgttgttacctgtggtatgtcactttcccactaggaagctccttggtggccgggacctgttctcctcatcctgtgcacagggcccagtacatgacgacattcattaactatttgctgaatgaaaaaataaatcagctgcatagccaaggaagctgttagttgatctgttgcaatgacaaagccagccctagagccctcattctcctggccccctctacattgtagtttctgcattgcactgctgctcacagagactgrtttaattgcacaaaccagtttactagtttgatttttttttaacttctctgaattatgtttgtgtgattaaaccataatgctgtaatcttctgatagggtgggcagatggcttgagcccaggactttctctactaaaaatacaaaatttagctggcatggtgatgcatgccctgtagtcccagcaacttgagaggctgaggtgagaggatcagttgagctcaggaggtggaggttgcagtgagatcatgccactgcactccagccttggtgacagagcaaggccctgtcttaaaaagaaagaaaaactgtacacatataaattgataaaacactcactgacattgcctgccgtagtccttggaattccaggttttctgccatttactatcaaggccacacttaatcaagggtcaagccttgacaaaatggcattgagagacatgattcgtaatcctttgtattccccaaactgctttttctttcgtggaaagactagatcgtaaggaaactcatttgcagggcaccctcgggcagccagtccctgtgctaagagctaacattctgaatctcactttgtctgcacattgatgggaggccttcttagtcctgtttgatatgggagggagttgaggtcaaagagcaagtaagaacagaggcagaatttgaaccccagcattccagcaggcaatgtgtctttattcattttctgatgcttataacagaatacctgaaactgrgtaatttataaagataaggaatgtatttcttatggttatagaggctgaaaagtccaaggccgagagactgcatctgatgagggccttcttsctggtggggactctctgcagagccckgagtgggtgcagggcatgacatggtgagagagctgagcatgccagctcaggtctctcttcctcttctgataaagccaccagtcccactctcatgataacccatgaatccatgggtgaattaatccactcatgagggcagygcctcttaaaggccccacctctgaatactgcaacattggtgtttaaatttcgatgcgagttttgtagtggacagacattcaaaccattgcattgtattagcttcagaacttctcaagtgcacacagagatgatatgattttagcttctgtcactgccactgtggaatgttttagtgcttttcctctctacccagttctcagcaggttcaaccctccactcttgccccctgstttgcattttgctaccacttcrtagagattttcttagcattgtrgagaaagtcccctggtagggacatacccagcccctgagacttagtctttaagagcactctgttgatattgtcaaagaatcaactccattgttggcctttttccagctgaaagataatgcgtcatttttgtttgctatgtggaattgctttccaagaccccagaagagaaacatggaagaagaaaactctcagtagtcaaggttatatgatcggattccctccttactgggtccagcctcacacagcttccgtgtggtgctcaagggttttgaggagtgccataccccgggcattgggtcagtccccctagacacactgtctctgaggagctaaggctccaaggctctcccagaactgagcaggatcaagtaatcagagaaagggaggttgcagcctggacaaggtcaggacaagcaccaggagggtgtcccagctatgactgtggtaccagaatgtcactcagctgtgcaaggctttagctgcattgcctggagggttaccaggctcatggaagcttgttgctcatagaagatggtccctgttggtccgttaccacctctttccccatctttgtgtttgtcttacctgaggcatattgtccaacttgctttttccccttttaatgtttttctctttgtctctcctcttcctccttcatctctcccacccctacgggggtggatacagactttctgtagaaccaaagaatctctgttgggttgtgcttttttaaaaatttgttaactaaaaattattagcaaaacttattagccaaatatagaaaatattctctcttcttaattaaaaaagttagatgaatagaccatgtaattcttaaaatttaagacaaagtgactttgtctttcattgactttaattttttaaaaaagaaaaattatggtcacttatacattggagaaagtttgtcatatttgatgtaaatgaatagttgtaaatataggaggggaaaaaagatctttggcccagtcataacacatataatgccagtttccatttccttactgagttttgtgctaaaggatttccttaagagtgcccgtgttaagtttttgtaaaatcactatacagagcctttgtttatttaaatctgtaaaaggtgattgttggacatttgccatctaactcatgtttccataacaygagagctggattctgacagtcttaatactgtttttagcttttgctttacagatacccttatgtccaaagagtaaatgcattaaaaattttaaaaaccacacacacgcagagaactgttttaattaggtactgaagacttttctgagtacttgttttagaaaatactcttcttttactttctgtagcctcaacatatagggtcccttggggataatttctgaaattctttttgtgaggtaactttgtttttcttgtttctttataaatttctccacaaagacacaattatcttgggtcttcctaattcatcatctgattatccttttttaaagttcaacttaacaacaaatattgctcacatgtaaacagtgatgacaatttgaggccatataagcttgttttctttttgaaaaagaaattctagcttaaaattttattttgtacttgatatttcaggtcctcatctcacrtccatattagtagccctacagtggtccaaaccgaaattggtcactggcccatctggaaatatgagaaaaattgggcatctttctctcaggaaaaygtacatgtacaaaaccccgcacccatttcaggggttcatagctcctccgagctaacaggttaagattgccctaggttattaattttctcttcataaagactgaacactgcttctgggggtagagtgaggggaaaggtaagggattgggcaacattcctgccctttattcattaagagaaattattttttaaaagtaaatatagtggtctaagttcccattttattttgaaaagctgcagtttaggtgcctagaccaaaaatgaaaatgacaccacatgtgcaatagtaataatgggtctaaatttgcagtgtctttgctctcagagaggcttgcagagtttggtaagcgcatgttgcaccaggcgccatggcttacgcctgtaatcccagcactttggaaggcctaagtgggaggatcacttgagctcaggagttcaagaccagcctgggtagcataatggaacccccatctcaacaaaaaagttttaaaaaattagccaggtgtagtagcatgcacctgaatagtcccagctactcaggaggccaaggcaggaggattgcttgagccaggaggtcaaggccacagtgagctgtgattgggccactgcactccagcctgggtgacagagtgagaccctgtctcaaaaaaatttttaaacaaaataaatgcatctttcgacgcacaagacatttaagcttagtttttttctgcttttagtggtttttaaaactgtatcaatgttgtgagtaaaagttatgggtcattattcacttctcattttcaaagaacttcagttgaaaagtgatttagctgaaaagttttgatggttgatttcttatacaaacagatttgcctaaccagtcagtaaagcaattcacaagactgtccctgagttttattagccttgcttgcttatttccccaaatcttagatgaaaaatacttgaatattcactaggcctagtagaaagaaaagacattttctcattgtctgaggtggatggagcagttgtttagatttggaaatcagttattgcaagagctctcgcaacaaagccaggcttcatgccttgcactataattacgtttagaaaatcatttcatgatcaagtattaatttgtgaagaagcttttgaagcaaaaaaaaaaaagtagagcttttatgaattagagaaatttatgttagactgtttagagttgttttttgttaggttaaatttccgccaagtgttgatgtcagtctgtgttcttcactaaccctctctccccatcattctcctttttttcttttaagtgaaaatatcttgacccccaacttttggggccctcagccatgggcattccctagtttccaaacaaacacggtacccgtccctcattccacccccaccaccagaaaacagttctgtttggtttatagggaggaaaatgattattatggaattaggtatgctagttattgaatacttggaattatattgtttgcttttaaaattaccttaaggaaataacttcactgtctgcttctaataatgtttagtcatttatttggtaagtaattaaagcaccatcactcwcctgccctcgtcttcaggtgataatctagacatagagggagtgagccaacaagttgctgttagagttaacttgttccctaacccatcttgtgaatatcaatgctaacaacagtgtcttgtgtttttttttttcttttcttttctttttctttaaatcaatgtgcttttttcctatgtgaataattatatgtctagaaacagccatggagtgattttgctgttctgaatgggggaaagattaatagtgacatttggaaggcaagtatattgtcagatcttagatcatttaatattttatcctttctgcatggctgtggctgtatatttttcttctttgtgaatatcatgcattctgcagggacacagtgatcgggcttcttgctaggggcattcagctcacactcctgttgcctttttttggtgtctcccattgtgaatgccctaggttccccgttgttttgtaagaacaggagtttgcaccagtcagcattcaacagtccttgcatgcctttctctgcctaagctcacgtacactctctgcctcttgctgggaagacgtttctcccctttgatatttgaggcaatgaatggwctyctcccccattgtacattaacaaggttctattttcctctaggatttgcatgcagccactgttaacccggaccccagtttaaaagagtttgaaggagcaaccctacgctatgcatctttgaaactcaggtaggacattagtaggatcgacctgctgtcaatgtatggctttgtgcagatagtttgcaatagaattctaagtccacttttctgtttttctgcctagaaatgccccacaccctgatgatgatgattcttgtagtatcaacagtgacccagaagccaaggtttgtaaagacttgctttcagccaccaggttatattcttagatccaaataatgactttggatcattgtccagtttttacaaaccatcaacccagagccatttaataagtaattatccctcaattttctctttcctaatctccctgacacttgaagaaaacccctaggctaagttaggtttggggggatttctagaaccatcaagactctgcctgtatctcactacgtcagctctttgcacaatgtaataaattaccattattgttcaaatgggtgggctttagaagtctttaaagatacaccaggctctgccttgcaaagcaatgggagaggaagctaaacaggtagggtgtgagacccctcccacctaccgccaccagagcagcctcatatctgtgcaaggtgaaatctctttgccattcctgtcataaacacagattggataattaggttttatgatggaaaactgggggcagttggggcaaacttgtgtccattttgtttctggacttctggtaggttgctaacagagccagctttctgggcatgtggccagtgcagctgcacaggccccacaatgagaaggcccctgtgtgtggggatgaatgcttcaaggttgctgtcaggaaattcttaatctttgaatttgtatcttataagtcaagtccaatggaatgtccatgagagggctgggctttggattgcacacagtcctgccacctcccagcgtccctgtgcggttctcaccttctggccccccggcatctcaggccctgccagacctccctatctccctccctacgtagagacttctactgccctctaccgcggaagagacatgggtgtgagcacgggagggttggggtcaagtgcacactcccctgggtatcttgggattggagcgtggtggtgaccagcccagtctgggctggcaacactgctgtgtgttccacaggcgactcagtgggggtgagcctcttgcctacccgcagtccaggcacctagcatgtcccaacactgatgttgcaatacatttatgggccacccatctgctgtgggttgagattgtggggccatgggaagagagggttcctggcttgatttccccgcccctgatcagtgcatggtgcatctgtccagcagctgatgggagagggtacccagaagccaatggtctgtgtgcaggtaccaagatatggacagggccctgagtgtttgtaagggtttgcacttacaagtatccccatgcctgagggattgtaacattaaatagcaattaaaaaacacattaacggccagatgtggtgccttacgcctgtaatcccagcacttttggaggccgagggcrgcrgatcacctgaggtcaggagttcaagcccagactggccaacatggtgaaaccccgtctctactaaaaatacaaaaattagccaggcttgttggcacatgcctgtaatcccagctactcagcaggctgaggcaggagaatcacttgaacccaggaggcagaggttgcagtgagctgagatcgygccactgcactccagcctgggtgacagagcgagactccatctcgaaacaaaacaaaacaaaacatcttaacaagccaagagaaagcatacggaagaaaggaaaaacttttatgttttattattgtttgtagcgtcttccccctgctttttgaacggggcgggggcttgcattttcgttttgcatttttcatttacaagttatgcatctgatcttcggtgctaacaaccatggaattccaccttgtctacttcagcaccttcccctcccctccccttcaccctcctgtgccatggagagagaaagaatcttcccagattcttttttatttgttctgaatcccaaagcagatctgtgtctacaagtaacatcgcaaataggttttcttagtagcacttaagaggggaacaccatacaggttcaaaaccttgactcctttgccagaaactgccatattgccagttggttctgtaagtatcttagggcttgcagtgaaatctgtgctgcttctggtcaagtcagctttgttctgagcacagccagtaatatcatggccactctagagccagtggcattctgaacaagtccttgggctgcttctaacattgctggtctttaaagataaattttatggtaaggaacgcaggttgtgaacaatttgctttgctacttgatgttttacaaattctatcagcaaaggctggaagaggagcagtgaatatctctgtccaccactaagggctggggcagtgatgtatgtggagccagggtgtgaaattgacaagagggaaagcatggaatggagatggaattgtaataggaataggaggactggttccattaaatccaagtcagtgggttgggctttctctttttcccttccggctgtgttgcttactgaattctttatctgccacctttttattgccagcatgtctatttcaatgcctgttatgagtctgttcacgttartaaggaagctcagctttgtcttacgttcctaaagctgtgcttagttttaaacaacaacaaaaaatacatgcattgtattattcatctgtgtcttactttgttccatagaagatgtgaggagacttctaagaacaaacactttaaaaaaaaaaaaagggcacagaaaatataagagaataatcagtgcatcagtctgggctggaataatatagagagtaaggaaagatcagcctagggagaatgaaaaacctacagcttttcagatctcaagatttgcacagctgctaacatggacctgcaggtggggttttctgtgtgtgcctcctggtgattatttaacctgaggatttttagcatgaatggaatgaatgcctagaagggctcatcagaatcttgaaaggacttttgcaagctggtacagtggcttgtgcctgtaatctcagcacttcgagagcccaggagtttgagaccagcctagcaacatagcaagaccttgtcgctacaaaaaaataaaaaaatagctgggtgtggtgtcccatgcctgtggtcccagctacctgggagaccgaggtgggaggagcctgggaggtaaaggccgcagtgagccataatcgaggcactgctgtccatgagaagtccatgagttcagagctgacttcagtgaagacacattggaggagcttccgtcccctatcggagtcattcctgcctgttttgtgttgcctgggggccagagccagcacctcagagggaggagtggcaagacctaggctttctggatgttccagtgcctttgtagaataagttactcaccttacatgaccctttacattcttgcagtccaccaagaaccarggaaccaagtggtcccctcccccgaaaaatcctgactttaaaaataatatttgggctgggcacagtggctcatgcctgtaatcccagcagtttgggagggtaaggcaggcagatcaagaggtcaagagatcgagaccatctgggctaacacagtgaaaccccgtctctactaaaaatacagaaaattagctgggcatggtggtgggcgcctgtagtcccaggtactcaggaggctgaggcaggagaatggtgtcaaccctggaggcggagcttgcagtgagccgagattgtgccactgcactccagcctgggcgacagagcgagactccgtctcaaaaaataaataaataaataaaaataatatttgatatactatggaattctaaatatagtctgtgaggaatgattacttaaaagttattatagaaaatatcttccttactccctacttaaaacttacatgctgaaaaaaataaaaattatttttagactgtcaggatggggacacttccaaatcctcttcagctactactctgaatctgggcaccttaatcagttgttcagtgaaacctctaaatagcaatggcaacacaaaatcaccacacacatacacacgcatacgcgcacgcgcacgcgcgcgcgcgsacacacacacacacacacacacacttccccaaagagcaaagtctttttctaactctgaaaatgttttttgaacctaccaaaatttttatgcagtaaagtctttgtacttgatagccatatatgtgtgtttgtatataattctgagtctcctgtttmactttttattttgaaataattacagatttgtagaaaagttgcaaatattgagttctcctagaccccttcacctaactttccctaatattaacttcttcataatcatggtacatcggtcaaaactaagacattaatattgatatcatattatttgctataaactttattcacattttctcattttttccactaataaccttaatctgttccaggacccagcctaggagactgtgttgcatgtagtgagctcttgaaaaattatttcacatgctcctccgtgtagtcctcggcctggtcactcctaattccatggtaatatttcatttaattaatagcaccgtaatctgtctaggcaccagtatccataggaggagtttttcccccactacagagcagagctacaacttcataaaaataggtgacttctttttcttttaaattattgctttggtataggttgctaaaactggtattactggggcaaaggctatcggttttattgcttctgtcacttattgcaaaattactttccagaaagcctgcagcagcatataatcccatcagtaatatcctagagtactcctctttgtccaygtatcagttcactctaggctttgtcatttgtatttattcatcttagtttattgtgtgtgagctactaccccctagttttaaaatttccccttattggcccagtgcggtggctcacggcctgtaatcccagcactctgggaggccasggcgggtggatcacgaggtcaggagatcgagaccatcctggctaacatggtgaaaccccatctctactaaaaatacaaacaattagctgggcatggtggtgggtgcctgtagtgccagctacttgggaggctgaggcaggagaatggcatgaacccaggagacagagcttgcagtgggctgagatcgcatcagcctgggcgacagagcaaggactctgtctcaaaaataaataaataaataatttccccttattaaattatcatagacacaggacatttcctctgaaactctctttctttccattcctggctgttttttcctcttatttttctatgcactttaaaagtaaatttttattcagaaataattttagatttacagcaaagttacaaagatagtacagagttctcatagccccttctccagatcgccgtcatgttgtatcctacagaatcacagtacaaacaaagaaattaacatcaatagaaaattattaataaacactgtattctgatttttaataaacactgtattctgattttaccagtttttcttctaatgcccttctctgttccaggatctaatctaggatgccatattgcattttagtctctatgcatgtattcattcgttcgttcattcattcattcattcgttcattttgagacgggagctcactctgtcatccaggctggagtgcagtggtgcgatctcggctcactgcaaccgccgccttctgggttcaagtgactctcctgcccctgcctgccgagtagctkggattagaggtgtacaccaccacacccagctaatttttttatttttagtagagacagggtttcaccatgttggccaggctgacctcgaattctgatctcaagtgatctatccgccttggcctctcaaagtgctgggattacaggcatgagccactgcacctggccacattttttttaaaattatttatttgagacagagtgtcgctcttcttgcccaggctggagtgcagtggtgcaatctcagctcactgcaacctctgcctcctggttcaatcgattctcctgcctcagcctcccaagtagctgggattacaggcatgtgtcaacacacctggctgatgtgtgtgtgtgtgtgtgtgtgtgtgtgtgtgtgtgttttctttagtagagatgttgtttcatcatgttggtcatgctggtcttgaactcctgacctcaggcgatcccactgcctcggcctcccaaagtgctgggattacaggcatgagccactgcgcccagtccccttaacttcagaactatctgcttctgtaatcttagacattttcttcagtcagttctttttctattttacgccacttttccatggaaaatgttttaaaactttctatatccaaggcttttgtagatgattgcccttcaggccgcatttgttaagaagacaactccttggcacgttttaggcggccaggtagcttgcacttctcaatccccatcacccgctgtgctcatgttactttaatatcttagatttggaatttagcccttttcccgtggcacatggctgaccaaattcttgattaacattcaaataaaaaccagttacaatcaaattgtagaaaacttaatgctttgaaatatatataccgttttgtcagagttcttttctgtcctttgtgtaactccgctcagacttctgtaaaggagatgttctgccacctggtggacaatattgaaaattacatctttaaagaagaggggctgggcgcggtggctcatgctttaagtaatcccagcacctagggaggctcaggcaggcagatctcttgagcccaggagttcgagaccagcctgggcaacatggtgaaaccctgtctctacaaaaaatgcaaatattagcctaacgtggtggcatgcgtctgtagtcccagctactcgggaggctgaggtgggaagatcactcgagcccarggaggtcgaggctacagtgagccatgatcggccactgcacttcagcctgggtgacagagtgagaccctgtctctaaaaaaaagaggggcaacatttcatctggaatcagaatttcttttgcttggaagtaacattagagcccatctaatgggcctttattttagaggtgagaaaaatgagtcatagagttatttgtgataacaactagttcttggtggagatggcatttgaagatgggtcttctgggcctctgaccgctccatcctgctgtctctgtctcagtgtataacacgtcattttcaatatatttgtcaggagaggtttttggtactgtttttagaaccttgttctttgaaacacataattaaggaaacgggtaaggaagattgtgctgccccagagattaaattttctgggtttcagcgtcctcatctttcaaatgaatgtgtcatcaaattagaagtcatttcaggttctgagaaaatttcagatttcaaatgaaatgtagtagccctgatctgtggcatctggagatgaaatagtctgatctgtatttaagtctggagaaggaaagagagagcgccatgaaccagggctggctcttctttcctgaacactcactgtgtgtgtgccctcccctctgccaggcacttacgtgcaattttcctgcaaaaacaaggcattatagttatgtttccatattgtagataagaaaccgatgcttagaagacgtcaatttatcacacagctagtaactaatggaacagggactcaaacacagatgcatttgattccaaaggccaggaaagtgtcacgcccacctgttcccagttatcgcttctctcagctttaagatcattttggggccaggcgtggcggatcacctgaggtcaagatttcgagactagcctggccaacatgacggaactcttgtacctactaaagacacaaaaattagctgggcgtggtggcacatgcctgtcatcccagctgcttgggaggctgaggcaggagaattgcttgaccctggcaggcggaggcagaggttgcagtgaaccaagatcgcgccaccgcatgccagcctgggcaacagagcaagactccatctcaaaaaaaaaaaaatcattttggcaatttgggattggagtagcagagttgttggaggtgggaatgggtgaaggaattggaaggtcagtgcttgaggacagactccttctcaccctcatccagacttgtggtccaatcctttgcggtgcttttcacacgttactgtacctgtgggcaaattctgattcatttgctctggggtgggacatgaaattgcatttctgttaagtttgcaggtgatatcaatactgccagtctacaaacaacacggagtaataacattatacagttggaaacatgataaaaagaaggcaccaattttgtgcagcttctgcagcgaagtagacatagtctttctatgcagtatcttctagttcttttatggccatttgcaaccagttcgcagctgctcaggaactttttttattggcactggattttgtgaaagctttgtgtgcctccttactcttttgttataacttacctcagatggagaggaagaggaaggagatgaaacaaaccatcgggtagtaggtttgacggagctttctgaactgaatggcgaatggacatgagattccaatattcatctgtgagctttatttatctgtgccctcccttggttcctattagcatagattttcatgaagtaattatattagcagctactgactagattagcactaatagataagcaggaagtagtagggaagtaccttttctcattcagatttatttctggtctgtgtagcaaattcattgtcattacttagcatttatatgggatgttacagctgcatgtagttcttataattgatttttattcacgtggtacaggtttctttcagaaatcctgatctgtgtggaagtttgggtttgatttgcactgttgattcattcattgagtcagagacgtttattgaatgctaagtgcgaaaggagcatacatacttaatgtatggtgtggttaagagcatggactctggacccagactgcccgggtttaaagccaggctctgctgcttaccagctggatgaccttgggcaagttacctaccccctctgtgcctcagtttcttcatctgcaaaatgagggtaatgatggagccaacctcacatggctgttawaaacattgaattgacatactataaacactataaatatacatgtaaaggtcttggaacagtccttagcacataataagcattctttatgyattcgccattatactgttcctactacmagaaggaatggatayggcccctgccttcaagtaatggagaagaaacaagcaaattcaatgcactgtaccaggagctgagctactgagtcacgaatgggggttgttccgggggcatattccatggctggttgaaaggggtggctcgggtggtttcccagaaggagacgataccttagctaataagtatatttgaattgtcactggagttagtgattccctctccccccgccaccatacttttcaaaaaatgtaagtgtggaagctttgaaaatgatttgatatgtaaatttgtgttcattttcagcaaatgcttttaggaacagatctgttaagatgaggtccatctgtatttgcccaatactgtggataacattgtttctgttatctgttcctgcgtgctatgtagcaaactgcaccaaaacttcgtagcttaaaacaattatttattttgctcaggatttagtgggttccagagtctggggagggtttggcggtgcagttcctgcctgatccacatgggggcggccggagctggaggatcctcttcaaagatggcttcttctccaacctgcttcctggctcagtgctcctcctcacgtcctccagggcctctccatgtggcttggtcttctcatggtgtggtctctgggtaggcagttgtactttttacctggtgtccagcttctaagaagcaggaaggtgaagccaccaggtgaggaaaggctcttcttggcaatggcagcatgtcacttccaccgtattctgttgttcagagttgtcagactccacttcttgatgagacgtggcaagttcacgttacaaggagcgcataggacgggaggttttaatgcagycatctttgggaggtacaatctgccaaacatgtcattcccacatttyagtcattcaaaattagtgccttcagtacagggcagaaaatagcaacatggttgaatcacgaaaccaaggtccagagccagtgatggatatatcaagtcctggctgaatgagattcagcctctcatgcatggcttttaggttggcattcacaaggggaaaataaggatcatctcattccagccttaggaaaagcagaaggcgcagagaaagtaacctgcccaagcttgcacagctggtcgtggcagagcaggacccgaagccaggctccctgacccttgtccatcctgcttttccgttgagtggtgcagacactcactgccattggccttggctgctcattttgcctcctatcccggaggacagcttttgtgtttctaaaactgttttcctccctttatttgccaactcggccaagcataatgccgtgttcctggcagaagcacggtgttatttcccttattaacttctggtcactacacttgcctgaatgagcggtcgaggaattggcagccgtgtgtgagtccctgagttttgaagggtgctgttgaaacaagatgcattgttgtctaactcttggcagctgcgccctctgatgggcagatgcctggaaaagctaatgaaggaaaggcagacttccctcttcccctgaaggaatgaggtaggaaacaggtgaggaaatgggcaccagccagccgcggtggcagcagccgccatcctgatggcaccagagcggcaggtgtgtgaacctggcctggtgggttcttggcacagaattttgggccatgaataatcacagaactgaacagcctcgggcaggagtagccacgggacatccattcagcaggtctgggtgctccaggaaggccagctggtcgagacctgggggtcctgaagctggcattccaaggccatctggaaaagagccagcacgtctcagaacttgttctctcaggcttgctgcctgagagcttaatgccagatactggtatttagatagtgatgaaaacatttctgctttatttgcagtttaaaaattgatggagaggctgggcacgaccgtggctcacgcctgtaatcccagcactttgggaggccgaggcgggcggatcacaaggtcaggagatcgagaccatcttggctaacacggtgaaaccccgtctctactaaaaatacaaaaaattagccgggcgcggtggcgggcgcctgtagtcccagctactcgggaggctgaggcaggagaatggcgtgaacctgggaggcggagcttgcagtgagccaagattgtgccactgcaatccggcctgggctaaagagcgggactccgtctcaaaaaaaaaaaagaaaaaaattgatggagaactgatggtttttcctacagaacaattagattaattcagatgctggctgggtgcagtggctcatgcctgtaatcccagcactttgggaggccgagcggggtggatcctttgagctcaggagttcaagaccagcctggccaacatagtgagcccccttctataaaaaaaaaaaaaaatacaaaatttagctggatgtggtagaatacacctggagtcccagctactcaggaggctgacgtgggaagacgacttgagcctgggaggcagaggttgcagagagccgagattgcgccactgcactccagcctggccaayagaaccagatcctatctcaaaaaataagtaaataaataattcagatgccaagccatttctagctaagccacaatactttgtcacttataggattcctatttaaaatctcatccaattgtgaggccctatagctaagtcacaaagatcaaggtctgagttctccctctgcttctgactcgtgcttataagaaaatcatttcagtagtcagccttccacattttcagactctaaactgacaccaagagtggcagctctcaacagcagtctgcagtagattcatctgttcactcggcatgtatgtattcaatagctagtacatacatagcagggtagtagatcagtcagactggggaaggaaacaaaataatgcagcagagacaatgctaatatcatttaagaatgacaattacagtgctgctggaattgaagaagtagcttgcaactgcactgcaagttggatttctgttgcttcatgttgaagcagttcggttagatgagttcactaagccctaacacataaataatttcacttagctttaggagaccctcagactaatgatcgcttcatgaaaggtgtatttagttgttgaatccacacattcctaccccagatctctagccagacatgcttagttccccctctgttgttggcaccaataggatatgtgtccctttcgatccatgatggtctcattctctcggcagacacgctgctcaggaaggggcagaaaggtctccaccagggtcccacttttctgccccagccacattaccaatggtcaggttgaactgcaagcgacccttgtctctagcaaagctggaaaatggacccgtgtaaatgacacatggaacccagagccgaaagcatgtgatttctcaaaaagtgcttctcctgagagccatgctttttcagttacgagctcagatgagattgcaacctagagcgtatttgtagaaagtacttagtttttttctcctcttcaccaatgcagtgggccagtgtcactaaataaataaagcaaaatgctacatcaggctcatctcttctcttcagatattcttatgcatctcaccgtgttttggttgagagctagaaacaatggaatgaatgggcatccagtgtcgaccttcatcatttggcaagagtagaggatggatggagaaggaaatgaacatttcttcaggtccagccgtgtgctggtcgctctgcatgcatctgtctgattctcagaaccaccacgcaggggagatgaagttattattcccattgtacaaacgaagaaactgggattccgagaacctaaacaacttccttaaaatcacacatatattatgtgggtgaactgaaatttgaacccaaggaggcaggctctaaggcctgtgttcttccccgtagtacaataatgattatgttagccgatgttcatagagcatttagcatgtatgggcacaaatacaaaaaggtggtgtgaggccattatggacaagttcagttttctgtctttcagttttatcaccacttctggaaatgctgccacgagcctcacagtgctctgttctcccacaagccttgtgagggtctcttattttgagttgagggagccgaggcacagagggttcggtggcttgatcactgttccactgctaaatggcagagctgagatttgaacccaggcagtctggttccagagtccaagcttttcattgctgggctacccttcctctcagtgtaggtcagcccgtccctggccttgttttttgttttgtgtttatgagatggagttttgctgtttttgcccaggctggmgtgcaatggtgtgatctcggctcacagcaaccwccgcctcccagattcaagtgattctcctgcctcagcctcctgactagctgggattacaggtgcatgccaccatgcccagctaattttatatttttagtagagrtgaagtttcaccatgttggccaggctggtctcgaaccactgacctcaggtgatccacctgcctcggcctcccaaagtgctgggattacaggcatgagccactgcgtccagcccggccctgccctgccctttaaagcctgcatttggtttggtcccctgattccctgtggggttgttgtggtgggagttctgttccttaagctcaggttcacctaaagacatgtaactgttttaaagatggagaggtaagagaaaatgcagtttnnnnnnnnnnnnnnnnnnnnnnnnnnnnnnnnnnnnnnnnnnnnnnnnnnnnnnnnnnnnnnnnnnnnnnnnnnnnnnnnnnnnnnnnnnnnnncacgagactgggtaatttataaaggaaaagaggtttaatggactcactgttccacatggctggggagacctcacaatgatggcagaaggcgaaaggcacatcttacatggcagcaggaaagagagagggtgtgcaggggaacttcctttataaaaccatcagatctcgtgaaacttactcactatcatgagaacagcatgggaaagatccgcccccatgattcagttacctcccaccatgtccctcccatgatacgtgggaattataggagctacaattcaagatgagatttgggtggggacacagccaaaccatattaatgacatacccgagcagttgactcccagtgaatgacaaaagaggaaaaaacagccagagaatctttgtccccagtgcagggccgtggtacaagtggaaagatgatgaagcaggagcagcaatacctgggttctagccccctactgtcagcaatgagccgtgtggctaaacctctctggacttcgcttctctcatctgtaaaatgggatgacgctattgcctagtctgggaacctcacagtgttgctgcgaagatgaaacaagacgtgttgtagagatgctttgataatctacagcctactctaaacatcaagtataatttttgtcttccaaaactgtcctcaaaatattttcatgtaatgggtcccagcagtcctgccagtcggggtgagttagccgtttgggyggctgtgtggacagagtcacctagaggcaatgtggggcttagcccagtcccaagtgtgtaccatttctaaggccacctcattctctgagcctgggaatcatgatgttagcagtgttttacagtatgtcgtagcttaaattaagcagcatggatttctttttttccagagaaatttaaagtgggaaatgtctggcaataaactggttattaatgaggatgcattaaaatgtagatagcacctgatgacgtgagaaatgcacctgatgatgtgagaaagttttcacgtaacttccagataggtgaccgtgaggacatgtgtaaagaagttcctatatgttaatgggggtgtttgtcgcctcctcttatrgacaaaacaagccttgaaacaatttttcactggttatatttagtaagtgcaygtgcgtgcctgtgtagattttttacttaacgtagaatgaattactgtccctttttctttactctggagcacatttacgtaaagcacttgccagttcagacttatttagtggttcagccacaatggaaaggatgcctcttgagtttatcttaccagccttcctttccttgtacccctggtgaaagcccagtctgttctcaacctccagaggcctgcttgaaaagacttcagctttagtcacaggggttttatactagctaaaaaagaaaaagaaaaagaaactcacctcaaggctctatataaatgtaaaaatggaaattrcagccaggcatggtggcttatgcctgtaatcccagcactctgggaggccgaggtgggagcattgcttgagcccaggagtttgagacctgcctgaacatagtgagaccctgtctctgttaaaaaaaacaaaaacaaacaaacaaaaaaaaaaacagagaaaaaataaggaaggagggagggagggagggaggaaggaaggaaggaaggaagtcgtccgaaagaaggaaggaaggaaggaaaaagaaagaaagctgcccccattttacaggaaaacatagctcctttgcatgctccttgagttcctctgctgcttctccccccagtgttcgtgttgttattgagagagtgacaaggactgccaaaaatggggattgccacagaatctggcctgctgccattaacggcattaaagcactcttactgtccaagagataggctgtgggtaaatagtgtagtgcctataaaacattttcccccaaatcttttaacttaaaaagttartactggggacaaaattgacacagatagctcagaggttccccagtggcactcaagcatgtgttggtgtggcattgcctgcaaaacaccttcacattcctatggagttctttgtgggcctctctctttgaaagatgtctgtagagatgagcttggccagtgctcagtaactgtgtactagccagtgtggggatgtgctagttcaagctagtccctttcccactagattaagctgcatagaattatgatagagtggtttggccagcactgggatacgtcacattgtaaataagtgaaaatattcataatattgtgttctgttttatgtgctaaagtgtgaactgccatcctctccttcaaaagcaatgtgagaaatgggaagctgtattgcattgtcatggaataagtttcacagagattgcgttttgcatgtggaattataacctagatacagaataaacctgagtctctggtccattcatctctgttaaaacaagaaggttcatagggagagttaactgatcactctgtttttaaacctttgccctgtggataaaaagcacacagcacccttggtagaggattccttgttttaacatctctttttcttaagaagttcaccattactgttctgcaaatactcctcatcattccaaagcttctacttctttgatatcctgtagaagggcaactcttggttgatattttcccaactcattcaaatactttaagataacccattccctctctgataaaattgacctcaactccctctacctttataattcacagaactcatgttgctttaattatttttggtgtttttttctctggatagtctaaattttctcattggatgaaaaaaattcattgagagatcttaagtactggttatctgcttagcacttacctaggtattgtgggatatgaaaaaaatacacatggggaccctgacctcagtggcttgtcaggggaccgtagcaggtggtgggatgagtactgtggacagaggaccccactgttcacccgtctctgctgcttccagcccgggagaccttgggcaagtcacttccctttctttgatgggcctcatccatcaagctgaagacaagaaatcttgragttcagctctaaaagccaggttctggggctagctggggagctggagttcacttagagaatagcagaatatgaaggtgaagagatgagctaccatctgcagttggagttcagatttgggatcaataaacttctgyagggcctcaaatcactagacccaccccaggtccattcagaagacagtcccagttgtcccacaggtggcagtaatgagccgcagtcaacacagcacaggagttgccgccctgacttgaccctgagtgagagccctggccacttgaggaagcctgcagaagtctgcggtgcagcagagcccagggacgtggtatcatggcctgcaggctgtgtaggctgcatgatacgaagtcctcccctcttccctctgaccttccccaccacagactccacactcaggtctcccgttcactgcatacttctgccccgtcaccatctcaaggcttcacaacaggatctcacctgcggttgcttctcttggaattttgggaatccattgcctcgcaacatcctctgggtccctccttgtttttgtgtgatcaccagggtcggtcagtcatgctcgctctcagaatagtttctagtttctggacctcctgggcttccttcagtttctccctgtctgtctttcctggtggccacgtacacacagggtaagacatgattgcacagagacacgggtatgttacctacttggaacaaaatccaaccacataagtctacatgggccaaattgtttctttcaaagggaaacatatcttcttgcattttgaaaatcgcagctcagccaatactgaggaacagttgccaatctccatgtgcagaacgggtgggaagtgactatcttaggaacatgacacatgcttctggaacaggcttgccaatgacagcatccactttttgccttcttgtgagcagaagccacaagggagcacttcattctgtctgtctgtctgtctgtctgtcttcaggtctagcctgagagatgtctcctcctcagataccttctcagctctggggttaggtttctagccttaattccagtctgtggctgactgtggtctcctttttcatgtctcagctctgtgcacatacattcctccccgtaggaattcatcatatctaatttacagcaaattctttagamcaactacctaaaatgttttctcttctgcaattaccatgcctatcttggcagagagtttctttgtatttacttcacctttgcattacacactgagttccagtcggtcagggaccatttccctgagtgttgggcagttaccaaagaaactctttaaagacagacttcactcacacagggcccaggaccctgcagtgccagctccactccctcaaggcagagcttccttcttattagtcacaactctggctaatgctctcaggacttggatttactcattcgtgaaatgaggtkgccgggttccggggtcccagagcccttgtgttctgggtctccatgctgtggttaaatgctcctcccccgagagcacagtgcagaatcccaggagtcagcctggagagctcagacttcataaatcctctctctggggttgggaacagccgtgcttttaattgaagtctttgtaggtctttgcacgttatgaactcattgagttcatttcagacactttgcaaaaagttgcagacttttcatttcttggtgactggtacagtaaaacctttcttagaaaacaacagtgaaaagtgaaattagccctgaagatagttatcagtaacttttactgagtaccaggtattgttttaaggccaacttcgcagatatamattcatttaacactcactaggatcaggctctgcgctccggggctgaggatactgcagaccaagtccctgcctttgtgtaacgtacattccagggtgtggagagagaaccacacaagtggaataaaagtacatcaggtgaaaagacttactatggagaaaaacagcagggaagagtgtgagcgagtgccaggaggagtagcagctttaagtaatcagggaggcttcccagaaggtgacactgagtacgagatgagagagggaagcaggtagattgggagggtggggggagcccatggtgatgagtccttagtggatgaaggattggcctggaggccactgtgcctttaagccaaaggaatraccagtggggacaagagtcggataaagtgtttgagaggtatttcacagcaggcaatgtcctgagttatcttttagcccaaacccttctccctcctcaactgcccccttcccctctcttgtcagatgactaaaatgaggtctgagtaaatcagrtgacatcctgaaggttctagtcagtagcagaactaggacaaaaacccagggactcatggtttctagtgcctgcaactcactacaccaaaatctagaaagcttaagactaattaagcaccaccccccaccnnnnnnnnnnnnnnnnnnnnnnnnnnnnnnnnnnnnnnnnnnnnnnnnnnnnnnnnnnnnnnnnnnnnnnnnnnnnnnnnnnnnnnnnnnnnnnnnnnnnnnnnnnnnnnnnnnnnnnnnnnnnnnnnnnnnnnctgattctatcatttgcggcaattgaattctataaagtcaccagcaacactgaattagtgaatactgaagcattgctcctagaggaaatacagagttaggttcctgcaagcctctggtcacaacattttcatcacctgatcagtatctagccttgttttatgtgtttccatttatttgtttatctatctgtctgtctatctatctacctatgtatttatttgttgagatggagtttcactcttgttgcccaggctggagtgcaatggcgcgatgtcggctcactgcaacccccgcctcctgggttcaagcarttctcctgcctcagcctccggagtagctgggactacaggcgtgagccactgcacccggataatttttatttttttgtttttttgatttttttgagatggagtctcgctctgtcacccaggccagagtgcagtggtgtgatctcggctccctgcaaactccgcctcccgggttcacgccattctcctgcctcggcctcccaagtagctgggactataggcgcctgccaccatgcctggctaatttttttttgtatttttagtagagacagggtttcaccgtgttagccaggatggtcttgatctcctgacctcgtgatacgcccacctcagcctcccaaagtgctgggattacaggtgtgagccaccttgcctggccaatttttgtatttttagtagagatggggtttcaccgtgttggccaggctggtctcaaactcctgacctcaggtggtccgcccatctcagcgtcccaaggtgctgagattacaggcatgagccaccacacccagcccccttatttagtgtatgttattgatccgttgaccttcaactcatggccaccagcaccataactcacccctgaatgacttacctaacataagtatttctccataaggcacctcatagccttctcgcacttaaaagcactttagcactgttctcgggagccatgttaaacagcaaaatcactgctaaagggcacgaaaatgtgaaaaaagtggtactaaatggatcgcaaaaaggacacctctttacagtataagaactgaaacaagataggggaatgtcacttagctcaacctcagctaggaacatgtgcattgggcaactcaagtgttttgccaccctgtacatgtccacaaatgaccgcaaaagcaccaggagtatggactttggggttacaaataaactttagcaagtaggtgaacttgcagatatggaatctgcacatgatggggatggagtgtatttgcacttgagctattcggaggaaggactttattcaaggctcagtggcattattccgagtggactcatgtrcaaaggcacattttagggtagagagtaccaaactagttctgaattgcctcagattccgcctagggagcatgcttacggcaaacagttgttaaaaaccatacacttgtttatttatttgagaattrcattttccatattgcaaatatacctgttactatttgagactgaactgtgtaacttcaccattggcccacagcgtcccagctctgaccccccagactggcgggtacagcctgactgctgactgcaggctgtctctgctcctttcttaggatcagcgtttcccctagagctcacgtggcctagagctcatttcccagcgaaatgcaatgttccacttcatgtgcacagtttggtgtgcattccgattttcctctgtgcttactctgcaaataacgtttctcagctttgcagcagcagaaacgtaatctgtagtgtaaatcagccatgcggacctcaggacttgctttccaatcttttccaagactcctgcaggggaaaactaaaataccactcacactttcagggagtaagaatggtttcccagtagcgcagacatctgctgcgtatcagcaggaatagaagcgggattctgccagccgagcttcttggcctcgacttccatgggcccttactcagactccgagaaggtgggatgtgaatctcatgtttactgccacacactcagatttgcttggcatttgagcatctccagcagcagatttgatgaagttcccttttgtgtaacgtgttcactgttcctccaggggaatttccacagtcactctcagagcattcttagagatacttttgcaataactgagctgtccttttttttttttttttatgagaaggaatcttgctctgtcagccaggctggagtgcagtggcacgatctcagctcactgcaacctgtgcctcccaggttcaagcagttctcctgctgcagcctcctgagtatctgggattacaggcgcctgccaccacacccagctgatttttgtatttttagtagagacggagttacaccatgttggccaggctggtctcgaactcctgccctggtgatccgcccgccttggcctcccaaagtgctgggattacagnnnnnnnnnnnnnnnnnnnnnnnnnnnnnnccattgagctgtctttgtaggccttaggctgcggtgggttaggggtatttaagaagcattgtgattgggagtgtggctatggggatttgacagcagccctatgtcagactgccaggggttggatttaagatgtctttccacaggttcccatcccactcttccataagacaatctctatttcctattaaataaaaaagagtattttgcaaaagcatttggcttttygaacaaactaaatattattgcattctgtgcttgtcccgtatcgctgagtgcaggaatagtccaaaccatactctccaaagcttctgcaggcctgttccatgtctagccggtccgatttaatgagcaggcctttgcagcatcccagtgctctgaagctcaaagtctgtgtaggggcagagggaggagggaggtgatgtcatgacaatgagttatctagatcccactggtacctagagaagaaattagcacaaagctctgcatggaggctcggctccagcacaggaatccgtgtccccctaggkgytggkctgggaccagctggaggcccacttatgaggactgcagacacattaagagctcaggatgcacctctgttgaggtgtcccaggacccttggatatgggctccagtctgcaggttccaggccccagcagcttatgatggcgctcctgataagccagacatggattggattgggcrgagtaagcccacaggaagaactggccctgtggcctacagtgtaagacacctggagttggacatgttacctgactctaggtcccccgactgaatcgatattttatatgacttttatatcactaggcatggcttagatcaggatttattgataatttagagctaatcataataaaggttgacacattgtatgcttaccaggtaccattgtgagcactttatacacatgataccatttagtgctcccaacattccttagaacataagcacagtcatcccccagtacatgcggaggrttgatgccaggacccccgagtataccagatccacgcatactcaagtctcacagttgttccctgaggagcccacggattcgagaagtcaaccctctatgaattctgcatcctgcaaatactctattttcaatctgcatttgcttgacaaaaatctgtgtggacctacacagtccaaataatccatgttgttcaakggtcaaccctatgtctgtcgtttccatgttagaaaagccaagacacaggggaaggtcagcaacttgccgtgtgtcatacaggaattaagtagggagctgagattcaaactgcaatctctggcttcagagtccaggctgtgtacaattttactattattccaataaaaacaactgcttcccataggctgtgctgggctggttgccagggttcacagccccttgaatccacagcagtgcctgcaaaggcaagattatccctccggtgatgcagatgaggaaactaaggacgatgaatgtgctgaaggcacaaatagggagtggtagtccaggactgccagtcaggtctggcctagccttgccatgatatttcagtctgtctcaagctcgagtgtcttcatctgacaagtatttcttgagcatgtggcacatccggggccacttttgggtggtgggtatacagaggtccacagaacaggcctgatctcaaggatccccctttagattgagcatttctgctaatagaacagctaatgtagagcagagaatggggaatcaagactagggctgggagctgggcccagtggctcatgcctgtaatcctagcactttgggagactggagcaggtggatctgttgagcccaggagttgaagaccagcctgggtagcacagtgagaccccgtctctacaaaaaaagaaaaaattagccgggtatggtagtgcgtagcctgtagtcccagctactcgggaggctgaggttggaggatcacttgagcccagaagattgaggctgcaatgagccatgatcttaccactgcactccaacctgggcaacaaagcaagacccctctctaaaaattaaaaaaaagactagtgcactttaggaggccgaggcggcggatcacctgaagtcaggagttcgaggccagcctggccaacatggtaaaaccctgtctctactaaaattacaaaaaaaaaaaaaaaaaaattagccaggcatggtggtgggtgcctgtaatccccgctactagggaggatgcggcaggagaccatcacttgaaactgggagacagaggttgcggtgaacctcagatcaaatctagctctgctgtttatttacattgtgacattagacaattcaactaagttccctgaacctcagtttctcatttagaaaataagaaatacagcacctactttgtagtgttgttgtgaaaacatgttgtgctacatgttgtaaagcatgcagcttgtggcaagtgatgtgtaaatgtcagcgcccaccttcatgctttccctgccaagaccagacttgtatataaaacactcagcacagagtgagccctcgataaatagtcactgctagtatcatgatgattataagtgattatcagattacatatgtctaatgagatatgcctgcaagttcatctttaagtaaacatacacttaatttgttccatgacattctggaaacattgtgctacgtctctcggttgaacccacctctgctcaaattttccattgataaaaataggactcataatgccagcctggttcctgggcaggaaatgactaatgcaattaactgtttctgtactaaatcacaacccggaggcgtgtctctggcatgagtgaagaatcgtcaagaatcctggctgttaggatgctgattgtcaggttcctctgcctgcatcgttgtttgtcagcctgcagtggcctggggattgaaaactggagtgggtttcctgcagagagcaaaccctttcattagccaacctgaacatgcagtcgactgacacttggcgtttctctccgtaaattaataagttggcatttctggttgatatttttagatttgtatgacttgttcataaygtgctgatgattgaacctgctcagcaggttaatgagagtcgctgtggggcaggcattgcaaataatggtgattgcatggtgcaccggcctttctttagtagcagaagcccttctgtgtaagggcaagagcagggccactgtgacaggggaggcccagaggcctcagccccacactgggctcctctgcaggttgcccctggacctaagagtgcwacacctctggaaaacagtgtggagagcagtgctgtggcctggagggaggaggacgcagctagcaggcagttagtcggttccctgggcatttcctttgcctccataggcctccttgcctccagtgatctgttagcaggtgttgggtgatggtgccccctagtggacagtttgcacaagggcacccacactacctcagggcttttggttcctgcagtggcgggctcccccattgtcggctctgaggtacttctgagaagcctcgggaccagcccaaagctataaacgtagagctggtgggctttgaagtactcactccccattgagggattattttcttctcctcagggtactcctaggaggccttgaattcttcggggcctctttagagtggggctggcctccctgggctccggtgccagccgggtgtagctactgggtgcacccaagattgtgaggaggggaggaggcgtgttgtgcacacgtgtatggggtgagaggcattataggtgtggcctggggatgccggcctccctctctccgtcaggaaagccagcattgttgccgcacctaggaggcagcaaggcgcggtgacaggaatgtgtcaggacacaaactcaggcttcactgccagctctgccatatgctcatggttacctgaagtgtatacaccaccgtgtgtttgttggctggggctgccataacaaaataccacagacgaggtggcttcaactacagaaacgttcttttctcacagttatggaggctgggagcccaaggtcactgtgaaagcaggtttggcttcccctggggccgctctcccgggtttgtgctggccgcctttttgttctgtccttacatggcctattctctgtgtgggcgcctccctgctgtcycttcctcctcttataaggataccacacacacacacagacacatacacacacacatatgccacacacacaccacacacacccacaccatacacatatgccacacacacacaccacatacacatacacacatacacacacacacaccacacagacacacacctgggcacagtggctcacgcctgtaatcccagcactttgggaggccaaggtgagcaaatggcttgagcccaggagttccagaccagcctgggcaacatggtgaaactccatttctacaaaaaaaaaacccacctttttttaattagcaggcatggtggtgcacacttgtagtcccgtctactcaggggaggctgagcccaaaaggtgaaggctgcagtgagctaagatcgcgccatttcaccctagcctggaaaacagagcaagaccctgtctcaaaaaaaaaaaaaaaaaaaagggtcaggcacagtggctcacacctgtaatcccatcattttgggaggccaaggtgggcagatcacctgaggtcaggaattcaagaccagcctaaccaacagggcgaaaccccatctctactaaaaatacaaaaatcagccaggcttggtagcacacacctgtaatcccagctacttgggaggctgagacaggatcattgcttgaactcaggaggcggaggttgtagtgagccactgcactccagcctgggtgacagagtgagactctgtctaaaaaaaaaaaaaatatatatatatatatatatatatatatatatrtaatatattaaattaaattaaataaagcatatcagtcctattggagtagagccccattgttagagctcatttaacttaattactgcattaaagaccctttctccaaatacagtcacattgggggttaggacttaagcataggaattggggaggggacacgattcagtcttaacaactaccctgtacctcagtttcctcatctgtgaaatggcaataataatatctgcctcatgtgttgatatgtggattaagttgattgaacaagatatgtaaaaggaagtctctagctgagtcctttgcatgtatgtctatctgtacctagatccatctacatatacacatatagacatgcatatatgtgtgtatatatgcatatttacatatacatgcatatatacccgtgtgcacatatatacatgcatatgtacatgtatatacacacactctcaataagtgcatgtgtgggacactcctttctgccacctctgttttaggaaaccttaaatttgccaggagtctgtttgcttatctcaaaaatgggagagaggagaccatgtggcctaagggaaaagacatctcactttgggtcagaagattgagggttcaagtcctttcatggtcaaaatgtttccaatgttttgtatggacacttaaaaaagatgcagagtccctctttcactgggttcactgggttgtgaaaattgaactaaattaagttaggtaactaataataaagcacctgtggttacatcagagcgctggaaatggaagtttcctccctcctcattgggactctgaaatccccttaactaagtactggtgggaatttttgttttcttttttcttttcttttcttttsttttytttttttttttttttttttgagacaggtttcactctgtcacccaggctggagtgcagtggcrcacctcagctcactgtagcctctgcctcccagtcaagccattctcctgcctcatcctctcacctcagcctcctgagtagctgggactacaggcgtgtgccaccatgcccagctaatttttaaatttttttgtagaaacagggtcttgccattttgcccaagctggtctcgaaytcctgggctcaagcagaagccacctcagcctcccaaagtgctgggattataggtgtgagccactgtgcccagctgagaatgcttttaagttaacaatgaatacttagaatctatgcttagaatacaytgaagacattatttcattgccatgcaaaaatgtgtatcttgtgtcttaaaaggaaagcatgttgatgtcatgactttaatgctacacaaatgtatatcttaaattagaagccaaatccaggcccctccaggacagtggcaccctccccctctccagcatggcctcagaccactgaccttcatcaaactcattctcgcttccccactcgagccacacaaggggtcaggaaggtgtctaggctgctgttctggaccatcgtacccttaccaaagagatctctcagtgcggaggagtgaggagctttggcctcccctgaataagcgtgaggaagcaaagattccccagcaataaagtagatgctgaatccccagcaataaagtagatgcygaatgtcatctcagcccccactggagtgagactgcctttgtgcattctctccagcacatcagtggttcctataaatctcacaatgattgcttttctcaaggttgcttcgtggcaagtctgcaagtgcgctttctccaacagagggaggaggttaggaatagacttcgcaggcaggagctgacttgggaatggcccaggggagaacaagtaaagatgcatctgctttgaaagaatcctttcgttttcatttaaggacttgacatcagggaagttttatatcctgggaactcgcctggctccgtgttgtgtgtgaagaaggattgtgaggccgctgctcaactgcgttgcctctttctccttccttgtgtcaaataatgtagcttttattttgtatgattgcgtgtgcgctgggtgtttcccaactgcaggggatggggttagtattcctggccctgtgagcagagacagaggtgacccaggctgggaactgcccttcatgaagggaccagccattagtgggtggcgggcaggcaaggagatggatatcgtgggcgatatttcaattatggatcaacccttagtgcctggcacatggtaagcgctacatgggggttagccatgatcatgaccgtcctctttgtagaagggcctgtcagaggttaacatcaggggagcttttccagttatgtgtcttgctctgaaaaataggaagggggaaagttaagttaatggcagtagtgggcccagggcttcaaagggccatgcatcgtgttttctacctgagtgctcartgtattgtagacagtctgggggaaatggcaggaacagctggagcgctcatggggaccagtgtagaaatgctctctgggtcctccctggccaccgtggtctctgccatgctgaataatgaatcaggctgattccttgcttcagccggatggagaactgggtcaagcttcactccagagaatccccagacacctctctggcagaacccactgacatcctagctttgaaaagcatttcagtatttaaaaaaaaaaaaaaaaagcaataacaaagcctagttatatttaaaaccatatacataatgacagtgatcgtttctgcctgtaatgaccacaaatgccagtttactaaaaacttctctattatggaggcaacatccaagaggtattttgaatcttgaaaagcttgcctgttttttgtatggactctgtgaaagttgttttaggtcatagccctttgctcactggctgccttattatttatttatttatttatttatttatttatttatttatttgatggagtctcactctgtcacccaggctggagtgcagtggcgccatctcggcttactgcaacctgcgcctcccaggttcaagcaattctcctgcctcagcctcccaagtagcttgcactacaagcttgtgccaccacgcccggctaatttttgtatttttagtagaaacggggtttcgccatgttggccaggctggtctcgaactcctgacctcaagtgatctgcccgcctcagcctcccaaagtgctgggattacaggagtgaactactgcacctggcctaattgccgtatttctcagtgaaacctgggtggtgaaaagaccctgggctgcgggcagaaatcagacccgttgctgtctactggctacagtaactaggagatgacagagggctgtacttaactcttagggaaatatcacaaaacatgcgctatcaaatgtaacaaatgtaccctaagtgtacattattctggccaccaatgtgaaataaatagtatgtgggctatatgattattaaaaaggttcttcttcatagtcacatatagcaggaatacatggcttttttccacctgacccccagaacatagatagaaaaggtctccatagagcagctattgcagcataggcagcagccgggatcaccatgttcctaggatctagcaagacaggctggaatcccatatcccgcagtggtctgtgtatcctccccaaaaccctgcctgttccctgtggcttctatttctcttatgttgaatccctattctctacgctgaaacttttgcatgttcctttttctctgccaacgttctcctcagcagaagggtaacacccttctcctttaattccccctgacaacatcagccatctctgtaagaggccctttgctggtgcatcaagggtaatatcaagggggcttacgtcaaaatcagtttcttgcatcattttttatctatttatttttttgagacggagtctcactctgttgcccaggctggagtgcagtggcacgatcttggctcactgcaacctctgcctcctgagttcaagcaagtctcctgccttagcctcccgaatagctgggattacaggcacctgccaccacactcagctgatttttgtatttttttttagtagagttggagttttgccatgttggccaggctggtcttgaacttctgacctcaggtgatccaccggccttggcctcccaaagtgctgggattacaggtgtgagccaccacacctggcccatttttaaattttattactgttttttttagagatggagtatcgctctgtcacctaagccactgctggaatgcactggcttgatcctagctcactgcagcctcaaactcctgagctcaagtgatcctcccacctcagcctctctagtagctgggactacaggtgtgcaccactgtgtctggctaattaaaaannnnnnnnnnnnnnnnnnnnattccccagcatttcgaatgccaaggtgggaggatcacttgagctcaggagcttgaaaccagcctgggcaacatggcaagatctttactctacaaaaaataaaaaactagcagggtgtggtaggcacctgtagtcccagccacttgggaggctgaggtggaaggattgcttgagcctgggaggtcaaggctgcagtgagccatgattgtatcactgtactccaacctgggtgacagagtgagaccccatctcaaaaaaatacaaaaacaaaaacaaaaaacctgggtcagactttctcactttcacaagtcattcagtcctgcctgtcagctccagccaccctgaagttgtgcagccctttcttgcccctccctactttcctatacccatttcttctgttagctcttaaattcctgatcatttcctatgtagagccatttaaccggtttcctcatccactaaccaaaagaggattgtgatgctaactagaaagctttcgctagccctgattcacgtacacacatacaatacgtgttgatgtcttgacggtgagcactctgctgtctaacctccttggaactcttttaaagtacagtaaatccttacttaacattattagtgagttcttagaaactccagctttaagagaaatgatgtgtaaggaaaccagatttttttctcatcaacattatagcaaaacaacattgaaagaagttgaacaaaaccttattcgaggtaggtcattttgcttaaagtcacagttttcaagaacctatcaatgatgttaagtgaagatatactgtactttgtatttttacagcttttagaaaactggtgagagctttggaccatctttccatcacacacacacacacacacacacacacacacacataattttggatatattttcagggtgtttagaacttcctgaagctcatccatggatctcccaggtccgtggacccttaataaaatccctgaagtgtggccgagcgcggtggctcacgcctgtaatcccagcactttgggaggctgagctggggtaagcggatcacttgaggtcaggagttcgagaccagcctggccaacatggtgaaaccccatctctactaaaaatacaaaaattagctgggcatggtgatgggcgcctgtaatcccagctgctcaggaggctgaggcacaagaatcgcttgagcctgggaggcggaggttgcagtgagccgagatcgtgccagtgcactccagcctggcagacagcgagactcagtctcaaaaacaaaaaacaacaacaaaaaaaaccctgaagtcagctgatgagtcagcctgcccttctgaagaggacagagcaccccccacccccaccaggctctgcatctctccctgtcccccaccacctaggggtatctttattgatgctcagtcattaattgtaaaaacaaaactagattggcatagctggctatgatatgtcaggattgggggatcagagaccttgagaaaatagtggccaccttttctcacctatttcctttgggccaggccctttgcaagattcttaatctaagtcatcccatttcatcatgccaggaccctatgaggtccatcctgttatcctcatggcaacagatgaggaaactgaggctcaccaagattgastaacctgggtcacactgctaataagtggccgacctgagatttcatcccagagttagtggcttcaacayctgggccccaagccacactgygctgggccccttctcccatagttgcaccttactcttcttgatccatgtccacagagctgtgtgaccttggatgtggcagccaaaygaatatgcccttccagttttttgaaatactacctagggcagagtgtttggtctgtttgtcccattgataataagtctctggtgcctagcacatggtaggtgtcataaatatttgytgaatgaatgaattaatctgtcctgtaaggctcagctcaatttcatgtttttaagaaactgtccatcactaactctgaattaaaaaaaaaaaaaaaaaagcccgggctcagtgactcacacctgtaatcctagcactttgggaggcccagatgggcgaatcacttgaggtcaggagttggagaccagcctggccaacatggtgaaaccctgtctstactaaaaatacagaaaattaggtgagcgtggtggtctgcgcctgtaatcccagctacttgggatgctgaggcaggagaattgcttgaacccgggaggcagaggttacagtgagccaagacagtgccactgcactccagcctgggcagcagagtgagactccatcttaaaaaaaaaaaaaaaaaaaacctccttccgtgagctcccaacccatgtttgtgcctcagtgtatccttcattcatggtccgtgctatagattgctgctatgtgtctgctctgtcacaagcttctcaagagcacgaacttatctactctcagatactctcaggtaactcaggtgtatctacagggaagaataggcactcatctctgtagtcctccaggacctaacaggcactcaggaaatgttatcatcgcgaatacacagttgttattgtgctgcaggataattaggcttgagtggtaaatgattcccatagatgactgttaattaggattacatttgtagtgtcgggccacattttagctttttgatgtgaactcttttcgttttctaacatctgtaacttaacgttgttatatgttctggtaccatttaccttttggtcactgtctctcaacagtcacagagcagcagctgtgccctgggtgtcggatatgctccttcatggacatgagctcattttaccactgtcttctttggtcctgtaccccgaggctgactttcctggttacaggcaaggcctgtatcccacggctcactggctccyrgcccctggtctcacccctcactgcatcccctgccccacctggtccctgaaggagatcccccagttttctgacagcatgctctcattttgctgcttgcattaaagcccagagaaaggaaaaggacagaaacctagaaattcagcaggagaaaagagaaatggaagacaggaaaacaaaaattgaaataatagtatcttgcggaaccagagagaacgaagtccatatttgctgagggcctacaatgtcccagccacttgcccttcttcatttccttatcactgttcaactgagtaaccttagatgcctggaggctgagcatccactgattggaatataattcgaacccaagaccatctggtcatagatacccaggctttgctctgtgttctgctccacgacacatgttttagggagaggtcctctgcaggtagatggctgtattataaaactcagagatagaagctgcacacaagatgagtgttccaactaagataggatgactcaattccactgtggaagaaaagagaacaaatgggagagaagggggcccaggtcaaaagctgtgtcccttctgggtcagccatgacccagatcccttaaatgcccatagtaactaacaacaataacagaagcagcagcaaactcgaatttagcccagttaatcctgacaacatttgttgtgagacaagttatttttagtacccacattttataacgaggacattgagacacagacaggttaactaactcacccaaggtcaaaaatggtaagaggcagccctgggatttgaacctagattttactttcagtctgaggaaccacataacttagggtaaagaaaggagccatctgtctwtagcagtggttctcaaggtgtggctcccagatcacaacttcagcatcatctgagagcttgttagagatatagattcttgggtcctacccagacctactgaatcagaaactctggggaaggggcccagtgttctctgtgtgtgtgtgtgtgtgtgtgtgtgtgagtgtgtgtgtgtttcttttttctttcttttttttttgagatggagtctcactctgttgacctcaagtggtccgcccaccttggcctcccaaagtgctgggattacaagcatgagccaccatgcccggcctgttgtgtgttttaagaaagccctccagatcatatattcgtatgtatcgtggtctacagtacatctccacgtgctggctttggctgaaatctgttaaactagagaaatccttaaaatccactaatagaaaagagtaaaagtttatcaataataataataaaagccggatgctgtggcaaatgcctataatcccagcactttgggaggccaaggtgggtggatcacctgaggtcaggagtttgagaccagcctggccaacatggtgaaaccccgtctctactaaaaagacaaaaaattagcgaggcgtggtggcgcatgcctgtaatcccagctactcgggaggctgaggcaggagaatcgtttgaacctgggagacggaggttgcagtgagctgacgccacgccactgcactccagcctgggcaacagagtgagactccatctcaaaaataataaacaaacaaaaaataataataaacatttgcgaagttttgactgtctgccaggcatgatgctaagcattttaccagcattatcttctttgggcctcgcacatgctgtaaagtataggtggcattattattttacagatgaagagactgagacttagagacctgaagtgacttaactcaaagtcaccagccagaaagtagcaaaatcgtgacttgaatccagactcctctgatgacacggttctaccctgaaccattactcttttgcccttttggttaagaactattgaagaatgggcataagtcaaagtgtatatgttgatttttttttgttaacttttttttttaagtggcagatgacttgattaaatactttgagctcttcccatgctccaagatgagcatttattcccagaactgattacgcccggcatcccttcctgggtttaagggaaagtggtggtggttatgaaccttcctggccacacgggggcagcaccaaacattgcaggttgctcgtttctgctcccttctttgggaagaagccaagctggcccctcgggcggagctgcctagtcccccttacacctgtttcctctcacttaagccacatggaatggggtgaaactcttcagatgagaaactaaattaaaacaagagcagggttacccaagaaaaatgattttaaataaactcactatagtaatatgtcaggcttatattcatcagtatgacaaaacaattttttttttttttgagacggagttttgctcttgtcgcctaggctagagtgcagtggcgcgatctcggctcactgcagcctccgcctcccgggttcaaacgattcttttgccacgattctcttgcctcggcctcccgagtagctgggattacaggcatgtgccaccacacctggctaatttttgtatttttagtagaaacggggtttcaccatgttggccaggctcgtctcgaactcctggcctgaagtgatccgcctgccttagcctccaaaagtgctgggattacaggcatgagcctgtttgcccacccggcaaaaacagtattattaatgtgctggggtgaggtcgggtgatttgcatattttagctaagaatgatactctgggtgttcagtgagctgttagatcaaaatatttgtcatcttggattccaaggagagaaaacagccagtattcttttttaccttctttgttgttactgaattcttttgagcagtcctaggttgtaggattttatagtagacagctggagacagtgggaaaacgcatttctgacttctggtttgaagagtattatctcacagtaacattgctgtcttagggctcactccagccagggtcactaagatgctctcctggtggcagcttctgtgggtcttgaaccccatttccacagtaccctgtccaagccccagtttccatgccagaagccgaattcaccagaattttgactgaggtgatcatatgatttattgtctaacccaggacactttttgagagtaaaaggagctgctctgaataattttgccagaatgacagggataccccagaactattgaggggaaaattgggacatgtggtcaccctaatacaaatctctcatttttccttcttgattattcagttaagagttacatgacactgtatttatttgctcattcattcaacaaatgttcaagtgttttttattttctaagttcactacttatattattttctcctcatgaaaaccctctgaagtaattattattattgctcccatttttacaaacgagcaaaattgggacttagtaaatgacttgtccaaggtcccacagtacatcagagagctgagattagaatgcaggctgttcctactcttgatccacatacgctcagaactgtattgagttctgggtgcggtggcttacgcctgtaatcccagcactttggaggccaaggcaggccaatcacttgaggtcagcaattcaaggccagcctggccaacatggtgaaaccccatctctaccaaaatacaaacattagccgggcacggtggtgtacacctgtaatcccagctacttgggaggctgaggcagaaggatcacttgaacccagaaggtggaggttgcagtgagctgagatcatgccattgcactccagccggggtgacagagcaagaccctgtctcaaaaaaaaaaaaagaactgtattgaggtcaccggctgtttatccagccttgtttatcatcctaacaccatctgacattgtcccccaacaaaaatctcagaggcatatagcaaagtggttaagtgtaggagcccagaagccaaactgcccaggtttgaatcctggatctaccactcaccagctttgtgctgaacccagtttcctcatgtataacatgggtacagtaacttagtatcaacctcaaagggttggrgtgaggactsactgagataatacttttgacatttgaatagaggtggtaggagacaaggttggaatggcaggccaggggagtcagctgggacactgtgattttactgactagggcctgggttgggaaccgacatgggagagaggttagtgggctgcacagcactttctggagagcagggcctgggcacttagggatcagactggcacaattgtgcgttttcataaagcagcacgtttggtggagtgcttctgtggaatatccaacacatccacctggagaaacacactttggtctgagactgagggagcagagctgcggaggggcaggcaggccaggcaagacctggctagctctgaattggccacagccagctctggcacccgggacctcctcttcaccatcgggctggttccctgcagtgtgtatacatgtgcagaacctttccccaagattcagactcctgagtagcttctgtgattgtcacggggactgccttctctttttggtttctttgtgaaaggcaccttgtgcaccatcagcagagtggctgctgaggtggtcacacttctcctctgggacgtgaggatcagcgcactgtttgcttaaacgggctgttttgtctttgatattttggtgagttttttttttcccctttgacaaagtgtgatcatccgctcaggaacgaggtgcccagtctgtgcacggtgactggaagagggaaggtggcccttgaccgaatatgatcacttcaggacactttgctgtattcattcatttggttatgaagctcacatttggaaactttacaagctgttctttgagatccagtctgttggctcccaaggaaggatggctccatgtctgcctttcctatctggggaaggtggcctctgcaactgctggacagcttgcatgggaccagggatgcagagagagatgagggacccagctcaggcatgcggcaaccctggtgatcaccagcaaggcaaatgctgtagccaagtcacccttacctgcactgggaagttttttctccatacgtctttggattttttacttgttataataaacagcatatagaacttttttaattaaagggaaaaattgaattacagaaccttaaaaaagaagtatgatctcaaacaaaatatctctaagtgatacaagaataaatggttttaaaagcacaaatctgtcaattctgcaagcacttcagcatttaaagattccctcgtcacaaacgctataggacctggcacttatttgttatcatgagtggatactttttttccttgttttgctgcctttctgggtattagagaaaacaccttgcttctctgttattagaaacaagtgcctaacatgcagttaattcattctgtctccactgtttctaggtgcttaccaaataacagatttcacagggttgcatttctcactatttaaaaaactgccttataagaagtatcaggagcttagaaatttttgtatccattagccgtatacttatatttctggtaatctattctttttttttttttgagacggagtctcgttctgtgtcacccaggctggagtgcagtggcgcgatctcggctcactgcaagctctgccttccgggttcacgccattcttctgcttcagcctcctgagtagccgggactagaggcgcccaccaccacgcctggctaattttttgcatttttagtagagacggtgcttcrccgtgttagccgggatggtctcgatctcctgacctcgtgatctgcctacctcggcctcccaaagtgctgggattacaggcatgagccaccgcgcccggccctcataatctattctttttttgttgttgttgttgagatggagtctcgctgtgtctcccaggctggagtgcaatggtgccaacttggttcactgcaacctccgcctcctgggttcaagcgattgtcctggctcagccttctgagtagctggagttgcaggcacccaccaccgtgcctggctaatttttgtatttttagtagagacggggtttcgccatgttggccaggctggtctcaagcccctgacctcaggtgatccacccacctcagcctcccaaagtgctgggattacaggtgctaggatcacaggtgtaagccaccgcacctggccttctagtaacctattctaaggaagaaatctgaacacatcaggcaaaaagatatttgtcactacattttttaaatagcaaaaaatagttacaatttaatttccagcaatagaggatttgttaactcaattagatgattgaasataatgaagcaaataaaggtgcattaagtgtagtaccttttagttgcgggaggggagtagtgtaaactgayatgattgaccaaaccatggagtgacttcttgtcctctttcactgtcttccagtgttttgctgtgcgttctctgggatgggtagagatggcagaagaggacctcgcccccgstaaaagtagtgttgcggtcaacaactgcatcaggcaactttcctactgcaaaaatgacatccgagacacagtcgggatttggggagaggtaagtggcatgtagaatgatgcacggcaggctgtttacgttctcctgcatttcaggaagccccacagctcagtgacacatggtactgaggggctccgaggtgttcatcaggtgccttttcccattaatgcaggaagtgtaggcatggtgcccccgtgtgactgatcccttagcactgccagatgccagtgaggactggggcctggagagagagcgtttctcagtagctaagtgacacagattcatgggtgagctttaggggccyagaactcccctaaacatgcctgcaaaatgggatgtgccagtgtataagagcagttttgcagactggaagaaggacctgtattctcaaaggggaaggtgacttccacacgtccacacaaaaatgttgatgcctctgctttaaaagttgacaaattattcttttataacactcttctttacttagcgtctgaagaatcaacattatacatgaattgtggaattgatatttatatacttctcccttttaacagagtgattccattttgaaatgttagttgagataatttcagaaaggaaaaaataagtacagataccaaatgtgtatgaaactcacatcaaaccggaaaagctgtattcctggtgtgctctgagacctgtggaaaaagcattttgggagcatcttggaatagtgtttgctacatgaatagatagatgttgttctctctgcttctagtgaacagagcagtggtagaaaagtttgctttttggttgggctgattgggactccactcacattttctcctagcagcacatcccaatgggaagtaggtttccaagcctttccatggtggagtttgtctccttaaagtggagctgaatcactgcattgccaagctgacttttagattctaggcataagggagagctggaagaattttcttccatccaagaaaagccatttaccctcttctgttgtttgactttaccgtcctctctcaccgcattatctcccatccaaatacccaagcctggctgagcatagtggcttatgcctgtaatcccagcactttgggaggccgaggcaggtggatcacctgagctcaggagtttgagaccagcctggccaacatggtgaaaccctgtctctactaaaaatacaaaaattagctgggtatgatggcacgcacctgtagtcccagctactcgagaggctgaggtaggagaatcacttgaacctgggaggcggagaggttgcagtgagctatcgtgccattgcactccagcctgggtgacaaagtgagactctatctcaaaaaaaaaaaaaaaaaagaacaaaacccaggcctatgtttcccaccaaattctccacctgtcttctctctccttcagtcaaaactgctgttctttcttggctaggatttagaaggtaggtggttgtgacttacactaatatgtgaatgactgacctttggaggagccataggtctaaggcagcatgctcagccttctgagtagctggtgaatctgtttcaccacaacagtgcacaagttctgttttctgccagtgctttcatctgtaaatggcttagctgctctttggggaagatttgagaccaggctggatctcagctgtagacaggccacagcttcaacgctgtctgacagaggcactgagatacctatttctgcctccctgagcatcagagctgtatttcactctgagaatgtttggtaggaaactaaaacatcattccccaaaactataccagaaagcaatttgtctgttttactttgagatttgaagacctaccgagaagcctcactgttctgctgagccagaacttccatcatcagtgctccagcatctagatgacctttaggagagagagtctttcagctgtgcaacagatgtttaatgatgtcctaaaattatgccggggagattgcagggggaatcaagttgaatagtctagtgcttctgcccacaaagagccaacacaggtggggagatgggacaccagagtgtaagactctgaaagatagtgcaggagttgagaaacctgggtgttcccctgtgctgggatcccagcagcacccacaggttctatgtcagaccctgagcaagttacttaacctttcagcctcagtttccccagctgctaactgggatagtaacaatccaagccctcagagggcaatttagagagttcatgagccagtgcaccttaagcacgtagcctaatgttgtcatttaaatgtttgccattgttagtgctgagaaatgtcacaaagctgtgcctgctgtctgccaggcagaccacacagctaggaagtggtgtaaaagccgagaggaagcagatatcgttgtgggtttggaaaggccatcgaggggatgcttggtaggatctggccagaagaatggggagagacaggttccaagagtttgatgggcatggaattagtaaaagacgtattctccagggaaaccacaattagccttttgtcgtaaagattcagaagtgtaaataattaaatttaagagcagcctggaaagcaggatggggacacatttcagaggactcggagagggagagagaaattgggtgtatgaggggaaactgaaagatatcaatattcttgtccagaaaggaagtttcttaggcagacaaattacagaccccagggtggcttcttctgatggttgacacggcattcctagatggccacacacacgattaggctttccagcctgcatgaagaagacagcgtgttttctcgttgtgtcccaggggaaagacatgtacctgatcctggagaatgacatgctcagcctggtggaccccatggaccgcagcgtgctgcactcgcagcccatcgtcagcatccgcgtgtggggcgtgggccgcgacaatggccggtgagtccctgggtggggcagtctgggtcacctcacccgtgtccctggtctagctgaacaccaaagcatgggctcgcagcatttcacggaatacgaaactcatgtagcttctatatagaaatgtgaaaaatgaaagcttgtctctagttccctgcctcttaaagacttcaaactgcttccyttcctggtttctgtatctcaaatcttttgtcaactctgatcctgatcctgccttctagttctgcatgtgtcttctcctgaccctcctcatgcaaccaagtttccaacccaggccatctgaacccctttttcccctcctctctgcagtctttttaaaatgaattccatttcattcagtgaagtctcagccatttcagaggccctcctgctgctgttctcttcatcaagggcttacttgagggggacgttgtacagcctttcatcacaagcctcaggtcattaaatcatgattatcaggaatttctgggttttgggattggctaaacttttttaacacttgaaaggtctggtcatatcaaaattccatttgatgtgtatttttctgaaattctactgaaaatgtgttatttataagaaatgcatcttagatgtgttatgaattttatgttctccaggatgattggaaacgagttccgattttcaagtgtgtattttaactaataaaatagcagttatcacagactttatgttcagagaccattgttaagtaattggtctacattaaatgcagttaattcttaaattatagtcagtctttggcaattcctaaggtactagagcatctcctagcatttagggacgagctataggatgatagcttgttattgctttgttgaaaatggacaagagcattgcaaaagaggataaaaatccccgacaacagagaggcggctctcctgagcttatggttccatttctgaacattctgcttttttattgagtcatgtggtcctctctaatggggttgttgtctaccttggcttatcacagcctttgtcaaccaacgctgggcattagcgcatttgattcagttccaagacctaaaccagaaaggaaggattatggccaagtattcatcagtgaaagagtaagcatttatgctagaaccagacatgagaaatggtctgcaaaggagagagctgaagtgtctttcttctcactgccaattggataagccttcctgggagcacagttgcatctttgagctttcgtaccagagtgatgaatgatgacagctgggccagatgctttgggggaatgggtggatggattatgtgcgcacacctgtcattcccttgcttgccagagctgtagccctggaaagatgcatgaattggttaattttacgaggaagctctctggtgatatttggtcgtcattaaaaacatttaactttggtggaaggtcctgggtgtaagatgcttgagcttttcctggtttctgtcctccaagtttgtttttaaggcaggagccaaagtgcagagcttgtgacattacatacgtgtgcgacgcaggagcgaaagtgtggagcttgtgacactacatacgtgtgcgaggcaggggccaaagtgtggagcttgtgacactacatatgtgtgygaggcaggagccaaagtgtggagcttgtgacattacatacrtgtgcgaggcaggagccaaagtgtggagcttgttacattacatacgtgtgcgaggcaggagccaaagtgtggagcttgttacattacatacgtgtgcgaggcaggagccaaagtgtggagcttgtgacactacatacgtgtgcgagacaggggccaaagtgtggagcttgtgacattacatacttgtgcgaggcaggagccaaagtgtggagcttgttacattacatacgtgtgcgaggcaggagccaaagtgtggagcttgttacattccatgcgtgtacgagtggatgagcttgggttttcctaaggtcagattgtcagtggattgtattgatgaggttttcagcttaccctaactctttaaagtgaggccacatgctacatgtctggaaggaaacaaatgattcaaactccagttgacaaaattattcaagttctctgagcctcagttctctcatctgtgaagtgaggatcataataaggaccacaacacatacgtatatgtgcatgtgcatgtgtatacagtaatcggttcagtgatagggacatgacagatgcttaatgaatgttagcccttgatttttaaacacacgctagcagatgcagctaatgacatggcttccttttaaagacagtggaggtcggagaggagtcagaccgcagggagacttgaagtacgcttgatcacgtgatctagaggatgagcggctgttccagaccctaatgagttcagttgtcctacaaagcaggaagagcttcctactccctgatgaaatcagtgtgaattaggttacattgccttggttatgtttttgaaacgtgggctgtattactcatgtttttaaatcacttcttattctcactcagtgtcagcagatgagtgtaatttcgaaatacgctcagggttccacatagctagcaggacctcagcgagatcatgggagggttccacatagctagcaggacctcagcaagatcatggggttgtggctgccttcagctggattggcatggaaacggtaaattttaaaagtgtgtttgccagtgaaaggttctgtttctccccattggtcccctgagtttccattccccagaagaaggggtctttgtactcctgctttttttactttcctttgcttttgattcctttttttttccttaacagcaatttacaagagcaaattcaatttgtaatgttgcaaaggaaagggcttttcactttgcatgaataaaacatttttgcttgcgaaaaagaagcccatttcamattctcttttgtaactttccttgctgagaaagtggaatctcttcagggatttcttgatgtggttaaaatgaataagagaagtgtgtattataccagacatgaagggcgcaaaatctttctgcaaatccagagtgcttccctgagccacgtaatttcagaaattatcaaagtattttggatgtgacattttcttaaggctttcaagtggttttgatttacttggaagaaattccttcgggaatgagtttactttgcatgaggaggtgattggctatgacacccccactgagccccccagggttgagttggagagacctcttactatgaacagcacaaggagttgagtcacatctgataccagtcttctgtggggttttggttgtcgcacaactatgctgaaggctttgtcttgttgagagccatgtctgtctttattacggtgtttcttggggcccatttgctttattgcctggcaaagtgagggctgcctcctctttcttggccatagttgagttttgttccctttgatcagtgaggtaaatgtcacggcccctggagatggaggctggggcaaggggtttcatgagctttgtctttccaatctagttcagccccaggagcacccaggttggcctgctttgctcctgcctgctgtgcaaaggaggacgtacgcaggtgtgtgcactgggccttagaactggcatttctgcccttggcgactgaggccaatgaccgaatgctccctttcatcttgtctctgtgggcctgccaggctactgtctcaaaggtgagtttggagggatgtccctacccagtttcagggacctgtgctaacttccggcctcagcgttcttcttattcactcagaccctggcgagcaccttcctccttattcttttacagaagtaccaaagccaagcaaacataatttcttttgttttttttttctctttttgagatggagtttcactgttgttccccaggctggagtgcaatggtgcaatctcaattcactgcaacctttgccccccggtttcaagcggttcttctgcctcagcctcccaagtagctgggactacaggcrcccgccaccacgcccggccaattttttgtatttttagtagagacagggtttcaccatgttggccaggctggtcttgaactcctgacctcaggtgctctacatgcctcggcctcccaaagtgccgggattacaggcgtgggccactgcgcccagccaaaacataatttctgaacacagggaacttggaacagggactcccctcttgcctcgtggttgatggaggcttatcttctgggtaggggcacagagatccttgtgtacttcgccaatgagccctatagtctgctcatctcagccatttcccacaagaaaggaaaatggatattgtcagagggtttcagaccccgtaaatgggatgtttccaagaggcttccctatcagtgattaatccacggttttcccttgagaaaaaaaaaaagattctatagtcacttgggaaactgagttaaaccaagtacactgggccctctcagaggttttcctacgctgagatgcactaggactctgcaagaaagcgtttcccaggcttggctggaccgtttcctcggtggaaacacaatcacatggaacacacttcaggaaatattgctgtcgttagtaaactcattcatttaaattcgtggcaacactaaactgctatttttgattattaagaaaaattggaattacttttaatgaatattataagtggagaccccattgggcctgctctaatgaagataaaatttcttcataatgaatggcaactatgagaaacacactcacccatccaaaccccaagaatggacttagaggcacgaagaacagtgaaagtgagactttttaataacagtcttgcgagatcgggtatctggtgggcaggcacacctgggacagtcacaacaggtaatttatctcctagcacgccagtccctcccccaattcctcactggccgagtactatggggctacaatcttcctggacattacctaagtttcattatcccccttataaggttatacctcattcccttccccgcttaattttcatttcccaataagaaaactttcttccctttaatgggctgacccctcctctacattctgttagcttattgtgactttctaggtgcatgagccatgtggtttgttacatttgcagcctggctgccaggacttagatttatcatgccttgaaaatggaccatttaaaatgttttctcacacaaccatcaacagtcatgatgtgtgcagtgctttttaaacagtgctctcttattcaggttcagtgtttaccctgtgatgttgcttatgcttacagattgtgtagccaaacttctcttccttgaaggtgtttaatacctttcttttctggttttgatgaacaacttttaataaaatctttctgtgtcatagattattcataaatttccaaatgaggttatctttgacttgattgttctatctgattatgatctcaggaacttttgtctaaagaatatagtgtccactgtaccgaattttttttcatattctcttctaaggtattcccagctgtatttatccaccaagaccctggcccaagttgttttatttctttttatttttagagacagggtcttgctctgttgcccaggctggagtacagtggcgtgatcatcactcactgcagcctccaaattcctgggctcaagcgatcctcctgcctcagcatcctgagttagctgggactacaggtgttttttttatttttatttttgtagatacggggtctcactttgttgcccatgctggtcttgaactccaggcttcaagcagtcctcccacttcggcctcccaaagtgctgggatagcaggtgcgagcccctgtgcctggttaggatgttttaaaaaaggcctttgtcacatgtactttatgttcttgttttcatgccagtgctgttctgctgctttgttttgacttcttttgaaaacactgcttaattttgtggaggagttcagggatcctgaggaatattgggattaattatttagaatatgcaaaactttgactcataggtttttagatttaaaaggtgctttagtattagtgtctttcagtctctttattttagaggttaggaaactgaagacagaagagtgtgattaccttaggtgacccatgtagtttgtggcagagcaaaaaacacaccccaggtatttttgccagcccaaatgggaagctactctgttcatcttgacaagagatggtgaatggtctaaatgtcccggggttggcaggggaggagaggctgggtcagatacgtcctaaatactatgttaggcagcagcaggacacagaaggctatggcatggtccctgtccttacagtctggcttcttcattgaagagataagaccacatgagtgaatggaaagcaaaggtggacacaccatgttcctgagcctcgtttttgtgggtccatgagctgagaatagtttccacattttcaaagcattaagaaaaagaacgggggacccagatatgggaactcagcacagcccagctcttcatagaaggaacatttgagtaataacatactcagaatggaacgaggcgatctttgtagctgctgtatatagaaagtcgttgtggaaagggcccatttttttttttttttttggcagtctctatctcccttcctagccatgtcttctactagcagcattcgggggtccctgaaagcacggcttagccttgctactgttccgtagagttaagcttgagtaagtttttcttttttttcagattgagtttcactcttgttgcccaggctggagtgcagtagcatgatctcggctcactgcaacctccacctcctgggttcaagcaattctcctgcctcagcctcccaagtagctgggattacaggcatgcgccaccatgcccagctaatttttgtatttttagtagaggcggggtttcrccgtgttggtcaggctggtcttgaactgctgacatcaggtgatctgccctcctcggcctcccaaagtgctgggattactggtgtgagccaccgtctcgctctgttacccaggctagagtgcagtgatgtgatcatagctcactgcagccttgaacaccttgggctcaagtgatcttctcacctcagccttctgtgtattataaaagggtatagggcaggctgctgccacaagtactctgcagtccactggcttcagtgccagaggttagttctcatgccgcagctgcagtgggcactgccacctggaagaacagctctgtgccactcaggggttcaggctccttccagattgttgctctgccatccctcagttgccgtcctggcctcaccagaccaagtgacttgtctccaagttaaacacacctggaacttgcgtacctcaggtacactcacattccgttcacaccccactggccacactcagctgcaaaggactcggaactagagtctctagttgcacagacatttgccaagttaaaactcaatcaccaaagaagtttaacagctaacgttccgacgcagtgtgaaaaccagtcacctcaagtttctcacccccacggcctgttgcttcccgtactagtgtcattaagcagctgtcccctcagctccaaacccacacttccccgctcagctttgtgatgctggggctgggactccgcaractacgctcctgcttctctcgtctgctacctgttagactctggtgactgtgcagcactcgaaggagaactgccaggtggaggaggaaggaggaacttgctccctcctttgcttcctgtttctctgagcaccatcctagaaacacagctttatcccagttgcatcagttctgaatccagtttgcagtttttccaacttcacagaaatgcagaactggcttcatcacacggcttcttcagagattccagcacagctagcaggcaagccctctttttaagtctaggtcctggccctggggtccctccttcaagcctagggacaccatcagcagccaacaatgtctcttcctctgcagtccgaggttttgctccaggaggctcctccgtgaagcttctatgttttaattattgcaacctctctcctctgttccctcaaccctgcaggtcagagcccccctcttaacagttgcagcctccatgggagctttctcaggatccccttttgccattgtagttattagttaaaatcctatgtgctattctccgttcaaatgactggtgtggtttctgtctcctgcctggtcctgcctgtcccctccctggttgacctttaagattgaattagcgctgactgaaggagacagccactcacacagcgcagtctgtccaccatatggagggcagtcaggaaagcttttctgagcaagccagtgtggctcttctttgtgtttacaccacactgcaggtgacactgcagccgttgtgccaaggagacttcctttctaaattattagaaattgtctgtgataaagggcagtgttttaggtgacagtgatttagaaataatgggtctcggccgggcgcagtggctcatacctgtaatcccagcactttgggaggccgaggcaggcggatcacttgaggccaggagtttgagaccagactggccaacatggtgaaaccccatctctactaaaaatacaaaaattagccaggtgtgatagtgcacacctggaatctcagctacttgggaggctgaggcaggagaatcgcctgaacctgggaggcagaggttgcagtgagccaagattgcactgctgcattccagcctcggtgacagagcgagagtctgtatcaaaaaaaaaaaaaaaaagaaaaagaaaagaaaagataaaaggaaagaaagcgaaaaggaataatgggtctcttttgtttttgagctaatctgaaagttatctctgtttcttcttggtcattgttttttttccctaggagtgattaggtggggtctcagtctggaagaagtagagtttcctgatgacatctagtaggggattctctgagccagtcagtaatgaaagactgatggaattccaagatctgctgatgaaagtttaatctatggtatgtgctgtcttgcctcagggagaaaagtcttcaggaaggaacaataattctctccctacactatagtattgtcttgacctctggagttaatttctctttaatgcagctccatgataagcagaggcatcacgatttacttgaccgttttgctgacttacactgtggttctattttatctctttaaaagtggcttctctgccttccattaatcatgatgggatgcttgcaatactttcagcacagaataacctttaaggaaagacatcgtaagtgattgtccaagaacagtttcccttagaggaaagtgggagggcattttcagacagatcgttcatggcggtcctgtccctgttcatgaatctatgaaggcgacagtttctcctgagaaatacctcgtccattttggtaactctggctcaaagcatggttcaggatttcttgtgagcatgtttcagtagcagccagtgacgtgtgggggcttgaggctgttgtgtcaagagagagcagaaaagtctgatgatgatcttcgaacagcttccatctcgcacttcccctgagtcctgagccagacaaaggatgggcctttctggatgcagagcgagggagatctatcatgtttgattctctgtgtccatcctcaaagtgccgtgatcttctttgaatacttggagcatcccaggaaaagaagagtcatttgagtaaagaaatagcctaacaacccatgtaaacatggatgaatgtctttgagaacagaggaagtcataaccatgataacccagaacttatgcagatgttcagtgcatggtttggtgcttgaagaattgctaaaagcctcttgttgcaaaggaaggtgcagtcaccacttttcatacacgagttgtcacctggaacctttttactcaaatgtcatcatcctgagatttttggtttcctggggagtccagtgactatgaatttagtgcagcacagttcgtcactgggaaagaagaatttgagaacatcaggtggaactcaaggagtctcattgtgtcgagtttttgagagctagagtaggtcaagagaaggaacactggagtaggaatctcaccatttgcaatgtaattgtgcctcttcctttgcactgatgttaggggcgctctgtgtgccactgtctccatccgcactggagatcatcactgacgtagctgaaatatggaggtcctttcatgcaagggtcataagtgccatcgctcccagtgacactctttttattaacatagtaatatttccttgaaatattgtcctgggtctgctgggtgcagtggctcatgcctgtaatcccagcactttgagaggctgaggcgggcagatcacctgaggttaggagttcgagaccagcctgtccaacatggcaaaaccctgtctctactaaaaatacaaaaatcagctgggtgtgttagcacatgcctgtaatcccacctactcgggaggcttaggcaggagaatcacttgaacccaggaggcagaggttgcagtgagccgagattgtgccattgcactccagcctgggctacagagtgagactccatctcaaaaaaaaaaaaagaaagaaaaaaaatattgtcctgggtcaaccgtaacatattattaaaaataaggagaaatttaacatgagagcttagtattattctgtctttttaatatctagaaattatctctagttcatagtgagtctcaactaacgagttggtgactcttcatagagttccctagagctatttgatgctgcccttcaaaggctaaaattgttgttcagagccccccaaaatggctttgtatttttctaaccctcttatgaagtcagaattggtgtttaagtatcagagctgtgaactcaagctttggaatggcttgtgttcagaggagttatattttaacagagaaaaatgagaatgtaggagaattrtcgtgtcatgaattttcagctagccttgagcctttgggtggactgaaaaagtcttgttcacttgggagccaagagttcctgcttctgtgagtccatgtgaggctgcaccagtttccttccaggtcccacgttctagtctcctcctgcacactgctctctcttaagataagaagacagtagagttatgttccctgcagtccctcggagcagcacccacactttgggctcaggcactgggtctcatgtttctttgttataacttcaactgggaattctgttcttctaggctattccccaaaaagtggcctagggatgtgcttgtttgaaaagggaagacaggaaaggaaatcaaagacaagaattaggaaattgaacccagagtcctcaagcaagaacccaatttccaagagtaaaaagctcttgggaacakaatcatgcaggcgcggtcatggcagccagaggacggaaatgccagatcagacgtggggccaaagaaaaagaagggagccagagagttgacttaaaatggaaagaataaacctctccaaaccctggaagaatcatcaaggctataaataaaggaacacagagtgggtgacagacgggctctgacaccattcactcatctagaagagtgtgatgggggaggggagactaagaaaaataaaacccagaaaatgttctcattcagtcagaaattttataccagaaatactccaaagaggaagaaacatttgaaagtcctgaggcgggagaggatgagttagggggcacagttacagtctctgagggagatccggacagggggcatggcaggracacagtggatgaagatggatgctgacatggcaaacaggcaggtaacgtgatggggaggacaaagccaagcagacacaggtgcctttctctctgcgggcagtgcattagataagcttctgattgcttctcttttattttgttttttttgttttgttttggtttggtttggtatttttggaatggagtctcactctgtcgtccagggtggagtgcagtggcaagatgtcaactcacctcagcctcccgggttcaagtgattctcatgcctcagcctcctgagtagctggaattacagacatgtgccaccacacccgtctaatttttgtatttttagtagagatggggttttgccatgttggccaagctggtgttgaactcctagcctcaagtgatccgccttcctcagcctcccaaagtgctgggattacaggcgtgagccaccgagtccggcctgattgcttctctaatgctcagccacccaccctgtcttgccaagtctgcccctttaggaaaatgctccagctgcattttcaagggctgctttttctctgcaccaagcaccctgcccactggagagccatcttcaggcagggctcacgagccccatgccctgtaccctgagctgctctgcccggggtgtggcaggtcatgatagagttaagagtcactttgccactggacaatagttcatgacacgtggctcctacctccctgatccctaaatccttcttgcctcctccctaaaggagagctcctgagtgaatttgttggaagcaacactagaaaactgcaagtctcaatcttcaactcacagaatcaaatgttcctgtgaggtcctaaaaccaggtctgtcccagcaggtgaactaaacagggcacagcaggatgagtttgcaggaattttatatatagcaccgattaaggcattaatgccatttttcaaagagttgacccttctttgattaccaaatctgtgaaatagagatttagttcagattgaaagtatctgatcccctctgaccctggccctcagcaccccacccctacatgacctgcctttatacagacctggaatgaggatgggaacaaggatgagagggcacacgtcatcccctaagtccataaacagcatctgagctccaaagaattgagttgtcttttgagagaagtctctttcctaaccacgtgccacgagggtgtaaatagtgggtatggcccaaccttggctaacctaggctaggccacctttgctctcagatgggtaacagctttctgctgggatgccaaggcaaatctgttatactccacgttggccaagacagactcctgaccccattttcaaagctgttctttctatttattctcccgtgttctgcattcatacattcactcatttcggcatgtgttcatccactggacttatgctgagccactgtggttaatggctctgccatgtagtacacaggtcagcagtgtgggagcccccgaccctgctcctgtgggtcctccccacccatagtggtggtcagccctaaagagtctacctccttaatacctaggtcagagttaaaaacaggctgtcatattgacagtgggtaatgattcaaatatccatcagcaggtaaatagataaacagaccatggtatattgtataacagatatccacacagcagtgaaaaggaaccagctgttgatacagtcggccctctatatctgcagattttttacatcgacacattcaaccaactgcagatgggaaatatttggaaaaaaatacaacaatgaaaaataatacaagtttttaaaaataatataacaattatytacatagttttgcattgtattaggtattataagtaatctagagattaaagtatacaggaagatgtgcataggttatatgcaaatactgtcccattttatataagaggcttgagcatcgttgggggtcctggaactaattccctgcagacaccaagcgacaacggtatatacagcaacgtgctgaatctcacaataattgtgctgagtgaaagaagccagaccagaaaaaaaggtagtgtgtgattgcatttatgtaaaattctataaatgcaaggtaaactaatttgtagtgacagaaggcagttcagtgattacctgggaaaggacagaaggcagggattataacgaggcaggaagaatctttgagagttacagatatactcattatgttgatggtggtaatagtttcacaggtacatattgtcaaaacttatcaaattggatattttaaatatatgcagtttattgtgtatcaattatactcaataaggttgcttaaaataaaagttttaaaatatgcagtgagtgcatgccaaagatttatttaactcatgagctggctaccaacaccagttcaaaggaacctaagaaaggctgagaatcttctaaacctgataaccaagccaccaggaagcacttgtgctttcaagaatttgaaaaggtttcaaaaaacctcaagccaggaagaatcacacacatacacaaacacacatgtactgctgcctagacacagcctaataaaacagttgaaaccaaaggcataacacagatcataacagcagctagaggaaaagagaaaatactagaatagatgactaaggtggatacaaaactggttaatgttctactggcaatgaaatcctcacctttggggttattttttttttcttagcagaaagttgcaaacattacttgtaacatattaatgttctacaaattaacaactactctcccagagtctgagccctaatcactagcaaagtcagataaaaatacatttccctagagctgggctgttcatttcggtgatggccttgagcacttgaaatgtagctggtctgaattgaaatgtgctgtaaagtgtaaaatacatgccagaattcacaaacattgtattaaaaagatgtaaaatgtctcataacaatttcatattgattacacattgaaatgatagtattttggacatattagcttaaataaaatattgaaattaatttcacttccattttccagttgtttaatgtggctactagaaaattgtaaattacttaatgtggcttgcattgtatttctgttgaacgggactcccctagtgaagtaagtaatccttaggagggtccattaagtgttgctctactgtgacattgaaagacacactgtcctccttttgtcttatttccaagtgttggttaatttttcttaactacttcttatacctgtttgtccacccctgatctttaactcccatctctgtctgtgtccttgacaatcagcaacccaagtgatttttctgatgggtaaaaagacatgacatgttccctgctgctcaggatggagccaaaccccacgmtgtgacatgtcaggtctcacccctgcctgcccccatcccaggcagcacagctgagccaggcacttacccagctgcaccggactgtgccttcacacacttaactaccaaaaatgtcacacaacagctctgacttgcactgtgtgccctgctttttgattttttttctttactactcttttaacttttaaaacgctgtttgtgaccactgattggtcatagtttgaataatactgatctcagtcaaattttctaagaagtttttgagctgagcactctaccagcttagtaactggtgtttaaagaaaaagagattccacactcacataattttgggaaacactgtatgcaatgttctattctcagagaaagcccctaaaacacaccctcagctgttgaagggtctgagctgtcccgcagtcaacactagatgagcagaagacatattattggcttcattaacggcgaaccttcagagggccagcagttctgggacccaccaggtcagaaaacactgttctagggattctgaatgataacattgtatcaggggacaggataacaaagctagagtttcagactttcatttacttatctccacyccccgccctgcccccgcctcctgtgccttctctgaaaagtgttgtgttcttacgaacagcacttccattgcattcagtcaatacagttgtaagtgatgatcccaggaaggaaatctctacttctttggtaatatcatccctgaagacgtcctttatattgttaaattgcccttggataaaaaactgaaatgcagatttcttttagatttcagtatctagaaaatattgtctctcaaaggatatgcatgtaagaatttagttaacagggaaaatagtatagtttatcatgtttccctttttgctaggaagtttcaagttaaattaaacctgcaattgcagtaattaaatcagatagaatcatataacattgctgtttttgtggatcagaaatggttgaatgtggttccaactaatatttcgcctcgttaatttatagaattactttctcttccttatatttggctttaaattttacttttctaaatttagaacataatagactgtgtgtgccttttattgtaagccacttaattcttttgggaaggaaataggatataaattttgataaataaacagagttcaattgtaatgccccattaaccaatgagtgtataaaatacagattttttctctgacttctctattattcaataattgggaaatgctatgcattctaaaacaggagtattttgcgggttttttccccctgtaaaatccctaagcaactaaaagaacacaaagttaaaaatctatccctacagccaattaatatttattgacctatccaaatgacacccgtggccttccccattaatcagagaataatagtgcacagaaccacctcagccctaaagatacttgcttgccaaaccagtttcctccaccaccagcgatctcattgcgaagagtagcagcaattcctaaaagcattttagctagtggacggtgtgaaatttcttaatatatttcccccacaaactcagtggtctagcataattgtctcagctccttcttgcctaaaggaaatgttctgattcatctctgtacagcgttgagcttaagagttgctttgtcttcttcattgacgtaagagaagctgtagaagttatttattaagaaagataaaacctgatactattaattaaattcactaagtcaaggattgaaaattaagagggaaaattttttttaaataaaagataaggtttaaatatgtctacactgtacaaattagagtgcttcttaaaaaagagaggagatatagatcttaagttgtcaaatcttgggtcacttctaatcataacattgtcagtcattctcttaggccccagaactggtagagcagattataccacagaagtatgctaaccagggcaggaggatagaaatggctgtcatcatccatatacggtaccatctttttttttttttttttgagatggagtctcactctgtcgcccaggctggagtacagtggcatgatctcagctcactgcaacctccgcctcctgtgttcaagcagttctcctgcctcagcctcccaagtagccgggattacaggcacgcaacaccacgcccagctaatttttttgtatttgtagtagagatgggcattcaccatgttggccaggctggtctcgaactcctgacctgaggtgatccacccgcctcagcctcccaaagtgctgggattacaagtgtgaaccactgcacccggcgccatcttttttttttttaacctttatcattataatttaaccagatttcttcctgtgtatcttacagtgatctgtaaagttggctttcttcatgtccaaggccacatcatcctcattcctaacttgagatgtcaagccgtagaattccttttctccctccttcttcctctattgatcccatctagctttctggggatttattggatacccatgtgttaagtccctagcatgtgtctgccaccatgcttggcaccaaggatgtagccatgaatgagaacgccatggttcttgccctcatgggatgtrctaagaggaacagacaggtaatgacatgggctcatgagtcccatgaagcactttctaacatgaccgtcaagccctatgccagtgttatgtgacatccctatccttaggacttagtgcaggtcccacctgttctgttagcctttctgtcaccgttcgtgtccttcagcacaggctaggttagactgtaataacaaccaaaaatctcagtggcttataacaattctttctgctaaaagtccatggtgggttggctgaagacacggcttcctttgtcattgtcctcattctctgtctaaagctgatgataaagtcacaatctagactacaatattggcaacaatggtggcagaaggaaaagatgcgctgactgaacatttctgctggaaatgatgcttagcgcttttgctcacatttcattggcaaagcaagatgcgtaactgcgcctcacttcaagggttggggaaatatacgccacccctacaaatgggagtgaatcttcacagcacaccatgccctgtgctgtctttcagctctgtagtcatgcatatattcattgtactagatctcttcaacctcgggttgtcactaatgtcacagatgtgtgtctccctggttagactgtgaattccttgacagccatcaccatatcttagatttccttgtgtgtgcttcaacatgatgttatccttatattagatgcttaaaagtacttttgattatctgaaggggagaatgaggggagaataatcagaactctgtgcatgttttgayacaatgctttatggtttactgagggtctatctccattagtcctttcaggactacagggtgtagcattatgtcccttttacagatgaggaaactgagacctagaacttttacacgacttaatcagttttatacaaaaatgtggctgaaccgtgtctgaaaccatgaattctaaattaatgggtcagtgttcctactccttttagctgttaatatggacactccaattaccttgtgcagaggcccacatgagggaaggaagaggaaacttcagaaaaggagttgaggccgggtgcggtggctcatgcctgtaatcccagcactttgggaggccaaggcgggcggatcacttgaggccaggagttcgagaccagcctggccaacgtggcaaaaccccgtctctactaagaatacaaaaactaactggggatgatggctcttgcctgtagtcccagctactcaggagtctgaggcgggaggatcgccacttgaacccaggaggtggaggttgcagtgagccaagactgcaacattgccctctagcctgggcaacagagtgagactctgtctcaaaaaaaataaacgggtgcggggtagtagggtcttcacagatgtgattaagttaaggattttgacctgaggatattatcctggattacctgagtgggacctaaatccagtcataagtgtccttctgagagacacttacacatatatatatgtatggctgggcgcggtggtggctcacscctgtaatcccggcactttgggaggccaaggcgggtagatccccagaggtggggagttcatctctgctaaatatacaaaattagctgggtgtggtgtcatgcacctgttatcccagctactcgggaggctgaggcaggagaatcgcttgaacctgggaggcggagtttgcagtgagccgggatcgtgccactgcactccagcatgggtgagagtgagacttggtctccaaaaaaaaaaaaaaaaagagtgtgtatacacacacacayacatatatgtatataatacctataaggtaacatttgcaggttccagggattaggacctgatttctttgggatatttttcagccttctacagttagggcagtggaagccccttctgctacccagctttgctcctccatcttcctcacccagctgtctctcctctaggtggtacagattatatgacttcttaaatgaaagggcttttggagtgaggcacaccggttggcttcctgatctgcctctgttagctggctgaccctgagccagttacacactgtgccccagggccctcttgtgtagagatggaagctttggaaccccgatgcagcttggttgtaagatattaaatgggagagggcttggcacgggtccctgtcccctggtgagcactcagaagagaatgttgtccctccctctgcgctgcccctcactctgccctccctcatctgcactggcagtggtgggcacagtgggctggaggcagaggaggctgcttgttgagattcctggagcatttcctcccatttatttttcttagtgaagtcaaaaacagacaaatgtttattaaataatgaatcattctttcctagaaggattatttcatttcatgggtgagcggtttattgccagagaatgatgtcttcccccaaaatgatgtataacgtgatttggtacctaagtttttagacacttgaatgttttttctctcttccatttaaacttgaaggttgtgaaatgtagtscatattcattcatactctgttcatttcaggagatacccacaagcagaatggggtgactggggcctgctttgacctcatattttcctatttctacaggaatatatagaatatttactaaatactaggtatttagtaataaataccacaagccttcctaggtaataagcctgttaagaaaagtaagcaattatataattggcaaagaaattaatacaaagatctaaaccaagaaatatcaaagtcttttattcttagaatttttttcatttcacgtatattccttgtctgccttcagaatctaaaattctggcccactttgtttatagagcggtccctttagacatttgccttatttttaggcctcttttattttttttctttggagacagggtctcaccccttcacccaggctggagtacagtggcaggatcatagctcactgcagcctggatctcctgggcttaagtgatcctcccacctcagcctccagagtagctgggattacaggcacatgccacttcgcccagttaattaaaaaaaaaaaatcatattgatggggtcttgctatattgcccagactagtctcaaactcctggcctcawctgatcctcctacctcactcagcctcccaaagtgctgggattacagttgtgggccactgtgcccagcccattttaatcctagggctaggattatttgccattaccacacactgttgattattatagctatatatgcagctttaaaattggatacactgattcattctactttattcttctgtttacaggcaggtgcctgtaatcccagctactcaggagtctgaggcaggagaatcacttgaacccgggaggtggagattgcagtgagccaagatckcaccactgcactccagcctgggcgacagagcaagactctgtctcaaagaagaaaaaaaaaatagaaaggtggtgtggggacaaatcgaggtaacacatgtataagaaataaatattattgatcttttagtagttcrtaagcatggtgattggcttttcatgtgcatgtgtgaaatgtgccttccacaaaccttgttacaaagttggcacactaccattgatgtgaaagaaaaaagttattaaaataagaggtccttgatggcaaaaataataaaatggctctttggtggttaaaaggaccaatttggtccaatctcaactctttaaataaaaaggaattttgcttgaggtaagtaatttagttcctttgtggaaagttctttgacttctaagatgattcagagtttggaattactgatttagtcttctgactgtatcaggagtctttaaatatacattttcaattcaattaataagtcatgagttcagttaatttatcatcagtgcaatcagaaaccatcaaagtagactgagttgccagcctttacttctggctaatcctgacacatttcacatgtcatggattcctgaaattctgaagctgagattgctaatggttcagattggttactggatcattgtgttcctaaagaaaaattatacagctcgcttcaatgatgcagtttcccctcttttcctcaaaaaattttctatatgagagaagaaagcagaatctatggtccagtaaagcagtgatgctcaaatccaagtgcatgtcagaatccactgtgggtctttttcaaacaaagctggctttgccccagcctcagtggttctgattaattcagtaggtctggggtggagcctgagaatttgcatttctactaagttcccaagtgacactaattctgtctgtggaccatactttaaaaaccagctgggtgtggtggctcaccctgtaatgccaacacttggggaggctgacatgggaggattgcttgaggccagaatttcaagaccagcctgggcagcatagcaagaccccatctctaaaaaaaaaaaatagccaggcacggtatacctgtagacctaactactcaggaggctgaaaatttagagcccctttcaagaccctaggaggagggctagcaattagatcacatggtttatataaaatgattttgcaaaaggaagataaattttgtattcttaaaaaaaaaaaaaaaagccccagaaattgtctaagctttaggtcccacaaaacctagatcagctccctgataattgatcaatataattaactaatatatatgaaaggaatacagactgtaagcaagagaagttttttgtaggctaagcagtctctaagtcccaggaatgagagtacatgggaacgtcatctcagagaacaggagccccatatgtgaactttgtgtggaactttaattgaatgagctcaatggagaatttaggcggatgaaaattcaagttgatcttcactcacctactaaatgatcagcttgctatgtgtgatgtatcaatttatttgtgacaagatcagacaatttggagaatgagacaggttcaaattttggcttcacctcttataattgagttcactcattccctctgagcctattttgtttacaaaaagggggttgataataataatagctaatttaatagggctaatggggtgctatagtgaaatgatagatatgaaaaatgctctgaagatagaaaatgctgcacagatgttagtagctatacaaagctaacaaatagtatactcatcgtttatattaatagaatgactaaaaggtcattctgctggagaaggagtcagtcgactttttctgcaaaagaccagacagtaaataggctttgtaggtcatgctgtstctgccatggtaggcaaaagcacctacagacacgatataaatgaatgtgcatggctgtgttccaataaagcttttatttgtaaaagcaggtacaaaaatggtgatacactaaaattgatctaaaaggacactgtcggccgtgcatggtggctcatgcctgtaatctcaacattttgggaggccgaggcaggcagatcagttgaggtcaggagttcgagaccagcctgaccaacatagtgaaaccccatctctgcacgggaaactgcacagttcagtgcttttgtattctactaaaaatacaaaaaattagccaggcatggtggcgcacacctgtaatcctagctactcaggaggctgaggcaggagaattgcttgaacctgggaggtggaggtttcagtgagtagagatcgtaccactgcactccagcctgggtgacagagcgagactctgtctcaaaaataaaataaaataataaaaggacactataaaataataaaagtcccttcaaattaggaacttccarttgaatccgaagataaaacaaataayagcaaccatatatgatgtttttatttaaactcaacactgaaggatcaaaattatatcggcctcagtttctgtggccttctaatgtagctgatatctctttagggcatgagggcacataggtggaataggaaaagcaaagtgaggaggaagagggaggcaagattaagaacagttgagggtgaaaatagcagcttgtttctttttatgcttcttgccactggaagtaacgatcatcgggtaagctcctgcttaaaccctcctctgggattcagcctcaacagtaagctcctgagcatggagtttcgtgaccaccaagaaagtaaagtgcttctattttgtaatctcctagtgaatttttaaagatgactgatggtgtccaggcctgtgaacatggaaaactgaggtaaacccatcaagagacagttgcccatccatcttaaaaggcaagttaatcatgaaccatgaataaagccgctgtaatcattcacatacaggtttttgtgtgaacagaagtgttcactcatcttgggtaaatacgtaagagtgggatcactgggttgtagggtgacagcacgcttaagtttatgagaaactgccagcccgctttctgaggaggtgcrccgttttgcattcgcaacagcaaagtaagaaagttcagttgctccgcatcctcaccagcagttggcattgccaggattttttggtttgtttgtttgagggtggtggtggttattttagcattctaaaatgtgtgaagtggtgattcattgtggttttaatcsgcattttccaaacaaatgatgttsagcatgtttcatrtgcttgtgaaaaacatttatcttctttggtgacrtatctgttcagatgttattgcccatttaaaaaattgtgttgtttgttttcttattatcgactttattcatagttgccaaaactggaaagagtaaaatacctatcaactggtagatggatacacaaactcttgtacatccatgcaaaggaattctcagcaataaaaaggaatgcactgttgatacactcaacaattatgctaagtgaaggaagcaaggttcagaaagctaggtattacaggaccccctttttatgacattttggaaaaggcaaaactgcagggacagaaatcagatcattggtggactggcagtgagggaaaattcttacttatttttaaagaacttctcttgtcttcactccttagcccttactgtcttactctcctaaccctaccttcccagccatgggtttagtatctgtttcagcttgagtttctgatgcagaaacacaaatgtgattttctcaaattacaawcatggaacttgccagacagccagctttttccttggccctccgtgactgtgtgtccctgtgcatgcagtacccctgtccttgcaattctgctttccagggagagcaagccagggcgttgagtggggagatggttgaacattttaagaattgaaaggaccaggcgtggtggctcacacctgtaattccagcactttgggagaccaaagtggatggatcacttgaggttaggagttcgagaccagcctgaccaacatggtaaaacccgtctctattaaaaatacaaaaattagctagacatggtggcacatgcctgtaatcccagctactcgggaggctgagatgggagaattgcttgaacccaggaggcagaggttgcagtgaaccaagattgcactactaccctccagcctgggtgacagagtgagaccctgtctctaaaaaaaaaaaaaaaaaagaatcaaacgttgtgctgactcccttaggattctgaaccatggaggataacaatttatgctcaccctcgctacaccctgcagcagttagraagaagagatctggtgggtggtgggtggtgggaagataagtcaaatctctttatagtacagtgaaggccagggaatggcccgcagtctttggagtagtgggaggttttttctgctgaatattgcataaagaaaatgagctatgctgcctgcctagggcttcggaatctcttccacttaacaaagattcttgttatacacatttattataaatagcctttgcattttacagrgcagaacaggaagactccaggccattgggcaggagaatttcttttgttttttttccaaaatttttgttagagttgagttaaagagatactgtggcaatcccttttagataaagggcacatccttacgtgagtgcaagctaagcgtctgctgtgactgatgtcttgtggggcagtggggtctttcttttacaaatatacgttatagagtcctccaggagcaataatcaggtacacagtggtttttttgttttgttttgttttgttttgttttgtttttattgagacggagtctcactctgtcgccaggctggaatgcagtggcacaatctcagctcactccaacctctaccttcccggttcaagcaattctcctgcctcagcctcccaagtagctgagattactcggcgccaccacacccagctaatatttgtatttgtcatagtgatggggtttcactatgttggctaggatggtctctatctcttgacctcctgatccacctgccttggcttcctaaagtgctgggattacaggcrtgagccactgcacccagcctacatggtgctttaaaagaagttgggaatgttactgttagtccacaactccctggcttgctttttttttttttttttttttttttgagacagtctccctctgtcacccaggctggagtgcagtggtgtgatctcagctcactacaacctctgcctttcgggttcaagtgaattctcatgcctcagcctcctgagtagctgggattactggcgtgcaccatcacaaccggctaatttttgcatttttcgtagaaacagggtttcaccatgttggccaggctggcctcgaactcctgacctcaaatgatctgtccacatcagcctcccaaagtgctgggattacaggtgtgagccaccgcacctggcctccctggctttcattgtccaagctcattgaaaatcttttwtgctgctcatttgtccgtgtgatcatggtttagatgattcacgtatggattcttgctattcaaagtggagcctctgaataagaacttgggcatcacctgggatgtagtttttagaacgacagggccctacccagacccactgaatcagaacctgcagacccactgaatcagaacaagtcctcagacaatgcatttgcacattgaagtttgaaaggcattgatctaccttaaggtcctgccaaaacatcccgcctgctctgttgataaccttgttgtgatatgaccctcagaaatgtacccatggtgaatgcttctgacatccacatagctgtgagtatagatgcatgccactttgtcccgaatgtacttcattattaagtgcttagtgctgagctgggcacaaaagatacaaaaacaagtaaagcatggttgctgccttcaaggagctcagaatgcagtgcgggacacagaaagagctgcagcatcccatcctccagtgtctttatctgtcatctgactttctcctctgacacaaagtaccagtccccttctctggaaacagttttgaatcctcaatgtacagcccmctgaacacctgcctccaaatcatttgggtcagaagggacggtgcttatgtaaaaaaagcgaggagtctgtttgagacctactgagttacaccctctgagattgtggcgcttttttttttttttttgagatggagtctcactctcgcccaggctggagtgcagtggcacaatctcggctcactgcaacttctgccgcacaggttcaagtgattctcctgcctcagcctcccaagtagctgggattgtaggtgcctgccaccacgcctggctaatttttgtagttttagtagacacagggtttcaccatcttgaccaggctggtcttgaactgctgacctcgtaatccacccggcttggcctcccgaagttctgggattacaggcgtgagccgcggtgcccggctaggacccgcccggcaccatcattttaactgttatgatgcacgttatagtttgagaccactaacctgggtgctgctttgaaatcctctgattatgcaagtgtcatacaaatggatgttaaaatagtctcaaatatttaaggaatccttcagggattcccttatcctcaattcaggagattttgaagtggcttccacattcagagctgcttttatctttggctgaggcaatataaggatctttgtggatggtatttaaggatagttcaaattcatatctatgtattttagtagcatgttctctaggagcaaattataatgctttgttctataatgagttaatagcgtgaacattgtcctaacagtcctgtgactttcttgtttaatgtttatactcatgtaatcaaacaaattgaaattggattatggctgttgcacgttatatcagttattatccagtttaaatgcaggtctgaaggaagtaaaattgatttttctatgctacttggggacatcataggttattggtatsctggttgaattttcagttaggtttctatgaaagaaagatgagtggttaggtttgttgaattttttttctttcacagtattttgtaaataaactgggatatttcattctaattaggaagtcagatgccttttaaaagttgggtgatcagtttccatatttttatttaaagcatgtctggctttttaaagtgtatcataatcctgagtaacatttttatttttagaaagaaagaaaacaatagaacaccttcataatactcagttactacagtaacagctaccatatttatcagagaattagctgtaatatgtaccagaatttcacacataattgaacctgtctttctrtgaaccagacctgtttttaaaaactgccttcattccataaayaccgtttgtgtaccttttctgtacaagccccatgcccagtagtagggactcagagtttatctaacatagatatccttcacaaaagcagatgttttatttttattcattcattcatttattcatttattttagagatagcatctcgctctataatccaggctggagtgcagtggcaagatcatagctctctgcagcctcaaactcctgggctcaagcaatccttctgcctcagcctcccaggcaggtaggacaacaggygcaagccaccacacctggctaatgtttaaaaaaaaaaattttttttttttgagacagagtctcattctgttacccaggctggagtgcagcggtgtgatctcagctcactgcaacctctgcctcccaagttcaagtgattctcctgcctcagcctcctgagcaactgggattacaggcacgtgccaccacgcccggctaattttgtatttttagtagagacagggttccaccatgtttgccaggctggtctcgaactcctggcctcaagtgatccgcccacctcggcctcccaaaatgctgtgattacaggcgtgagccaccacacctggcctaatgtttaaaattttttgtagatatgggggtctcgctatattgcccagctggtcagaaatacrttttattactacttaatgcttcgaaagcaaagtgatgggccagagaacacaaaggcaagggtgacgagccctcgggaagtagggaaaggcctcatgggagagatggcatttgtttgatctggaccttaactcataagtaggcatttgcaaaatggaawtttgttatttaaatcataaaagcattatattctgattacctggtcatataaaaaaatcggttaaaaaatagtaacattaaatttaatcaatagtggatgtattaagcacttactgtatgtcaggaaatgtgcttactgccgaaaatacaacgggaaactgccaagttagagaatagtcaatgagaccaccctcaggtttgataatttgctagaaggactcatagagctcactgagggctgtgattatgctcatggttgtggtttgtcacagggaaaggattctgattaaaatcagcccaaggaagacacacataggacagagtccagggaagttctgagccttcagttgtcctctccccacggtgtcctgggcagcataacttccctggtgttgccgtgtgacaatagcacagagtattgtcaaccagggaagttcatccaagccttggtgtccaggatttttattgaggctccaccccaaaggcatagacaactggtccagggctaatctcagtctcgagtcccyccagaggtggagctgatactgcatgggccaagcgcccaccccagatcaccctattagaccctctagtgtatcccaaggccactaggcaaacagaaacaccccagtcaggcacaacattccaaggtgttagagtttacctcccagaagctgaaggcagaggctctcttcagccaaggttgaattcttcactgtacagaaacaaaaccagactctgtaagtttataaagctcactgtaaagtgaaggagatgaataataaatggatgattttccaaatatttaacaccaagctgcagcaggagtacgaaggaaaagcctgggatgctgtcagggaggacactgcctgtcaggaacatcttccaaaggaatcaacttttgggctgagattcctagaagatgagagggattcatcaggtgagcagtgcagggaagagcattctaggagggtcacagtcagtgcaaaggctctgaggtgggaagtagctgggcgtgttccaggaactggaagaagaaaaggggactggagcagagacaaagaggagggaatgtggttgcagcattggagatagaagcagggacctgatcccaggcggcctgtgagaccctgaaagcgattatagactttatctgcattgcagtgggaagccactgtgtggttttaaggttcgagcatggatactcatatttgtgattttcgtttttgaagkgactcgcatttgtgatttttgtttttgttttgaagggacaggtgtggctcctgtgagaacagcttgttagagatgagtggaggcaaggagactgttaaaacacwactgcaggccgggtgcggtggctcatgcctctaatcccagcactttgggaggctgaggtgggcagattacttgaggccaggaattcaagaccagcctggccaacatggcaaaaccccatctctgaagcatgaggatcacttgaacccaagaggaggaggttgcagtgagccaagatagcggccactgcactagtgagacactgtctcaaaaaaaaaaaaaaaatgacakcagccctcctgatgagatgttggctggaactagggtggcagcatggagttgagagaagggggcaagttggagagagcaggaggaggcagagttggcaggacttgtcacacatgacttcctgccagcagaccctcagctgtcacacttgacgtaccctgtggacatctggcagacccatctatttgttgcttctgccctgctatagacagagaatcagacaaccaaactcactggaatgatgtgtaaggaaggagaggcagcctttgaaggggtgacaggtacaatcctgttaacttgtttcatatctctgagcttgctgctgtctgttctggctgctgaaccccaagtcttaaaccctcttctagcctcacttgcagtttgtgttgtgttccaracagttgtggttgccaaagcagtttactgtcaataactcttccaaataattgaagtgttactgatcgtagattcagaaacagcatgagttaaatcttgcyctycctagaaagacaactgttaactagaaaagcataatataaaattttctgcacagaacctggtacttaggaggagcttagtaaatgttgaacaaatgagaaaacacctgatcctcatttaaacatgaacattaaagttgtctgtacacctgtggtgtgttttaccaaacccaaacaagacctatagttaaatactcccttgattttccatgtgtatttcctattttctgttcctttctttgtaaaaggagygtatgagactttgaatatagccaaaaacatggctaatatgctttgcctattttgctcttttttttttttttttttttttttgagacggactctcactctgtcactcaggctggagtgcagtggcgcgatcttggctcactgcaacctccacctcccaggttcaagcaattctcctgcctcagcctccctatttcactttgttaattggctaatcaaataacttacgcttgcccagaaacaattagaaagaggaagtactttcagtgctcacagaatacagtcagtgagagaccttggattttcctttccaactcatatatttatatgactagtggctagccaggactcttacttaaagtgctgaaagtgctgtcacttagccaattggacattttctgcttccatgtatatggggggaggggcgctcagctagagatgacaatgttggggtgcctgtgggatcttggcttcaagtcagctataaacaaaaggtgtcttaaaagaggtagggattacaaaagggtgtaggggtgtactgctaagtgctttgtgtaaattggcagatgatctgtaaacactttccagctcgattcagaattttctgcctcttgaaatctgattattcagatttataaaactacaatttggtttctgtctttctgcccaaaggctttctggctgtgggctgcaatacctcccttccccaaccacccctccccgccccccatttcccccactcgccccacaatcaggatcgtagaaacccagcctggtgcggtggctcacccctgtaatcccagcactttgggaggccgaggcgggcggctcacttgaggccaggagtttgagaccagcctggccaacatggtgaaaccccatctctactaaataggaaaaattagccaggcatggtggcgggcgcctgtaatcccagctgctagggaggctgaggcaggagaatcgcttgaacctgggaagcggaggttgcagtgagccgagatcgtgtcactgcactccagcctgggcgacagagcgagactctgtctcaagaagaaaagaaaagaaaccagaaacccagcaggcctagagcatcaactttttctaaagaggttcagtgggtttgaatgaagtttctaagtcttgagagtccaaaaaggaaacgttcgttacaggaagggagtatgttggggtgggggatcctccttgccggccctgagccagtcccctagcagctggagcatctggcgggagcacctagcgggagcacttcacgggagtgcggccgggtggggcggggccacgcgcctccccagcagccaatgggcggccgcggcgggcggggcagggagggcgcagggaggcgcgggcgccgctctcttcaacttgagcccggggcagtscgcgcggctgcttgagcgacggcaccgctggctggtgccggcaccctggggcttgtcgtagcacctggggcggcatccccgcccgacttcggaaggaccgggaggcaaaggtgaggaagttggcgaaggaacggctctcctttgtttgcaggtgcgttcagggggaacgggggtcgagcccaagctcgctcgcggggacagcgaggcgggcgcgggagacctgcgggacaaaggctgcgccctcccttccccgagtcagcgcttagcgagttgcctggtcctggacggctggaagggctgaagagggggctttctgccccgccggtgggaagaaggagtgaggcttgtatgaaatgggggggaggcgtccttggacccccaattcgccagtgcagcaggactgttcggggtgggctattcattgatggggtctgcacggggcatttctgccgtggacagcgttctatgattgaggcagtgactgccttcgcctcacgtgccccctggtgaggccacatttctgtcttcctgtctacwttaggactgaaagatatttcagggttttggtaatccartatttggattaaaagcaatatcctttcgtgtagaaaaactgtgcatttccaaatgattttagttacacgatttaggatattggtgtgacttccatgcgagaaaatatctcaaattccccaaatgtagaaacgcagccagctcttggcattgagaaagaagtagtgtttttgaaaagaaaggcgtgaagatttaaatattgcttacaacactctattagcttgtgggggaatctgtgccttttctattatctgtttccctataccaatattgtaaccaggcwcgtctatggattcctaattaatgtgtagctgtgaatcttcattactgccttgggtgggagaaggcggaaggagggggcaatcccattagtctttttctttctttttataactgcagctgcagcctggctttgacttgtatcatgaatgggggttctgcctgctttcctcatgctgttctcttttaggttttcttaggccattgagcagttggcccttcctccagccgagctcttacacaagagtagtttgtaagattctctctaaagttcagatccttgctgctgccttttagttarttgagttcagaaaggaattattaagtstcctgaggcctttcctaagaagttagaagcagaatgtgtttgtaaatgtggtctgtaattttgtaaaagttataagtaaaagggagtgtgaatgaaatgcttaagaggggaaagactttccataaagcatcagccagtattatcaaagaaggtgtcatggtttgtagctcagtaagaaccctactttccgttttgcttccttttttttgtttttttttttgagacagagtccctctctgtcacccagcctgtagtgcagtggcacaatctcggctcactgcaacctctgcctcccaggttcaagtgattctcctgcctcagcctcctgagtagctgggactataagtgcacaccaccacacccggctaatttctgtttttttgagtagagacgggatttcaccatgttggccaggctggtctcgaactgctgaccttgggtgatccacctgcctcggttctcccaaagtgctgggattacaggcatgagccaccatgcctggcctcattttatcattctcactttgcagatgtgagaaacacacttttctaacagccgccacgttgtttagttctagcttttctgcaatggggataatttatttaataagtatttattggacacttgccatgtgctgggcattggtgctggtgattaagtggcataataaatacaacaggtgtcttcttcctttcttggagctcacactatgctggcgtggggcccattgcaggttctctgcactggagcatccctgggaagcagtgtggatgacaccraggtgagacaagaagatactgctgctgatggccgccttggaggtcagctgagcatgtggcagtaggcgcaaacaacgaggggcctcaggtcatctgcactccaagggtggaagtattaatcacaccagtgggccattgggcactaaagtcggtcatcttgaacttgcttactttgatctcaaaggagcctgcagctgcaaggaggggcagagctgagttctaaagagtttgaacattggcattgttgatttcaatggggtaattccagtttgttacaaaactatcagtcatgcagcctccttgtctcacctatacagctttcctcttggacagcccccctaggaaatgaatttctttttctttcttctttttttttttttttttggagatggactttcgctcttatcgcccaggctggagtgcagtggcgtaatcttggcttactgcaacctgtgtctcccagattcaagcgattctcctgcctcagcctcccgagtagctgggattacaggcgcccgccaccasacatggctaatttttttgtatttttagtagagacagggtttcgccatgttggccaggctggtcttaaactcctggcattagcttatctgtccatctcggcctcccaaagtgctgggattacaggcgtgagccaccgcgccaggcctaggaaatgaatttcattctgtaccactggctgagcaaagctttacatctgtccaggctcccgagtgttaagagatgacttaactgtgtccctatttactctccatatacgtttcatgggtttttgggagtaaactgatggcatataacctcttatctaggttttcacaaatctctaggatcacagaaaaacatactaagtagtagtgtaacttgtctttttaaagagcttgtgttgaacacagaatatgacatatttgaggagttcttagacttttggattcctcgggccctaacatagtacctagtataggatgccctccataaataacccagttgatgaatgggcagatgaatgaatgtagatgaaaatacttcattgtctacttttagggtttaattttgaccatccatgtgcttaatatttatagtctaatggttaatatgctgttcggcrgataaggagcatccatgtgtcaggcaccttgtgaggcagcatgaaggactgagacagatgaggtccctgtttgaagaggcaggagataagccggaaaaacaattcaggaagcaagatgatacaggttatgccgagtgtcttgaagaccatcaacagcgtgatgcaacagagtagctcagaggggaaaggggccatcaggaggcagcctgtcctaggaggcaacatttgagctgggcttgaaggctgagaagaagccagccatgtagggagtgaatagaaagcactgaggaacagctgggtgtggtggctcatatctgtaatcccagcactttgggaggtcgaggcaggtggatcacctgaggttaggagttcaaaaccagcctgaccaacatggtgaaaccctgtctctactaaaaatacaaaaaaaaaaaattagccagacatggtggtgcgtgcctgtaatcccagctgctcgtgaggctgaggcaggagaatcacttgaacccaggaggcggaggttgcagtgagccgagatcatgccattgcactccagcctggacaacgagcgaaactccatcgcaaaaaaaaaaagaaggaaagcactgaggaagtggagcactcaacgtgcctgaggatgaagaggaggccagtggtttgtgctggaagaggtgggtggggacaggatcctttagggcttgtgggcagtgcttaaaggtttgccatgaggtgcccgtgaagagggttaaccaggggaatgccatgatctagtttatttcatacagaaagatctcagggaatagatattgggaacaggagtggaaaacgagggaccagttggctagccctagtccaggagagatcagtgacatggcagagggcatgaagagaagcaggtgggtgggggaaatgtggaggttgaactcgccaagttgactgtagaagatgcaggaaggggtgtgatctaggaccatacctgatttctttgatgcgttgtttatgtctgtagaaaatacatgctaatagaagtaataactgttcgaggacaaagttattaagccatggaacaactccctttacatttatgttgtatcaagaccttgatttaagccagacacggtggctcatgctgtaatcccagcactttgggaggccgagtgtccccaaaggatcacttgaggctaggagtttaagaccagcctgggcaacgtggcaaaaccttgtctctgctgaaaatacaaaaattacctgggcatggtggcacatgcctgtaattccagctactagggaggctgaggcacgagaatctcttgaacctgggagatggaggttgcagtgagctgagatcgcgccactgccctccagcctgggtgacagagaaacacactgtctcagaaaaaaaaaaaagactttgactttcttttctttggttctccagtgtagatgagcagacgtatccatccagtgcaatcttgtgtatttggccatttttccaagatgttttcacccttcagtaccctttctgtcattctcaactggttatgagacctttgagcatttttctttgttctggcatgaaaataaagaatcagactaagaagagaagatgggtttaagccttaatttatatggaattattctacctttgttcccagtttataagaatccattcataattactttttttttttttttttttgaagacagagttttgctctgtcacccaggctggagtgcagtgtcacgatctcggccccctgcagccttcgcctcccgggttcaagcgattctcctgcctcagcctcccaaatagatgggattacaggcatgcaccaccatgccccactaattttttgtatttttagtagagacggggtttcactatgttcgccaggctggttttgagctcccgacctcaagtgatccaccggccttagtgctgggattacaggcatgagccactgcgcccggccccgtaattacatttgaagttacttcacatgcagcatcctctgtagttccaacaattgatactctctcataaatataaaatttgttccatatgtatttcaattcaaagagggtaactttcttagtaactttgcaggaaattcactgagcattttgagagctagagaagccatttccttatagctgtaaagtagaactaaatactgagtttctgataggattctctgcccccttcttccagctgcagaattgtgaacttgaaagcttaacaacatgtttgtcagagaacttgagttttgagataactttggtttggttttgaaaaaaaaaaaaaaaaawawatatatatatatatatatatatgcatagaaaatattccttctgcagtcagtattttcagcagatgggaargggcaggagtgacttgagcttccagccatttcaatctgggtaccttataacatggaagcttgtctggggatgaataaattatagcagttggaataattatgatagaggacaagcagcagccgagagtacaattgacaatggggccaagttggccygattctgtcgtatcagagcatgcatctgtttgccaggttacctgaaaatgctgttttcgaggattctggtgtgttttgtttttcatcgccctcccttttaaaacactgtaagagccatcatctgctagtgaccttttagaaataaaatggctggggcagacgtccacatggctgccgcttcacatgttgggcatccgtgtaagatttaaattgagcaaaaggttgtttggttctaaagcacttgcaggttgtaaatgctcttactcttgcatcttggtggaacagtttctagccagccctgggagtttgtcacctgtaacgagaattattctaccatctcagccagttgcagagtccctcaattggtttacactctgctgttaacatcttgaaaatgttcattgttttttttgacagccttgcattttcattttgcactgggctccacgaagtgtttagccagtgctgtccacatcgtatgttgcacccttgaaacagattgtcctctagagcaggggttggcagatttttcctgtaaaaggccagttttaaaaaaaaattttttttttgagayrgggtctcactcagttacccaggctggagtgcaagtggtgtgatcacggctcactgcagccttgacctcctgggctcaagcagttctcctgcctcagcctcctgaatagctgagactcacactttacacaccaccacacctggctatttaaaaaaattttttktagagctgaggtctcactgtgttgtccatgctgacctcgaactcccgggcactggccacatattaaatatttgaggcttttggagccatgtggcctctgttgcaactactcagctctgcagctgtggcacaaaagttgctgtagcctctgcctaagtgaatgagtgtggccgtggtccaatactcttcattcacaaaacagtctgagatttggggggatcataatttgctgatccctgatctgaaggacctgcacagaacctttaatgacaattcaaatagggatttcgtcacttggaagtaagaaggttcagtcatctttggccagctttgtgttgtgttgaaaattagcccccaaagagaattcctgcagaaggtcagggtctttggggtatttctacacttgagcctctttcttttttaagatgacatacttgttatagttgtcaaatatggacaataacaggaagccaaactcaaataataataatagggtgttacaaagccgggcacagtggtccccacctgtagtcccagctgttctggagcctgaggtgggcaaatcacttgagtcaaggagtttgtgtccagccaggacagcatctaagactccgtgtcttaacaaaaacaaagcaggatgttacagcagtggcgttgtggttttcgttttttaaagattcttcatcatattcaacaaaaaaggaaaaatgatgctgaaacaaagagacaaactgcctataaaaagtaacctgagtagcagggcacggtggctcacgcctgtaatcccagcactttgggaggccgaggcgggcgaatcacctgaggtcaggagtttgagaccagactgagcaacatggtgaaaccccgtctctactaaaaatacaaaaattagctgggtgtggtggcgccgagtaatctcagctactcgagaggctgaggcaggagaattgcttgatcctgggaggcagaggttgcagtgagctgagatggtgccactgcactccagcctgggtgacagagcgagactctgtctcaaaaaaaaaaaaaaaaaaaagtaactttagtaaacaggaagagtacatattctttcaaactgtatcaagaagttaactcctgccattatacactagtacctctgagggggtgggaggaatgctttgtgggctccccaaagggcagcttttcagtccataactgcctcagcaggtatgggaatgtgttgtcttgggtcttttccctaaatgataagcagaggtttatttctcttaagagtacaaatataaagaaaattatctggggataaatcttgatagaaatcaatatacgagggaaatttatatattgatttcttcaggagcagaggagctatttctcatttagacaaatgttccaaggaaggaatctagttaggagctctggcaacattgttgttgtttctgctggagatgatcagagtatagattcgcttggcttttaaatagagtcataagagattaataatcttctcagaacttgcctcctgcctgttcagatgaaatayatgttttattaacattgtttcagctgacatgaaaacaggatatgaaccaaagtcattttaaaagcgctgtctgtgatgagcaatagcaggagaaaaaggaatccagccaactccctactgtttgtggcatcmttcccttagcttcttaccaacctgatcaggaagaagggagttcactctttcccctacttaggtatttattcacatrttcaagaatattgattgattgcctactatgtgccagacagtggtaagtgaacaggcagaaaggttcttgctcgcatgagctttactttcttggtggagagagggaaatagggtagcttcagatggctgtgaatgttgacaatgactgggggatcctcagggttcttttggaggcagtgatgatcaggatgatgaggggaggacctgggggaaaagcagaccaagcagccgatcagcaagcccaggcaggggcgggcttgtatgtttcggagcaaaacggtcccagtgtggctggaggcagggagtttgcggcggtggggcgggtgggggttgggaattgtaagcagaggagtcatggaataagtggctactgagcagatgatgaaaggaaggtaatttaaaccaaacacagcacttaattaccatcacgagctccagcagtggtggaaccaaaagtccaatggggacagagagagaaaggcagagcagaggctacctccagtgagggatggggtcctgagcagagccaattaactgggagggagccaggctcaggtgctaggtgccccagagctacacggcaggaaagagcccagccagcaggcctgtgttctgtttgcagatctaccacctgctagctgtgggctttggagcaagtcaacttaaactctctgacccttcaattcctcatttgtaaaatgagtcgtgatgcttccccctgcaaggttattgtgtggcttggcgacagtgcgcagcaagaatagagcctggctagacagaagcaatcatagccaggagccgctactgttacttggttagtggtaatcagccttcctagggttggtgtctgcttttctttagatattattgagtttacattataccagaaatacttgtatctagatggaagttaacaaaattcaggactgggcatagtggctcatgcctgtaatccaaatacttttttgagaagctgaggtgggtggattgcttgagcccaaaagtttgagaccaacctttgcaacatagtgagacctcatttctacaacaaataaaaaattagccgggtatgatggcaaacacctatagcccccgctacttgggaggttgaggccggaggattgcttgagccaagtagtttgaggatgcagtaagctatgatcgtgctactggactcctgcctgggcaacagagcgagatcccatctcttaaaaaaaaaaaaaagcaagcaaaaacaacaaacaattcaaatgaaggccatatgtattggctttccatgttatctaccctagtactcctttgaactggcacaaagaaagccccttgaaaattcagaaagtgattcaccatatccacaagaggtcctccatgtggctgggtgctcaccgtggttttaagtaggaggcttgtctgcaccttgccaggagtttgtaccctsatggcattctggcatggaaaccactgtgctgtcattttccctgctcagaatcagttctaaatccttatgcgttcctgtgctttgtcagataggagccttctggtgtcaaggtgtttcgtgttgttttatttttttgagacggtcttgctctgtcacccaggcaggagtgcagaggcaygatctcagctcactgcaacctccacctcccgggttgcagtgattctcacgtctcagcctcctgagtagctgggactacaggtgtgcgccaccatgcctggctaatttttgtatttttagtagagacagggtttcgtcatgttggcaggctggtcttgaactcctggcctcaagtaatccacctgcctcaacctcccaaagtgctgggattacaagtgtgagccaccatgcctgacctggtattttttatttttgttttaccatcttggctttcagaaaggaagctaacccatggtttcacagttcaggtagaatttatataacgttatcctttcattataccctaaactttaaagttgaaactggaacatggtgtaaattatctctcacttaataactaactataatttgtgtgtgtattcttctctcagatattcagagatgcaagatttttgcatttggttttttgttttttttttaatctgtgatatagcacagatgaaagctgaagctcgttaattcttgcttaaagtcttcaaagatggacttttaaaaatactcgtttcctggttgcttttaaatatcctttttccctcctcctcattagtaagcaggctggtaactattgtgtcttccctccaatggcatgagaaagtcctttgtttagaataatgtgccttgaatttcaataacctcaaccactttaactcctggctttacacttctaagtgctggaagtctaactttcccatcatggcgctgctgggcaggacagtgaggtgggaggggagcttgctttggaaaggaaggcacacttggtcagagacggttgttcatgtcaccggttgatcctgggaaggatagaacctttccctgagatgaattctctaaatatcagccagaaatcagatggtaaatttgcataaattcagtattcatttcagttcagaggcctttcacctgcggcatgtagattctaaagggacctgggattgagtttcaagaatcactgaactgttccagctctgcccccttccaaaattgtgtataaaattgtgagtctgtgcacttttttttttttttttttttttggagtgttttcatccgagggccttgatccaaaacaggtcaggaacctttcctttctcctcgtggagctccccttccctctctcacatagtgattggcctggcctgcactgtaaggccatactcaagccgccatcctgtaggagctttatatggattaaataatggaattttatggcactctcaggacctgaaggcctytatgattcccatttcacagatgaagaaactgaaaaacaaagaggctaagggccctgaccaagggcagacagctgataaatgacacacacacrcacacacacacacacacacaccccactcacacccacccacccacccacccacacccacctacccacacccacctacccacccctgaagctggagggaaaaaataaactgtcagactcaggagctggtgcaagaattttcatgatgtaaagttttgcagtgtttacttcattgtcctgtggataatggtgtgatgtgtgctcaaaaggctagagagatggccagtgatgaaagacaaacatcaaaaagaagcatgcaacagagacttctgcaaaaatggagtgagaagtctactggcaagtccttgcctcgcgtgctcagtttgtgaaaagtggacagttgtgcrcagcatgagaagtaggtggctgtgccagggaacaggagatggcgtcctcttccaaaaagctggaatagacattgtcattctggtgtgctggtttttttttktttttttttttttttttgaggaatttccttttcatttggattccagttacacatgccaggtacttctgttatttcaggcttayattaatgaaaacattgccaattactccggcatttattttcccaaggaacagccacggagagcatgctgatcaggcagccttgggatgtgcggctcatgtggaattaatcttggggtttaattcttcccactggcatcttgtacagcgagaagggagtagacttacgcctggcactaaatttagccttctccactctcagactggtttgtcttgtgcagaagcccagctttggactgatgttttcttcccagcaaatttacaaggtgctgaattggtggagctgctggcactgtctgtgactcttctgggtttctgaatgacatttcaaatatcactctgcggtgtcttatttatggctggttttcactttgatacttaaatcaagcagtgtttattaactccaaatgaattaactgtgttaaaagtttgcagtagcattttttccaagtctgctttcagggaaaaacacagtagctacatcttgatggtatgtttttaagtgaatcactagcagtggatctgatttaaaatatccaagactacaataataattatacacaaaagaaacaggttgtattctcagattgttagatttttaaagtttttgtcacacactacagataggctttttattaaaaataagaaattgaaaacatttggtgtaattaaaagcaagtcaaagcactaacatatccttttctgataaaaatctgagcactaagaagttcctagcacatccattctgagattaggaacccaagaattagggaggttgtgtgacttgcataatgttacccagctgtggattcagactgggaccagcatccaggtctctgggtcctttgctgatcttgtaaattgctacccaagcctggctttgataggtggaaccgagtagcacagagggacctgagccaaggggtgactctccagcatcctgtatcagctggggtccagcaaacctgagcagagggcccctgccactcccccaggtgactgtccttccgtgggagacagtccatctcaaatgctgcccagcacaacccagccgaagagatgaagctattggatgacacagtgataatagctgttaacgttgcaggttattgcagctttgttacatgcccagcactcccatacacgtgtcgtcccatttaacttcatgcttataatgcccctgagcattatgagcatgagcaggtgtccttatcccctcttcaatgatgaggaaacaggttttgtggggcataccatgtaacacagtgtgcctggcacacagaggggccctggaaatctatgttgggtaaataaagagaaggtaagcagtgtacttgaaggaatgtggctacccatctggatttgagcacagctgtgtctgcctcttcagcccaaagatcctcttaggaatttttagccacctctttccctacaaaagttcaccaaaagagaggaatgttccctgttcctctaaaaccctaggttcttggccaaaccctttggccctaccttgaatacctgtgcctagggactgtgtttgccatttaggagacaaaccattagggggctctgcaggactgtgtagaagggtggagtacccatcatgggtgcatctaagactagaattcgagtcctgcagcctactgtcaaactctcttccccaygtagtagctgtgtgaccttggccaagtgtcttagcctctctgaacttgtttcctcatctgtcagaacagtaatactgaccttgtccagttactgttaggggccaaacagagctcaataaagggtaattggtggctggtgttactgtaatcattaatattagtcctgttaactgccctggggcatgctgatcacaatggctttccttcagtactgaggtagatatttgcatattttatcacaaaagtcaaatgtgcttattgtataattttcaaagagataaagtaaaatcctccataatcctctttccatattacagttgacagttygggtattatattccaagttttttactgtgtatatattaaaatacacatgcaaacattttgttgtttttataagaccatgcttgttttataaaaacagcttggctttgtttttgctccacttactagtgtgccatggtcattgttccgcctcagggtgagcagctcttcctttccacttaatgactttgtggttcactgtctggtgcacttggcgtttcatgccatgattttagctccatccctgcagggccctgctggccgctccatgaccctggccatagagtgcccgagagaacgggtttctgtaaacattgggtttcttcctttcctcctcgttatctatccagtgctccatgctcttcggtctagttgctctgtgtacggtgcatgcaaatcggctgtgacaatgccagaaaggaatggtgtgagcaccatgggtcaggggattaagtgacttcattagggtcccaggcagctcaggacagctctgggtagctcagggagggaactccaagagkgkggccccaaccagacttgcactgtgttcctctctccgttccattcctctctttcctgggacgtctctgatctctcccccattgagctgtcatctcctgtctctcccacttcccacccgcccttgacctgtgctgcctccctccctccctgttgccctgtaaggatgcatctcaggaaaagtgcctggattccagtgatgtggctctgttaatagagtgtcaggaatgtcggtaaaacaggtaaggctatgtccatgccgttgtttctgtatgttttttattgggagcaggtggaactggaaaatgaagacacgtcctctgccagtgtttactgcaaacagtttcctgtatttgactgtgatattttaagcttgattacctcccccagttgatatgttgcctctgtaaattcagctggcatctcttggcttcatcataatgtggctcaaaatacacacttctgggtgatacagttgacctaaaataagcacggaaagcctattaattgctgcagagttgggaaattagatgagctgtcagtgctcagactcgctgttaacggggctgtgttattggcgggatgccgtgtgaatgctaacgtgttgtttctgctctgttccctcacgccttcccggattcagagagaggtaaccggccgattttcacttctccccccttcgtggtgtcttaacgtgtctggcaaagctcacttgctttcttcatgtcgcattgccatcctcacaaccatccttgtctttgaaaggcagaacttttgttttgttttgttttgtttcgcctcttatcaccagcatttaaaacagagtctggaattgcrtctgcgttcctcattctctactgtgtttgaccctggttgtggaaggtgatgggctgagtgattaagtctaacaccaatgtggtcactcactaacgactgagaaaaatctcatcagtgtggcagggagtgaatgtgatggaaataggttatgtgccatgttgtagaaggaggcttttcatgcttctggaaaaattaatatcatggccgggcgtggtggctcacgcctgtaatcctaacactttgggaggccgaggtaggtggatcactcgaggtcaggagttcaagaccagcctggccaacatggcaaaatctcatttctactaagaatacaaaaaattagctaggcgtggtggtgggcacctgtaatcacagctacttgggaggcctaggcaggagaaccacttgaacctgggaggcagtggttgcrgtgagccaagatggcaccactgcattccagccagggtgacagagggatactctgtctctaaataaataaataaataaataaataatattagtgcttatattacatattctctagaatttgattggtaagggttggcactaggctactagcctagccagaagcactgattcagtttcagtgtcaattattagccaaaatatatggtcctccctctccaccacaagaaggatagaaccacagaaaagacatacctatgaaacaagagattttgacctcagttgtgtttttccaatgctctgcatgtcygcctgcccgtttgattgattggggactttaagctccatgattccatagctctaccacttaataaaaactccacttttgatggaataagggaatttggagataattctccttgaatgaatgatggtggttcctgctgggcaaagcggagagacacgaaggcagatctcctctttgtgtcggagttggtgtcatgtaacctccctgcctggttggsagctggaagtgatgagtcctcagctggtatttcctgccacactggtgttgtgactgccctctgctggtggctgttttcccctgtgatgtgctgctgtcatagtccagtggttaagagggagagacagcatagagtgggcggtgacacctgcagggctggtcttccagagagtgtgattaggagaatttgcaggtttcactgactttttaaatcactttgaggagaccctggcgggggcaggtggtggaaagttctggaggatgagggctgtgcatgtggatgtgagctccttcatgtaaaataacagccagtcccatcagagtcaatggggaggacattttcaggtgttcnctagttcctatnctccttgtttatgtgagtgtcctcgctgggaggcagttgctctgaatattaacaccaggaccctgttctagagagggctacagattctagtttgcccaagccacctcgataattgcaggtggtagaatttcagatctgctatttacacactgtgtctcatgagcgtgcctggtgaagaattccctgctaagcctgtgtgtttacccaggtgacgagtacctgggatactcctttcggaggctaaaaaacttagcatctttttaagcttgcaaagaaggagaaagtaagttaagcttaccaagcgagagcctgaactttgtgaaattagtgatgcctgcatgtgatacatgtgacattgggttaaaaagaacagaaaaccagagtcttacatgtgtgtgttttgcggggggtcattctggattggccatctggaaagatgaagtttcttacgtactttcgcttcctgattcctcccactctcaaaacaagattttttcaaagtgcagtcagaaaataaaagcntccagtcttgaaaacaggactcattcttcctccagaccttgtacagactgtcaacaacccacatttttgtatagcccaggaaccctataattacaccgtgttctcatgtgggcttaccttttgaattctattttggatctcatgctaggccctgcacaggtgaaacaaagaggagagaaagccctttgtcctaaagtgccagaagtgcgatgtttggatccaatccgtttgctgctgtcttatccttatttgcagatgggacctgccctttgcaatagcatcaatagaaagataagctgggagggaagggtcrctgggtacattttagcaagtcttagtataattcatatgagtgcaaatatttattaaaaaacacccctcgtggggccaggcgcaatggctcatgcctgtaatcccagcactttgggagtccgaggtgggcggatcacctgaggtcaggaattcgagaccaccctggccaacatggcgaagccccgtctctactaaaaatataaaaattagccaggcatggtgtcacacgcttgtaatcccagctactcgggaggctgaggcaggagaatttcttgaacctgggaggcagaggttgcagtgagccgagatggcaccactgcactccagcctgggcaacagagcgagactccacctcaaaaaaaaaaaagaaaaaagaaaaatccctcatggataaggagacagtatttcaaagtaggctttttgtttgacttctttttcctcatttataatatggtacctaccatttattgaatgcctatcatgtgccagccttcacaaattccctcaataaaacatgccatgtatttgacctgagcaactgtgattgatgtgaaagatgttatcaaattgtggatacttggtaaggaatcccaacaacagagaattggtgagagattgagtgtaatgtgactcttaacagaaaaggacaggtgagttcctgccagttacatgggctctggtgcagctgacaaggtcaacttgttctgtgccactccagaaagcaaaactagatcctacaagcagaagttacagggaggcaaggttgcgttcatcatttagaaaaaatatattttgagccaggtgtggtggcacatgcctgtagtcccagctacttgggaggctgagacgggaggatcgcttgagtctaggaggtcgaggctacaatgagctttgattgcaccactgcactccagcctggccgacagagtgagaccctgtctcaaaataataaagtgaaaaatagtatataaaaatgttttaagaagacatatatatattattcactggagctttccaccaacagaacaggctgatttattaaagaaacgagatgtcctatcatggaaatactctaggtaccacctgctggtgctgctgtgaaagggactttgaaaagttagcctgagtcacagctaagaggtctgtagatgccttttggaagagaggtaaacacataagcaaattccacttacactacgagagttgcacaggagagatttagggagagaataagtagttctggctattttttaaaatagagcctgcttttgccaggcatggtggctcacgcctgtaatcccagcactttgggaggctgaggtgggcggatcacttgagtccaggagttctagaccagcctgcccaatgtggtgaaactccatctccactaaaaatacaaaaattggcaaggcgcgtggctcacgcctgtaatcccagcactttgagaggccgaggcaggcggatcacgaggtcaggagatcgagaccatactggctaacttggtgaaaccccatctctactaaaaatactaaaaattagccaagtgtggtggcacgtgcctgtagtcccaactactcaggaggctgaggcaggagaattgcttgaacccgggaggcggaggttgcagtgagccgagatcacaccactgcactccagccagggcgacagagcgagactccgtctcaaaaaaaaaaaaaaaaaaaaaaaattagccatgtgtggtggtgcacacctgtaatcccagctactcaagaagccaaggcatgagaatcacttgaacccaggaggtggaggttgcagtgagccgagatcatgccactgcactccagcctgggtgacagagcgagaatctgtctcaaaataataataataataataataataataataataataatgcccacttgaataaagaatcatttattcattccataaagatggattaagcccctattgagtgattagaatgctatataactgagaatatataaaagcaatctttggtcctttatatttttttaattaagaaatttgaggctgtcagataagatgtattaacactgtcatttttctccagcaaaactctatcttggtcctctgggagagtaattactgaggaagacagccaaaaagacaggaatgaaaagagttggaaacaccagggctcagtaagcaggtggcaacaggtacttgattcctggtactagcttctgtcaccatttaaagaagagacacaagraactatagctataacccttccacttcctggcttataaaagaaaacgcaatgattctcatgactgcaggcgttaaatggagtgagactccatgtatgggcagcagatggctcctggcctagccttgtaaatggctagggtatggcatgagctggagcagagagcagaaacgggtcttgctgccaagtgtcagacagatcgtgtctgatgatcacaggtggtagaatttcagataaccacaggttcctgggaatctagaagctgttggaaaaactgggagtgatgtkctttctggcccttggagatcttttgggccagctgtgtggttttacagacgagatgctgaagcctggaccctgcgtggctgtgtgaggcgcccggttaatgagtatggctcccagcctgtctgagatgggaccctcctggtgctctggaagccggaagtgctaacggaaggatagccctcaagggctcccaacctgaaggctcctcaaaggtgcctgcagtggaccagccagcccccgtgtcccatgcagcaacagagctggctacgggccctgcctgcttggctgcctgacgcctgatggccatgtggcacccgacacactctttcctccccagcccacatgctcggcctgagctgatcgcaccagtttaggtttgcacagtctgtcaggaacactctgagtgtggaggtgtgtttactacaaagcaatttcttctccccctcagaatacaagaaaatcaaggacctaccctgttgctcttacgtatgaccacagtggcctttagcatcatgacactgggattggggaaaaacccagctgtgtaaaaaactaatgggtgacattttgatcactgtggaagccagctgatgggatatagagtttgtttactatcttctcaatttttatgtgtgtttggaaagttccagaaggagaagagtaaaaaacagaaaggagagagatggatgaactctgttcttttaactcctgtactcctcaggctgggccccaaactccttctcccaggtaagggtccaggaggccaaggtcactgcagacctccctgtggctgagaccacctggcctgtctcccactgttctggaaagctctctacccctttccctcaacyccctttctttgatatctttgggaccagcctctcctgggcttctcctgccctcttccccagcaatttttttcccaccttctcattggacctcctgcctcaaacaaggcctctaaatgtctttcttccccagtcgccaggccttggtttgacatgttttttgtttgtttgtttgtttgtttgtttttgagatggagtcttgctgtgtttgcctaggcaggagtgcagtggtggaatctcagcctactgcaacctccatctcctgagttcaagtgattctcacacctcagcctcccaagtagctgggattacaggtgcacactaccgcacccgcctratttttgtatttttagtagagatggtgttttgccatgttggctaggctggtcttgaactcctgacctgaagagatccacccgccttggcctcccaaaatgctgggattacaggcatgagccaccgcgcccggccagctttgtcttttcatgctccacactctcacctgctcccccgacttcacccacctcccagatccatgtctcctgcccagaccgcaggcctcagtgcagggtcccagcacccacctgcttggtgggcctcgtcacctggtgctcctcaagcacaagcaccccacacgtcttgtccaccctggagctcatcaacttcttgcaccaaaccagccctccttccctcccccactccagtgatggggtgcttagctgtcctagcagggaccccagagttattcttaatygcctccctcatccacgtctctcacacatctgccactcctgccagctatccttccaacacctcttccatctgtctcctctgccctgttctcgcagatgctgatttagcctgcactttgctcatccccctgcgctggaccaccgcagtggcccccagcagtccccttcccttggccggctttctcccaccaaacaaatcacatggggtcacctgtaatattgcaagactgggatggctcggagtaagggccagtcctggcaagacacaaggcactrtgcaaactgagtacagactcccgcacagcacccctgcagyggcacctgagcctcaccacagtgcctggggcatatgcatagggcagctgggagttctcgcaaacaactggggggccttctgacctccctgcctttgctcatacctgtttcaatgttctttgagctgtctgctgccttcttactgtgatgaggtccttcttacacttaaagaagcagctcaaacctcattgcccgtctgtaacattagacgggcttgcaaggctggaaccttatctgtttgaatttgcctcactggttcctgatacataatatcagctagaaggtgcttgtagaagtgaattgaatttttttttttttttttttagacggaatcttgctctctcacccaggctggagtgcagtggcgcgatctcggctcactgcaacctccacctcccgggttcaagcgattctcctgcctcagcctcctgagtagctgggactacaggcgcccgccaccacgcccggctaagtttttgtatttttagtagagacggggtttcacgtgttagccaggatggtctcgatctcctgacctcatgatctgccaccttggcctcccaaagtgctgggattacaggcatgagccaccgcgcccggactttaatgaattgaatattttwaaaaatatcagtctttaataccacaccataaaatccaaatggcagttgcattcatttcctattgttgctgtaacaaatggccacaaaccgagtggcytaacgccacgccacttgattcttttctgtttctggwggtcagaartgtcaaatcccagtgttggcygggctgtgtttcttccaggggctctcggggagaatccgttttcttgccttttccagcttcttgaggctgcctgcattccttggcccctgcctcctgttctttcccttaggaagaaagtgcctcccgccttcccttgtgaatttgcggggcccacctagatagtccagagtaacatccccatctcaggatccttygttgatcacatccgccaagcccctgttggcatgtaagggaacatagccacaggttcctgggatgtggggagggatcatgactctcccgcmgcmgcccttttcagaagtcaggtgccraaaaggcaggcttttcacacaggcaagtgatgcttggatttcgtcttaaatcaatgaaattcgatcgcttgtatgtttcattgtccatagatgaagtcgctccactggtctgtgctctaggcctgaaagaaaggcctcactgcctcttacagatctccatatttagrgactygggatatgttacatgagagtgaaatgggaaatgcacaaatctcttgacctctacagtgaggagaagacacctgttttatcctgggaagtgatgaaacctctggagggttagttaccggactcacccaccgtcatggactgacagattgctgcctccctaatctattagcctctaccttggaggaaacaacaaaagataaggctgtaaaaaaaaaaaagtgagaattcctcccaaaaaagcctgaggctgctgagtttctccctggggaagctgtgggttccagatggttgcccttaaggcatcagtcaccttgctctgcgccagaggaaaatgaagattaataatcataattttttaaagttaagcctaaaaggctgcctatgaaagaactgaggcacagagggcacaaagccgaagttcgataggaataatccattgcttattgaccaggacctgttcatccgccgtgtcggtaaccttgggatgttgcackctggggcctgccagccaccatggagaggctgatggatcttggaggcttctatcagagaatgtcagagccggggagggacttggaaatcatgtttttcaaccccttcacttaaagatgaggtgaaattccatgcccagggttgtatagctaagtggaagcagggctgagactcgaatgtgggtggccagaatctcaatgcctggcccttctggctgctgctgtctcttagaggacagacacaggtgacacctgtaacagtaactacaaaaagdtatgatataacgacctcttctttgtagcacagaatgtaaataccgtgggcattttgatacaagcagggtcctggggccagaggaccaggcggaccgttgagctgggctaggctgagtagatgggcgtgygctggacagtgtggggagggccactggccaccacgtgagggaagacaccactacgagcggacaccaagwcccacctcttctggagcagcggggagtgccgtgcagtgggaggaacatgctggaaagttggtgggacaaattttggaactcttaaaatccacccagaggtttttggactttgtgtggttgaccacagggagctttggggagatttggcctcaggaagatggtggctgcacatggaagttggaaggattggagttgtgtgccgggagacgtggtgtatttctgaaggaccctctagggaggagaaccagaagcaaggcatcccttgagtgtgatctccaaaagggatgtcttctgtccatttcttatgtgttgccttgatggtggttgaggctggatgggaaggccacagtgtggagaagactgtgctcacccctcaaagtctcggcccagtgacttgccccaacccacccccgagcccagtcgtggaacccattcagtactgagcaaggaccgactttcccaacaggaaggagggatgtgtgccacaggcccacacttgtactcagcccrcaaacatgtattagtaccggtgatacgccaggcctgaactagacgctgggatgagttaggcacagtcgtcttcatggagctgcagagtgttgaggggaagacacactcagacacttgctgtgcccccgtgtatgtactgtgtgtgcgaggaaccttccaggctctcacccatcttcagctgagtcctggcaaggggatggagatggcctgagcacaggcagggaggcraagagcagcttagaatggctgcgtggtgagggggctggaaatggagggatggatgccagaaatttccaggaggtgaaacaggacgaatgtggggattgggtgtggcacgtgaggcagggggagtccggttctagcatggaggacactgagctagaacgtgaggaagcaggagtaggttgggaggagaaatgttggggtcatgtgtggattgccggtgattaaagcgtcatggggcagccaggtgaggtgctgctgagctggagcctgggcttagggagccccactgcagggctgcctggggcatggcgaggtgaggttgcgaggcagggttttccggccagaccttcacgatggccagttgcctgctatagtaaatccctgtcccttcccaaggccrccaaggctttcttggggaaagtatccatcatagtctatgaaaaggctgccaggtcttaccttaagagaaataatttaaaaattcctctgtagttatatctccagacagtatcctggcttagcatcagatgcaaataaatcactgtgatccattcctagatgggtaaagcttggtgtatatgtgtgtgtgtgtgtgtgtgtgtgtgtgtgtgtgtgtrtrtrtatataaataaatatataaatatgtgtgtgtgtaaaaacactttcatctttgaactgctgtcttccaatgttaacattgagaaatacagtcgtatcgcatggttcttttgaagccaagtaatgtcacagtcagtatcctttttatcagtagaaaaaatgcgaacacccaacrtcggctgcatgctcaccaaggtgtctcagcaagcaataaatgatgtgccgccgctgccgtcgctctgagatctggagtctgagacgtgtttaaaacagtcaaaggcctttgataggactgcagtccatggtgtctctttgtgttctgacattccctgtgattgcccttcaactttctcagtcagctgtgggctggtccattgtttgtgcacatgtttatacatcagagcctattgtttgcttccgctgcgccactgtctgtgtcattatatcatcttgcgattcatgcgctcctcaagcctttctgttttctaatcataacactggttattacactagatagaagggttctgtgaaattcagttttcactaagggttgttagagattccaagagttcaacagactggcttttgaagttatgttttttttttgttttttttcagagggagtttcacccttgtcccccaggctggagtgcagtggcacagtctcggctcactgtaacctctgcctcctgggctgttcaggcgattctcctgcctcagcctccagagttgctgggattacagacgccggccaccacgcccagctaattttttgtatttttagtagagacagagtttcactgtgttggccaggctggtctccaactcctgacctcaggtgatccgcccacctcggcctcccagtgctgggattacaggcatgagccaccacgcccatccttttttaaaaaaatttttagaggctaagtcttgttctgttgaccagtctggagtgcagtggtacgattatagctcactgcaacctcaaactcctgggctcaagcagttctcccacctcaccctccagaatagctggaactgcagatacatgccactgcacctggcattttttgtttgttttttgtttttttttggttttggttttttttgatagtggtttcactgtgttgcctggttcgagagctggtctcaaacttctggcctcaaacaatcatcttaccttggtctctcaaaacgttgggattacagacatgagccactgcgcctagcccacatcgtaggtattttactcagaaatgaatttctaattgtcataaaactatatgttaggaagctattgtaatttaatttttcttttaatcattgcatacattgtttaccattgacacgctggctgctagctcagttaacttcataactaaagtatgtgttggtaatcagcttctcttactaatggactgatacattttgcttgcacagggattttgcttatgtagcaagagataaagatacaagaattttgaaatgtcatgtatttcgatgtgacacaccagcaaaagccattgccacaagtctccacgagatctgctccaaggtaaggtgggtcagggcagtatgggccgcctctctctttttttcttgctgcataaaaggatgtggaagggcgggggagtgggcacatcaacctgcagttgagctcagggagaagtargcagattgttcagccagagtcattaaagtattcttgctgcgggccaggcatcrctcttgagtagcactccatctacacaaaatgaatagaaccatagtccctcccgccgcctggaaacatatatatatatatatgtgtgtgtgtgttcagccaagtcattaaagtatttttgctgcagsgcaggcatygctctaagtagcactccatctacacaaaatgaatagaaccatagtccctcccgcagcctagaaatgtatatatctcaggtaggcaaaacaatggcagagatacgtacaccccagaaaactgggaaaaggagtcaaagcggattttccaggggcagggccatctgacctgagagtgaatgtgggtagagaaaaaggctacaggaaaggaggtggcaagaaaccatccagggtttctgcaaatgcagggagctggggattgccgttaacacacaccaacttcctgaggacacacagtggctcgtagaagcwccctgtccagctgggaggcaagactgtggtctcatgctagtgagacttccttaaccagagtcacagcctcaaaatgagaacaaacagtctggcgtcaccagcctagcctccgcctcccaccagcataacagcccccttgcagacatccccccaccctctgccctacacacccatggactcccacagatggagtctcttgcttttcaggaggagkttctattaccaagcagctctggctgttacagatttcttctttatgttgacccgaaatcttcctcttggaacttccaggtactgactggagatctgccatctgtagcagcagagaaaggtcccccmattctctttggtggccagctcctcagacacttgaagccttgctgtgtttcaccatgtgttatgtgttttagaggcgctggacaagcatctatcattgagtcttcttgcccctgacttcctccctctccagatccaccacccccgtctctgcagccacttttgggtcacatggctattccagtccctaaccattgtcttctgggcactctctggttggatcccccagatgaacacagtattccaaaagtgagcagagagcagacyagggccaggggctgctctgtcctttgaccgccaaggacacactattgtggtgctcgatgttcttggcaaccacatcaccccctgatttctcttcacatggtggcagctgaacccccaacacactggcacaagcttcttttagccagccctttccatgccccagacttggttaatttcttgaatttagatgcagaattttgccatcccctctgttgaatgtcacctttctgattcaggctgacatcataacccagcctcactcccacaattcttcctgagccgtcaagacccaacccaggccaggagttggcccagcctgttaaccgagcaggaggtccaagccatggtgcctgagggagggacaggggcagggagctgtccccagcctcagaatgaaagagtgcccccgtctgctgctctgaatcccacgatggggacgtgcaggatgggcactggtcttgagatcaccacgtttattcccgcccatgttcacattcttgcattgatgagacgggggtgttgctgccatttgcagcattgcggcctgctccctggatttcatttctcattcattcatgcaacacatagaatggaatgccatttatgtgccaggcactatcaaaggcactggggagagggcaatgaccaaaacagaaaaaaaaaagtccttgcccttatggagcttatattctggcataaagccctcagaacatggcctggcacagaataagtatgcaggaaacgcttgattttattcttgtcggcagccctcttgctcgctgccctgggcacagatctggagataggcagagtagaggtctgcgatggaaatgactttcactccacttggaatggaaaacttagtctgggaatgaagatccgagttacttttggggtcactaaagggtgggcttctttcagtccctaaacccacagcactgtatgtaactggtggagaacaggagtataaagtgctttactcttaagtaaagcagacatcagtgtcccttacagaagagaagcaatttagagcagtttgaggataacagcaaaaatggcaggtgtattagtcggctttcacgctgctaataaagacatacccaagactgggtaatttataaagaaaaagaagtttaatgaactcacagttccatgtggctggtgaggcctcacaatcatggtggaaggtgaaaggcacgtcttacatggcagcaggcaagagagaatcagagccaagcaaaaggggaaaccccttgtcaaaccatcagctcttgtgggacttactcaccaccacgagaacagtatgggggaaaactgcccctatgattcagttatctccaccaggtccctcccataacacatcggaattaagggagctacaattcacgacgagatttgggtgaggacacagccaaagcatgtcagcaggggacatttctgagcacttaatgctgtctaggccttccctatgcgtgacacactcactcatgtgatcctcagaactaccatctgagacaaatactgttaaccacctccgtgtgcagtggagacacaggagatcaggtcacttgcccaaggtcaaggtcacacagctagtaagtggcagaggtgcagtttgaacccatgttgtctgtcttcaaagggtggcatttggaagcactggaagaagccactgctgtggctgccgctggccactgtgggccggcagggtccatgcaagaccagggagacttgtttgagttgtttctagtagaggtgggagcctggtgaatggaagaagtccattccaagcaatcaggagactgctactctgaggaatagtttttcacctatcatccccagagaaaatgagyggaattcctcaacaaaatatgtagccccagagatgcaggggtgggacttcaggcaatagaytaaagctgatctaacttggaagtgaagtcaacctagacactttacaggctggaatagctgaagacatgggggcttgaacccacgctccaaagctgcactttttcccccttagattatggctgaacggaagaatgccaaagcgctggcctgcagctccttacaggaaagggccaatgtgaacctcgatgtccctttgcaaggtaagtcaktggcacctcatgtcttcattatggccctgtccctcctggtccaggactgaaggctctcagatggttctctggtatttcaagtctccttaaagagcacactcaactcagtaagcacaagttgagcctgcacgctgggtctcacagaggcacagagttgattttgcatcactagggttaggcataaagccaggatgagttttgttgttattggacaagattaaagaatattgtctttagtttttgccttcgttttcattttgttttgtattttatgttctttaagaatactgtcttcatattataattcatgtacaacctgggataaggaccctggctggtttaaaaacacgtgggttgggctggtctgaaggtagtgagttacctcagttgatggttcagccagttacagatcgacctccttgtgctcctcattctccccttcccactactatacttgactaatcttaaaaaaagaaaacatgggccaggcgcggtggttcacatctataatcccagcactttgggaggctgaggcgggtggattgcctgagcttaggagttcaagaccagcctgtgcaacatggtgaaaccctgtctctactaaaatacaaaaaattagccaggtatggcagcatgcacctgtagaattgctagaacccaggagatggaggttgcagcgagccaagatcgcaccactgcactccagcctgggcaacagagcgagactcttgtctctaaaaaaaaaaaaacgtgggttgattactgggggaactcagttatcttcctatgtctctgattgtgccctttgaggttacattttctctgggcatcaaccacacctaattaaataggacaccaaaagctgctactttacttaatatacatcaaagagacagtagcagctttaacacatagatgccacttcctgctttcacatgcattcctatcttgaaagttgaacaggattttaacagagccccaatatctggagtaatgctgctcttgtagaatagttgttacatttacatccagaaacatagggcgttatggcacagggcgtgtcctgagcattcagatgatgcagagccacggctgttgtgtacatgtgtgttggaaccactgagaaagatgtgttgcttttgttccctgtagtagattttccaacaccaaagactgagctggtccagaagttccacgtgcrgtacttgggcatgttacctgtagacaaaccagtcggtatgtgaaatgtttattgtctttccactttgcaagtgtgcgggagctcacaggaggcgttcgccctccgaggagggtgaggtctgctgtttactctcacgccttgtcttgaatcaaactgtcacactgtcacctgccagagaacataaacggtcctgatcaaaagatgagtagagggacaggccccgctgctttgacctgtcatccccagcatgcaggactttagcaatacagacgtggatttcttgtttacccagtagtccagagctgtgtgactcagggccgtggaagagctccgctgctctgaaacgaggcctccatctctgaggccagggcacctgcttcgtgtcttgtcagctggcgggccaggagaaaggactgtggaggcttcatgctgtcaaggagtgacacagtagtggcacacacagcattcagctcacatgccaggggcagagtgtagttgctgggctataccaagccaaaaagagactgggagatgaagccttcaccagggctaaaaaaggctgtggagaaatcgcaagctacatatactgccaagggggctgtaagatggtgcagctgctttggaaaacagtctggcattcttcagaaggtgaaacatagttactttagacccagcaactcagttcctaggcgtagacccaagagaagtgaaaaygtttgtgcatrcaaaaacgtgtatgcaaatgttcacagcagaattattgatgagagtcaaaaagcgaaacaacctgaatgtcctgacaaatcaactgacaattagataaataagatgtgatacttccatacagtggaattttatttggcaataaaaaggaatgaaggactgaagtgcgctgtagcgtggatgaagcctgaaaacatgctatgagggaagtcagtcccaaaagactgcatactgtgtgattacgttcatatgaaacgcccaaaataggcagagctctagcgtcagaaagtaggtaagggttgccttggtctaggggtctggggagtgggggaaaaatgsagaatgacccctaccaggcacggggtttctctttggggtgatgaaactgttctaaaattgattatggtaggtctagcatggtggctcacacctgtaatctcagcactttgggaagccaaggcaggtggattgcttgagcccagaagttcaagaccagcccaggcaacatggcaaaacctcatctctacaaaaaaaattcaaaaaattagctgggcatggtggcatgtacctgtagtcccagctactccagaggccgaggtgggaggatcatctgagcctgggaggctgaggctacagtgagccgtgattgtaccactgcacyccagcctgggtgacagagcaacaccctgtctcaaaaaaaaattgatgatggtgatgggtgcgctctgtgaatgtactaaaatccactggattgcacactttacgtgagtgaattgcatgtgaatgatacctcaataaagctgtcactcccacccctatcccccagaaaaactgtggaaacagctggcaaaagggccctactcaatggggggatccactgtaaaggtgccatcaagagacagtgagggtggagagaggctgaagggccatggtctgcataggtagacagcgtctaaggcaccaggtccccggagcttctcctgactctcctctcctactgaaaaggctgttatttcttttttttctttttctttttttgttttttgagacagagtctcactgatacttgcccaggctggagtgcagtggtgcgatctcagctcactgcagcctccgcctcctgggttcaagcaagcatgtccagctaatttttgtatttttagtagagacagggtttcaccgtgttggccaggctggtctcgaactcctgacctcaaatgatcctggctcagcctcccaragtgctgagattacaggcgtgagccactacgcccggccagaagctggtatttcattcctgttgagcaaacatgagaatgaagtgtcctgtctattaaaaaaagatcagtctgggcgtagctgttattggtgatttgggcccacatttgagtgtggtaagtggctttaggacactttaaattatccttttctgtccccaggaatggatattttgaacagtgccatagaaaatcttatgacctcatccaacaaggaggactggctgtcagtgaacatgaacgtggctgatgccactgtgactgtcatcagtgaaaaggtgagaaggaatcttcgatgacattggtgtgtcttatacagtgagtataagatacagtggttttctgtggaacttaggaacatagtcaaggccggagttgtgcatccttgtgattaagatggcctacatttgaaagatttggccctttgtctgggtctaaatctgtgcatacctctgttttcctgtggcctgagaaacttctcttctggtgcttctgattctgtcttcctcatgtgccccagagagaaattgtttgctagaggtgagtgtgtgacgctagtagtcgctcactctcagggcgccagtattgcctgggctgtgtgatctggggatgaaaagcagaagatgcttccatttgggagagtcctgtgactatcagtagcagaaggagctattggttgtcttgagaagaggccacattagcctcagcccaaattatctcagtttcgtggttgaagaaattgaagcacagagaggctaagtcatttgcccagcatcacacagttggaagcaatggaatcaggacttaaatccaggcaacctggcccagacttgtgcccacttttctattctgcctctgtgaagcacctgccagggaaagaccaccagtcatcagcctgcccmacagctgcccggttcaccctggagagaggagcagggtgctcactgcctgcctccagctggccacactgagctctcctcacctcttcaagtaggtcccgcccttccccacaccagcatcatcgcaagcactgcaccctccatgctccaccctctgcctacccgacccttacccagatcaccaccacagcctccttcctcctgagaaaacttcccgacctctcacactagtgtactttgctcattaaacactcccaaggcactagagtgaatatttaattagtcaagatgttaatgatccaaaagtcaacattttggatgtgtttattaattcaaaacttgcatatggttcttgcaaaggatgtggtgttcatccctatgagaaagaattctgaacatttctttacgctgcctcatgtggatcccagatggacaccagtttgcaagagagaaaagaaaaaaacaatttgacaactttttgttgatttggcagctttttgttttatatggttttagatggaaatgtgattcagtgtgctgtttagtttgggtaagaatcactggacgaagaaagataccgtgaatcccttttttctggtgctctgggggtttacttggccaaatgggttttgggccaccaggtgtcctgtatttgggctagatgtaagaagtatggacggcactgtccctccccacagtgaactcacagccacgtagcataatggagaatgggacccacatcacaccccatgacagcagtgtagttcagagcaagaatgacctccagaacagggtagccatgcagtgatggcctcttcagacatttgggcaaggttccgcctttcgagaaaaacacaggtcctttctgaattcggcctggctatactttctgaatgmcagttcctatgtgctgccactcttaagcttgatcctgggatctcctgattggatgccgcataatgtctcttgcagaatgaagaggaagtcttagtggaatgtcgtgtgcgattcctgtccttcatgggtgttgggaaggacgtccacacatttgccttcatcatggacacggggaaccagcgctttgagtgccacgttttctggtgcgagcctaatgctggtaacgtgtctgaggcggtgcaggccgcctgcatggtgagttatcccggtacaggctgttgagccctcccrcctctgctcatctctaatatgccatacattatagcagaatcactcacggaaatgaaaaaagtcraatccctaaagtaatgctttacyttataacgccgtcattcctasggccagaatcagttatgataaacagattacatctccaaaggccagaactcctgaaagaagtggggccagatagaggctccgatgagtttcataaccaccaccttgacgacggtcaatccttgatcccaaatcaatttcatgtgtgaaatgttggtcgtgtatgagttggtactgtttgggttcaattcagtactttaaaaatcaatacattgaatgacttttgtttccagtgattggtttctgtacaccgttcttatatattttatttatatctgttaactcagtccttmcgacaactctgttaggtagttgttagttctgttttatttatgagaaaatagagactttagggaagttagagaatgggcctcagggcttgtcggtaagtgacagagccgagcctggattcagccccaagctgccaggtgacaaagtcagagctctttataccacatggatacttggaaacaaacaagaatccctcattattccttcagcatgtgtctttgtgcccctcttatgccagacactgcaaaagttctaataaaaatgagggaactgggccgggggtggtggcttacgcctgtaatcccaacactctgggaggctgaggcaggcggatcacttgaggtcagaagttcaagaccagcctgaccaaatggagaagccctgtctctactaaaaatacaaaattagccagcgtggtggcgcatccctgtaatcccagctactcgggaggctgaggcaggagaatcacttgaacctgagaggcagaggttgcagtgaaccgagatcgcgtcattgcactccagcctgggcaacaagagggaaacccatctcaaaaaaaaatgagggagctatatgagtgtgggcaccaaagcctgtgggcaggtgtgttccagcagcagcaggttgggtgctgggcccgagtggaaggaggtgcggtccagatcatggcgggcttatgatgatggcgtgtgggggcctgattttcttcagcaaggattgctaaactggggattgaattgattgtatttagattatttatttatttatttattkagatgaagttttgcttttgttgcccaggctggagtgcaatggcgcgatctcagctcactgcaaccttcgcctcctgggtttaagtgattctcttgcctcagcctcccaaatasctgggattacaggcacctgccaccacgcctggctaattttttatatttttagtagagatggggcttcatcatgttggccaggctggtctcaaactcctgacctcaggtaatccacccgcctcagcctcccaagtgctgggattaccggcatgagccaccgcacccagcctgtatttagattttagacgagtatccagcaaaaaaagaagacaaccaagtagaggataggttggaggaacaaggctgaggtggcgatcagccaggagcccagttaccttctgcagatgggagagaggaggagcgtccacgctaggagagcagcgttgggaacaaacaggagcagaggctttgagaagcaccgagctgcctggctgggggagaactgctgcatgtgaagcccctgggcttcatttaattcagcctcgcacttacgggctggaatctggggcattcagcatgactgagatacagtccttgcattgtagagctcaggtatagtgggggagacacagaaacctaaactctgttacagtgtagaaagtgctgtaaataaaagtatgaggatcttcactttcagccgggcgtggtggcacatgcctgtagtcccagcttctgaggaggctaaggtgggaggatggctcaaacccaggaggtcgaggtgcagtgagctacgatggcaccactgtagtccagcctgggtgacagagcgagaccctgtctcaaaaaaataaataagaaaaataagtatgagactgtgctggattgagaagtaactgggaagaaaaagaagtggaggccctaaaagcagataacttacaaagtttgccagtgagggggagcttgaagggcagcattggagggtttgttcatgtgtttatttcaggacaggagaggcctgccccttttttattctttatttttattttattttattttttttaagagatgggatcttgctatattccccaggttggtcttgaactcctccctggaacggcaggggagcaccaccatgcccagctaggttttcttttgtggaaaatggaggtagataaagagtggaggaggctggkcacagtagctcacgcctgtaatcccaatactttgggaggctgaggcgggcggatcacttgmggtcaggaggttgagaccagcctggccaacatggtgaaacccatctctaccaaaaaatacaaaaattagccgagcgtggtggcatgtacctgtagtcccagctactcagggaggctgaggtgggaggatggcttgaacttgggggtggaggttgcagtgagctgagattgcaccactgcacttcagcctgtgtgaaagagtgagaccctgtctcaaaaaaaaaaaaaagaaaaaaaaaaaagagagccaaggggagggacttagcctacgaattagttagagagaccttttactttgacatagtccagaagatgctaagaaccaagaatgggtggagcttggggaaggaaagggagttctctgaccgccgcccccccaccccatacagcacattgtgaggttatgaatgaagggaaagtttgcacctgtagtcccagctactcaggaggctgagatgagaggaccccttgagcccaggagttcaagtccagcctgggcaacatagaaaggccctatgtctaataaaaatgttaaaaggatgaggtgggagagcagattgcaaaggtggggcgtagaaaagaggcatttgacctttatcatttgaaatagagcaggaaggagggagaaggggaggcctggcgttgaacwcttgttatctggtgtcacacttacaccatcctctgtgagagtggctaactccctgcaagaactgyagggccaggattctaactcagacaccctgaatatgcaggagcagggctggggttcaggggagcagggacagtagaggagtcaggtgaacccactgaccaggtacagggagttgatgagataaaggagatctgtgaagaaaatagaaaatgggagatttcagccaagcgaaaatggatgacaactatttyggtattttatgaaattgaaacagatcatagcagatggttttagtcataaaatgaatggctttcmgacttaattatacgtttaagtgataacgacaatgagttttatctctttggctacagttggttttctgattctcaattcattttccctcttggaaacaacttttactcatttgcttcctattttaattgtatcactgcaacgagtggacacagctcagccaatctagtataaggcatactagtaaaatcaaaccattcttctctcctgcccgctctgaatccagtgtttctagctcaggggctttcttcttagttcaaatccgcatgattctcctctgaatggtccgtatgtgaatttataccatgtgaatatctattgacactaacgttcttttgaatctgcttaatttttaggcatattttacagctgtgtggtataggcccaacagaagacattttggcaaaatttagaatagaacagagagggaycctttatgaattccaacacttaggtgtggttttgattcacwctggatgtacgtgactactatttgaaattccaagtccagagtcccatgttgccatgtataaatccgtgctttcgatgtgtgtggtttgggttgtgatgtgggcctagtaaaataccttacacagaggagacgtgtaatcaatcatcatatttcatatgattgatttgaaaggggttgttttgtggcctaaggggtatgatagaacactgtaccatatccttcccccagggtcttgctttttacagggacatcagcctattccattactaaagagcctgttaatatttaagttgattttttttaaaaaagccatggagtgacagtccttccttggtatacgtggggcggggtggaggtgttctaggacctctgagtataccaaaatcctacatattcaggtcctgcagaacccacgcataggagaagtctgccctctgagtaattgggttttgcataccaggaatactattttcaatctgtgtttggttgaaaaaaaatcctcatataagtggacctgcacagttcaaactctgttgttcaaagatcagctgtatttttttttcattatttattttgagacagggttcactccgtcgcccaggctggagtgcagtggccatgctcacagctcactgcagccttgacctcccagtctgaagcaatcctcccgcctcagcctcccaagtagctggaaccacaggcatgtgccaccacacctggctaatttttgtattttttgtagagacacggtttcaccatgttgcccaggccggtttcaaactcctgggctcaagtgatccgcctccctcagcctcccaaagtgctaggattacaggagtgaaacaccatgactggccaggtcaactgtattttaaaacgtttggattagaaaaaaaaaaatttgataaattttaactttttatctaatcttaaagaattagttatcttcccattatgcaaaaccaggtggactacattgttatatttctgaagaacaggaattatccctggtgccagtgctaatggatttttaaaaattaatccataaagatttagacttgtatgtaccatgtatcttgaaatcttaatacctcatctttttaattaaaacaggaaatagggaaggaaacaaacatttctgaatgccttctgtgttgctaggcctatttcaggcattccacaagcattacaagtattacttacttaatcataacaccctctgtaaatagtcctttcttcagccattttacagttgaagaaactgaggctcagagagatttaataattcgtctggggttcacaagtgatagaccttaaactatgccctttctactgtgctgtcagtgtaccatgagcacctgcctagatttgcatgtctctgatgaaaaatgtaattaacacactctctcccaatcctttctggtttcattagctcattgactgtgaggtgtattcgttgcggactatcaatatagaggacacgtggagggtggaaatggatggmaggaaagggtggcaaaagccaaaacccctttgttgagcctaatcttttaggagaatttaaagcactcacattcagagaaaaataactcttggatttatgtttaggaactaggtcgttaacctttgggagtcaatgtattatgggtcatgacttaaagtcatattaaagatgaaataatatgttgttaattaccttaaaacacgttttgttttatttcagttacgatatcagaagtgcttggtagccaggccgccttctcagaaagttcgaccacctccaccgccagcagattcagtaaccagaagagtcacaaccaatgtaaaacgaggggtcttatccctcattgacactttgaaacagaaacgccctgtcaccgaaatgccatagctgcacatgcaaaaggactcggctatttacctgaagattgactagctacactaaagaaaatgaactccgccatccgaccttccatccagttgctgatgctttgtcttcagagaatttacccttaaccaagcagtgttagacaagcatgttctctcgtcttgccaccatcatgtgatatgaaaagaagcatgaataattttttttgctgtaagttacatcatgcgcagtggaaggtctttttcttattgtaaatattgtgaacattacttaacttcacacacacacagagaagagtgtggccccacccctcctagtgaactaacgctgcgtccttggaatgaatgatgcgtgagttagtttcactgtcttcttggctggacctgtcacaagcaacctttaagtcctacagcactttgccctgttttcaacattggagtaggcactgcatagcagataccattgaattgctgtaaaaataggatggcgagtttgtgttttaatttttcataaaattgaacctgttggttgacaaaattggctgttggcatcagtatagaaaccaactggcagctttccctgacaagctctttgacacatggacaccatttcatgtctacagctgtttgtgggatgttggaaaaaaatgaaacttcaaaattgatgaaaaactaaattcgaggaattaaaatcgaacaaaacatagcctttcttttccgatggttttcaaactgattatttttaaaagagattaataaaatcataatgcattttgggtgggacatatttcaaacttctgccttatattgtacggtgcagctagagaattatagttcactatggccattctctacataaacattaagatgaaatactcctcatcagcctttcatccttagtttgagaattagctgatatgcaatttgaagttgaggaaatatcattgatatttctatcatgcacgattattttagatttctaccaccgtgtgatttttgctagtccatgtgctagaggtaaacgttctgctggaattctgcatccagctctatccccctctgatgctttttgcccagaaagctgtctgtccatcatgtattgtccatggcaacaaattacattaggttgaacctttccttgattttatgtatttaatattagaatttgttggactcaactagatatattttttaatttatattttttccattttactttgaagatttgaaatgttcatacctgagcaaagtctacacaggagtaatggactgtttaacaagtttcccaaaacagcattttcctgctccttcgtatgtaggtgagaaacttagctggaaagacatacaaatttagactctcgttgacattgtcgttttaaaaggaagttgctaaggcgatcaatctcaatattagtcttgtttacttcttcttaatgtcaaaattaacatttacaacatccaattataaaagtaatgctttatgtttatacactgctatgtacttgtcaaaatggtttccacattcttatcacatctgagccttaccaggtagagaaggtactaaatacactttagaagtaaaaatatgaagtaccgagaggctaaacccactggcctaagatctcaccaaagttcatgaaaaccaggactaggacccacggctcccaaagcccgttcttgctgtgttgtgctgcctccatatccgtcaggaagagcctttccagaatgattctgggcatatactaagaagagcaggtatggaaagatctattgtcagggaatcttagaattccctacacgagtgggagaaagatgtccaaattccttacgcagtggtattcatgatggtgccctatctaagtccaggactgttttcctacagcgtgcctcaaaagtgttgtagagggcaggattctacattcacagcctgttccatctacgagattttccagatgctacttgtggtagacattcctaactcatggtacttagccaccagagatcatgatggaatgagtgggtggcttttctacctgccattccctcagaattcatgaggggtgggggacagggggaccggaattgtcttagcaccccaatgttatgacaaaactatgctactttagaaacgcagtctgtttttcaccaattgacatactactgatctgaagtaaccagtgccatcataagaaattactgcattaagaaaatccttgctgtgccctttgaaaagctgttcagaaatcatttacagtgatctttcatctcggtcgctgtagtgaaacattttagtgtgataaatttcaaaattctaaacaaattacccacttttatattggaaatctctaccagaactccctcttcattttttaaggcatacatttgcttgttttcaagatcaagaattctgagctagctttaagtagcaaactgatttatatgtgcaattataggatgcattaagatgaatgatagcctttacatattgaaaaytttgcagacgttttgttttgaaaatggcattgtatagtaaatgcaaattaattttgtaaaattatgttaaagagtatgttcagacactttctgccatggccaaaaagtatgtatgaaagtatgtgtgtatttgtttgtaaaaggatgccaatgttttacctgatatcttagtgacacttcagttatctatgcattctttagatctgtgattcggtaaacaggcagccatgttcacgatgccttctatgtcttaccatatttttaattaacctgttaaatacagcttaaaatatttttattttatttattctatttttactgaaatatactgcattattgtgttaatgtattmtctttcctggatattatctcccagtgtatccagatctaagtaatctcagtgaactatacattgcctaaaaagtggttttgtaatgatttgtagtcacatttctattgggatatgtagaagaaaaggcaaaatgcttaaagttccttttattttttaaaagcagctagatagacacagacttgccacctcatacatctgctccttggcaacatcaaggggaacgactagccaacatgcctatggctaaaaactttcctttgcagactaaagcactgcttggtgcttcrtttttctacccttcacaacatgtgtgatttcatctaagagatatatacatgtacacatgccctttgtttccacctggatacaagatcactcatagctaattaggaccattgttttttgttcatctgtcttgttgcatgaagggacattagacccatttccattaaaataagttcttggtgataaactgtggcactgctacttctttttaaatccactttatgatttcaagatggacacttgtaagatgactcgacacaaggccattgcctggaagccccagagctttcctctgtttgtatggcccgttcatgtcccaggcattgcaacacaaactcaagatttcaccacaacatgacaagcattttcctaactgatattagcacaatttaactaataagccccttcgctctctagttggccaggcttaacctaatacacatctaacgtgtgtgccacacggccagtagaaagtttaacttcagcttcagggsaaagatacccactcacaccgtgtcaacgcaagcagtagttcctggcctccagagcagcttacttcccctgaaagaacgctttgttttcctttatgcccttttcctgttgaccacttttacacatttaaatgtaatttgttgtgagaataaatttagctgcataaaacgttcggctcatttatctgacatcttagtcacatatacaaggaatagaaatagaaactcggtgtctctagttatttttaaattattcttacctcagacttcttagaaatcactttagtaatggagcattttgctttgattagttactacatatttctgcctggtaagaactaggaagtaacttcaaattttgagtaatcaccctgtacttatttggtgatcaggaaggccagctggccttccggacatagaagcctatttagtcaccaactcgagtcttttgtaagcggtcttgctaggattgtgatattttagcacgaagaagtttatcacttcctttaagaacctgacatcaaagaataaagaatagaggtgtacacacactaaatccaaaatgaaaggtaactagagaaatcagttgaatctggtttagcttaactgttaggcgcaggaaggcagataaacagaatttaaagtatgtccccgctttttgttcatcttgcacttccacagtggtttctctctagtcagtaacaaaatttcattatggtttcaggcattatatggtggtaaataatttcagattaaaaatgtgtttgctattggagtatctgaatactagtaatttcattatttagaattttgcagcacttttatctcaagaagaagtccaagaatgtaaaatgccaaatgaaacatgtcagtggaatcaatattctccttcattagaattccctcatattgctttttttttttttcttcagacagagtcttactctgtcgcctaggctggagtgcagtggtgtaatttcagctcaccacaacctccacctcccaagttcaagcaattctcgcctcagcctcctgagtagctgggattacaggcatgcaccgccacgcctggccaatttgtatatttttagtagagacagggtttcgccacgttggccaggctggtctcgaactcctgacctcaggtgatccgcccgccccaacctcccaaagtatgtgagccaccacgtccggcctcatattgcttttatccaaaattcttttcccttttcactctaccaaagtatttaaataatcctgtccttcatagaagattctcaaagaagaaaactgcagtgtaattaatgaatggtttaattcagaatcttcatatacttctaaagagaaaaataatttagtgccaaatgcatgttaggagataatcaatgtaagtggcaacaaattgtgacttcacatgctactgtagagatcagaaaattatcctaaactattccataacaatgagacaacatcacagaaaatacacttgaaaataaaaatctcaagaccagctacttctggacaatggaatacttttcagtctggtatggtggagggcccgaaaaggataagggattcttatgatacacaatgggattctttactgaacaatatgttaaattaagctgcaccgccttccttgaggcatggactaccctaaccaaccagatagaaatctgggtgggataagaggatgagccacacgctataattttagggcaaggagatagtgtttgattttcaaaatcagcaaaataagctgagcactttatatctttctgtacaagagtgataacatgaagaattcttcttcagggatttaaaatacaataagcctggttcaactataaaaagtcttgtttcctttcttcattgacacttttttttttttttttttttttttgaggcaaggtctcactctgcttcccaggctggagtgcagtggggcaatattggctcactgcaacctgcacctcctggactcaagagatcctcgtacctcagcctcctaagtagctgggactacaggcgtgtcccaccacacccagctaatttttgtattttttgtagagatggggttttggggtttcgccatgttgtccaggctcgtctggaactccggtgctcaagtggcgtgcccacctcagcctcccaaactgctgagattacagatgtgagccactgcacccagcccactgacacgttttactgataaatgtaaatctaagctaaaataaaaataatgtattaccgctataatacaattcaccattctcttttctcacttcaagtaagaaagtaaaaatagaatatcagagctgaagtagacctaagtattcatcttgaagaagataatattctaaaaatcatgccacctgaattgagcatttaggaatttatgtaacatttctatacaactgaattgcaaaaataaaactttaaattcaaactttatgaatatgtctatgaatgtttttaaataataagatatatagttgtatcttaattctatttaatgacaatttctgttgccatgatgaaaaatcagtagacccagaaatgataatcataccaatttttggtaggcaattgagaatacattcaagatgaatcgacatttaatataattaattaacatagtgctacaatatatttaattgtgcctcagaaatgatttaccaaagtttgattcctgtgtgctatttgaaatgacttgtagattttgttgtatcccctgatcttagaatcagaaatttgtgggtttcttcaacaataggtatcgcttgcattcaacagttttgcctcttcttcagaattattaatatttagatggaaatttgctcacagtcttttgtaacagtgcttgacatagaggaagggagagatgattgtgtccagtctgctcaggatcctggaagctcccccagtgagagacacctcactgtaaaaggaactctgagctacacacacctggcacttgggaacttcctgcgcttcctacttaaactcaacttcagtcacgttacaaaaactcatgttcattccctgttcaaagaacagcttgatatttaagaaaaaatcacccttgatcgtgactgagaaagtcacgactacaaccgcatggatgctgaagagcggtcagctggcgggagaggccaggatcgtttgcctgtttggctttctaatgagctacctgctgaagggaggcagtgtttccttccctgcaggggaaacttggcagctttaagtccagcctgaaagttcacaggagtgagataagttctgaccgctgatactgagtctctaactggatcctctcagagcagcagtgattggctgaagtctctgaattctgctttgctgactcctacattattgtttctcacttgtctgaattctctgaaagtaatatcacacttagaagatccctaggtgaccaaaagaatgaatatcttgtgtagagatgtagaatcttcagagaaatactagactttgaaaaaaaatcaactgctctttggcccctataaaaaacacaagacaatcaaagccatcgccgaggaggcctgagtagggaggaaggtgtgtcatctttaggcttttcctcttttctggatagtgagtgtgtgggaaggcaggtgggcacaagtgccttgggtgcaacccaacgacagtacaaatgttgagttggcatccgagatctgatcccttggggacttgaaaatggcataaagactggaggcagaacaatctcgatgggtttcagagcaaccattctgtcttctggccgaggtcttaagaagtgtgtctgccgttcacgcggtctggagggacaagtgttcttcacaaatgcaggcactgcaggatggggggccagcttgttgggttttctggtctgtgaggaagcccccacttgagcagtatttttctggggaagaggtggttttgttacagtctctgatagattagcactggctttagtttctcgattcaggaactcagcaattttcatttggatgccattatcagtagtggcaccttttgtcaatgatgtttttgattttttcttcttcttctcccgttttgatgatttacccaactcaatcccatccagcagacccttggctgcagctcgggccaaaacatcattcacagacactgtctcagaagggtcccgctgcaattaaagaagcatttactaaatgtgggagttagctattattgtgtctcccgcaaatatttatcaatgtatcagtaaaaataaaaagactctctttattatactaaaagaaataagaaatagtttttaggccttagtccccaatctcataagcctcagcgaatgcctttttaaaaaaacaaacaaaaaaaaaacttaaacttccccatttatgaacctgatacctgatagaaaaaaagaatcacacagattttttttttttttttttttttttgagatggagtcttgctttgtcgcccaggctggtgcgatctcagctcactgcaacctccacctcccaagttcaagcagttctcctgcctcagccttctgagtagctgggattataggcatgtgccaccacacccagctgatttttgtattttagtagagatggagtgaaccatgttggccaggctggtctcgaactcctgacctcaggtgatccacccacgtcagcctcccaaagtgctgggcttacaggcttgagcccccatgcctggctgcttatttcttacatatgagggaagatgcactagatgttacaaaatgcttggggaggtgggggtggcagccaggcagaagaggaacatcgggggaagtataaagaacagggnnnnnnnnnnnnnnnnnnnntaccagactgaaaagtattccattgtccagaagtagctggtcttgagatttttattttcaagtgtattttctgtgatgttgtctcattgttatggaatagtttaggataattttctgatctctacagtagcatgtgaagtcacaatttgttgccacttacattgattatctcctaacatgcatttggcactaaattatttttctctttagaagcatatgaagattctgaattataccattcattaatgacacagcagttttattctttgagaatcttctatgaagggcagtattatttagacactttggtagagtgaaaagggaaaagaattttgcatgacagccctcccccgccggttcacacgggtcatcaccatctgttaggtaggcccaccccaatcactcatggtctggagttcaagaccagcctggccaagatggtgaaaccccgtctctactaaaaataaaaaaattagccgggcatggtggtggacgcctgtaatcccagctactaggttgaggctgagtcagagaattgcttgaacctgggaggcggaggttgcaatgagccgagatcacgccactgcactccagcctgggctacagagcaagactccgtctcaaaaaaaaaaaaaaaagaacagggcttatttgccaattcttgttcctgcccttcagctgaaatgtgtttgtgaaatgcaaacacatctttacagaatgtgcaaagttcctggcttcctcttatgaggctttgtagtttattaattccaaagtatgacatggattaggattttttttccttacctcccttgttaaaatagaaagaaaacaaccattggtaatttcagatggttccattctgaaaaatttatcagtagacaattgaatttcctttaaggagcacagtggaagaacaggaggactaagcctgcagcagacaggaacaagcattcagcagttagaatggcttctttgccaagagaggaagaaagtaaattacactacatttttttctagtatactttaccaatcgtttaaacagaaattccaatcaagaacacaattctgaagcagcctttccctaaatactattataagttaaaagctctaatattttatattcataatttattataaatcccagattctccatctttaaccaactatgccaagaataacaaatgtttaacaaactaaaaactgaccttcccaaagtcactaatatggcagtaaaagctttccattatcaaagcaggtaaatatgtacattaatcacagttatccaaaatgtcctatatttcta

SEQ ID NO: 6877 - DNA, 62822 bp, Homo sapiens
atggtggcacacacttgtggtcccagctactcaggaagctgaggtgggaggatcacttgagcccagggagtcaaggctgcaggaagccatgatcatgccactgtactccagcctgggcaacagagcaagactgtctcaaaaaaagggtggggggtatgcagggagggatgaaacttccataaatacaccatagcatttaaatcaggggacttggattcttttccttggagatatactctgaagaccccagttttgtgactgacattagtgagttcagcataaaattattttttttagcagcaggcagtggcagcttacaaagggccttgcctgccctgccaattcagagattctggcttgcagagaaaacaaggtaatttcctattattcttgggcgggtaggaattggttgggaactatgatagaaaacattaaaaggtttagccctggagcagaattatgctagccttgtaattaaggcaaatttttggtggacgatatcaaatctacttgttttaaactttaaatccattttacaaagaattgaatctaaagaatagaatgtactagaacaacttcagtgaaactctgaaatgtggaattgtaaagtgcagctcctcagtgacccaacaactcagtgggggaagattgacgtaacacaggagactacatttgttcagaaaagcaaacaatcagtgtggcctacatttgttcagaaaagcaaacaatcagtgtggcctagactagtgaggggcaagtttggaactaacatggcaggatgtagaggattgggagagtgagtgggagggaggtgatcccaggagcctagaacaaccctcatgaaggcccagggtttttcatgggcaggagggttcagggcctgaagtgactgtagtagaaacactgaatgggccaaacagccaagatgagcaggatggcagctccttttgtggggacttgaaagtcagacagaattgggagatagtttggttttcttcacagcatattaatgctctgaaattaaaattgccttttaatacagcatatacttagttataatcctgcttcatgagaagaaaatgctcatttgtaaagtcatctctgactggtttatcattttgcccttttccaaaacacttggaaagtaaccagtttccctgaaagaaaaggcaaagttttgagcagttgttattaaattagaggaggtgcttctgtacaaggggaagtcggtagctgggaagctgatagcacagatcccaccatagtccatttcatagacatttaattcagtaaccctgcctccgaggagacctgtagtgaaactgaccacaaagctaatggaatatttaagtttgggcttcttaaaggaaaaaatatgtgacaactcattctcatctatggggcagcagacatccagtccactgctgacagactacctgcccctttcagaatccggtctctcttactccctgattcagatccttagcctcattccgaagtgctttgagaccactctgtgcctttagacaaattacatgtcaactataattcacataccataaaattcatcctcttaaagtgtacaattcagtggttttaaatgtattcacagagttacacaaccatcaccagaacatttgcagtcccagctatttgtgagatggaagtaggaagatcgcttgagcccaggaggttgaggctgcagtgaaccatgatcatgccactgcactccagcctgggtaacagagtgagaccctgtttcaaaaacaaacaaacaaacaaataaaaaactcaacttcttgtgtattgtatgtaatactctatgagtaacttcccttttttatcattgtatttgtttgttcagtattctgggtcttttaaagcagtggttcccaaaggttagtcacaaagtaatcttttagggtgctttataaaaatactgattcctgggccctacccctagagattctgatcactggtggaagaggcaggtctaggaagtggggactccaagatctgtattttgtaaagttttctaggtgcttctgatgtgcagcttggtttgtgaaagtatgtgatgttgcatagtgtggctgaaactggtttcatttaagggtcccatcattgccaactcctgaatatgtccactatttctctgagaattccaactgctcagaactttgcttaaggaggggaggggacagcctccatctttccattacatgcatgactggaccaagaatggagtcctgaaccagtctaggccagtacaattttctctcccaggaacttggaatttagaccaagacttgaaatgagtcatgagtgggcactaactggaaagattttttagagctagggaagccattttccaccaaatgttcactaatggagactctatcttaaaggaaaagtggagagaaggaaacagatgggcaaagaaaagtgtcagcaagagacttagagatggagaaccatcttgattacttactttccagttttcttgtccctgccccttgtgagacccaattttacctcctgcctttggagactataagttactgcttctagtaaattgtcttgtttgaatgagtttctgtttttacaattaaataacttgagattaaggtaatttaagcctaaaacaatttagatggcatctaaagaagcacttctaaatcctgcattcttatagaccaatactaaatgtcccacttcctatgtgactgtctggtcatgtccagccttatttctaattgctgagacagaagttaaacccctccagtcaaaaaaagaatcagtctttttatcatacacaggaaaaatatcatagctgaattacttccttgacttctatggagggaaaaactagctcatatgtctggaatttaatttttcctaatccatagttacatatcccactactttctccttattgatggaatagaatattagtaataaaatagtaataaaaatgagtgataaataaaatagaaaatgtctgtacaatgttaaaggattttcattttttatactcttcacaaccctatgggatagacaaggatggtgtcattagcccaatttcttaatttgagaaaactaaaccaaaagtagttcattttatttatcaaatatctattgaatatttcttatgttccatgaatatacttccctgttctcaggagcttatcttttagcagggaaggcagataagctattaccataaggtaatctgtgagttaagagaagaaccagaacaggccttctaaagtgaaggcccctatcccttggctctagctatacccacagtcatctaattcattctaagtacatgatgagaatcttaaaagatgaggtaccagatataacttacttgagggaaatttaatttcttttgtttttttctaccctactgcaaattcaaaatgctccacatttaacacatttcgtattctcattccccacccaaaagaactgttgttccccgttcacagttccacatggctggggaggtctcaggaaacttacaatcatggtggaaggggaagaggcatgtcttacatggtggcaggcatgagagagcaaacaagtgaagggggaagagttccttataaaaccatcagatctcatgagaactcacctcatagatttcctgattcatggtattgcagcaccatcagattcccaagcactgctcttcttctctcactctcccactttgaataagtgctgtcagctctccctcctttttgttccccattcctctgctggagccttttttgtgccaccatttcttacctgggcctttgcaataggctaaccaacattccagctctaggcgtctttactgatttctggcacaaaaatcggatcataccattccagcacttaaaaagtcatgtttctctgtttttaaggattataaaattcaaaatctttagcataccacaaaaaaccctttgtaagtttaggataccagccagacccctctcctgtcatgtcctactgcaagtagcctcttttcacggggtgtctcacacctctgcatatatcattcccttattccctcttcctcatatgatcctgtactcctctcctcttttaggtaaactccttacttctagtgcttcaaagcacaatttgaatatcaactctttttaaagccattgtattagtctgttttcacactgttacaaagacatacccaagactgggtaatttataaagaaaagagatttagatgattcacagtttcacatggctggggaggtttcaggaaacttacaatcatggtggaaggggaagaggcaagtcttacatggtggcaggcaggagaaagcaaaccagtgaagggggaagagtcccttataaaaccaccagatctcataagaactcactatcacgagaacagcatgggggaaacagtcccatgatccaatcacctcccatcaggtcccaccctccataggtggggattatgggaattacaattcaaggtgagatttgggtggggacacaaagtcaaaccatttcagccatccctgaatgtctggccatcccattctttagtattcatcacatggtattgtaattatttgctcatatatctctctcttccataaggctgtgaactcagctatgtcttcttccacacccagggaatgcttggctgtctcagtccattttgtgctgctaaaacacaataacacagactggataatttttaaataatagaaatttatttctcacagttctagaggctaggaagtccaagatcaaggtgccagcatctggtgagggctttcttgctgtatcctcacgtggtggaagggcagaagagcagaagagaacacccacctccacaaaccttttgatagcagcattaatctattcatgagggtcactctattcataaaggtggagcactcttgacccaaatgcctcccattaggccccacctcccaatattcttgcattgggaattaagtttccaacatatgaattttgggggacatattcagaccatagcagtagccagtgtttaataaacaagaaaatgaataaataggcttagtagtgttatcagggacgacagaagggcatgatgcctttctgtgcccaacctcctatcaagtgctgccctcccaccacccagcactatgtgcctatgcaggaatgtgtcctttgagcaaaatacagcaaggaaagagggagaaaaatctgtgttttcactttttttctttttctttttaagaggtggggtcttgctgtgttgtccaggctggatttgaactcctgggctcaggtggttctcctgcctccacctacgagtagctgggactacaggcacacaccacagtgccaggtttttgtggtctctctttaaaggtgagtctgcattcacctttggaatagttctagttgtcatagattgaatatcctattttaaaatgcaatattcttacaactgcctttgatgaaagggagttgagatgggaccattggggaaacctccagatgactagggggcaagtaatttgattgcagtgccaaaatgcttccatttaaggagccaaagtttgcaaatgtgtgtaaactgatccaatctattcccaggatgtgcctgaagtaacaaacatatgtaagttgatccaacctatttccgaggtgtgcccgggatataaatggttaacattgacaaacacaccttatgaaatctaccagcagctgagggtgccaggcacctcttctacctccctggaaggcccagtggggcggcgtttcgaaggtgtcttcgcccctgtctccggcccctgtcccctcccgggacgtgggcgttccccctgaactcgagtcccgcctcttccaggctgccggggcctggtgggctggcccgccacgtggagcgctggcttgattctcgaaaggggcctacgccattgccgcgccgcagctccaggacaggccctcgccccacgtcaacagcgtagggccggctgcccaggtttactcttacgccactgacgtaacgtcatcgtgcgggacgtggacggaagaaaaaagagagtgagcgagcgccggaatcagcccggcgtggagtgcggacccgcggtagtgccagggggcgaaggcggcggtggtgaggaaggtacgcggcgagcggcggggatggctaggcgcccgcgtctctgcggaagctgttgcgcgcccaggctcaagcgcgaggggcgtgagcgccgggccgctggagcggggacgctgccggagcaggtgccggggcccggggatctggcccatgggtaggtgtgggcctcggccgagggatggcggctgcatcgggccgccagggcgcgctgcaagaccgtggcgcgctcccatatgccggtgcgcggcsgccccgggatctacggatggctacgggccctgacctccccggcctcccctgggtacaccatgtaaggaactgggccaagtggagacttcaggcatccgcgggccccttctttccaagagtatggagcctgcactggtgggtggcgtgggtggcggtggtggcagcgccgggatgccgcgggttttagctggccgcacgcygactctcaggggcctgggtccctagttccccgcggccctccaggcgttcatcatcccctcctcaaagccagactccctttgcagtatggcattctgtgtatgctggggtcttcctgttacagcaggacgcacccacataccccacctcgtccttcccccatcattrtcccctgccctctgaggtggtgaggcccatcggatctttgtatttaagtggtgagccatataccgagcatgtgtttgtgggtgaactgtgctgggactgaggttcacttctctgttcaaatcagttagataagggcattctgtttagtctgtaaagagatattgagaaatgtcttgagtcaaaacgtgaaaactttcttcaactgatgatatggagtctaaacacacacacagagtcgagacacagtcacacaaatctagacacgagtctagatacacacacacacacacacacacactctctttgctccttgggatcaactgtgtgcttctcgagggcgtaatacactctgctggtcagtcagagatggtggtacaggggagaggtcaggaggcttggtttctacgtcagtcttcaatctctatttcagtgaccgtaggtgttcagagctttcaatgactcttggttaatagagaggtaaacagtcagtcaatatatgtgtgtgattgtatctaatagtgaatattcgttgaattctttgttcccgtgatgggtcttgaaggaaattaaggaaaaaataattgtaaggcatcattagtgcctaaaagacaaaaggaggaaaactgacatttactgaccatttgttgtacccaagcactttccacgcattctctcttttaattctcactataatttcatgaggtccatagtgttagtatccctgatttataagtgaggaaacagaggcttagaaaaattgggtaactcttacatatgtaactaacctgcacattgtgcacatgtaccctaaaacttaaagtataataataataataataataataaagaaaaattgggtaactctccacaagacacacagcaagtgcagagctcgaacccaaatctgaccaacttcaaaggccttgttcctcatcgtttttgccatattgtcaatggaaagtttgtaatccagatgggaaaagcagtagtcatgagctatttaaaagctaacctatagaattatatccagctgtgaagactagccttgctggggaaggtttcttagggaggtggaactggaatttgattgttttaccctttggctcttctgtagttattttggagaattcacatgtaaataattgtttagcagccattattgaaggaatttatataagcagcaaacttagatcacgtgctaaaatcatacttcagtgttatgaaaaaattgaaataacaaagatcaattaatactttctgttgcctactagatgccatatgttttagaacagctgcatcctgccagtctcttctctgtcccatttcagtgcctttgtgcagtataaattgtaaagcaatgacaccattcctaatttttcttcactatggggctaaatgctagtcttctgaggcacatttaagagggctgggatatatccaccaatccatggaacaaaagttaaaaggaggcccacaaacaaagaaagtgaagtatttttcttaccttgtgaaaatagcagtgtctctgtagcataaaaagagctacaatattgggaggccgaggtgggtggatcacaaggtcaggagatcgagaccatcctggccaacatggtgaaaccccgtctctgctaaaatacaaaatattagccaggcatggtagcgcgtgcctgtagtcccagctactcgggaggctgaggcaggggaatcacttgaacccgggagacagaggttgcagtgagccgagatcgctccattgtactccagcctggcaacagaacaagactccatcttaaaaaaaaaaaaaaaaagctacaataatgaatggcttgttctccctgtacatataggaaggagttccctacttttttgtgaaataaactattctttgtctaaagtctcaaatttgacccagggtgaggaaatgcccataactgccttatgttctcaaccgagatttgtagccatattctcttcctccacaggattaagatgttagccagttgtaggcattgccactgccttccaggggtacaagagttattttgtmatcctgtgggcatcaggaagaaagacatggcagcagcctctggcctttcctcttgcttttcatggctggctggcaaggatcaagctgacatttcaaataggtgcatttcctggttctgttgggagatgttagcagaaaggtggacatgattgctttaggatgttggatctgttacaggaattatatgaagatttagtattaacacataagcattgcacctgaaagattttttttaaatttggaagataccaaaaagagcaggtgttttttgtgtctcaaaatattcctaactctgcattattatttgctwacataaaaactaagatggttgaggcctagaaaggagccacttactttttctctcttttctataatatagaggaggtgggagtttccctaatacagaggagtttggagcaggagagtcagatttttactccragggtaaggggaagtagagggaaataaaatgaattgtccagtatttttcattactcactttttaaaaaatgtattctgcagatactttggttagtgaccacatcgcagcatgttgagtcaagtttaccgctgtgggttccagcccttcaaccaacatcttctgccctgggtcaagtgtacaaccgtcttcagatctcgtatgtaccatagaaaacttatgagtatgtgggacgtttgatagtcaaagtatgtttcaacaaggttttcaaagagaaaaaagatgtttgtttgtttgtttggagacagggtctcattttgtcacccaggctggagtgcagtggcacaaacatagctccatgcagtccagacctcttggactcaagcaatcctcctgcctcagcccaccaagtacttgggactacaggcacacaccaccgcgctgactctaacttttttattttttgtcgagatgcgattttgccatgttgcccaggctggtcttgaactcttgagatcaagcaatctgcctgccttggcctcccaaagtgctgggattacaggcgtgagccatcgtgcccagccaagaaaaaaggtttaaaagagagagagagaaaaaaaagatgtaatttggcagaattggacaaaattctgccaaatagcaaggaggcaaagaggtagtctcctggtgaaatgttctcagtgtttgtgtcaataaagttgacccccaaataaatttttacatgctttttttttttcttgagtctcactctgtctcccaggttggagtgcagtggtgtaatctcagctcactgcaacctctgcttcccaggttcaagcgattctcctgcctcagcctcccagttagctgggattacaggtgtgcatcaccatacccagctaattttgtatttttagtagaaatagggtttcgccatgttggccaggctggtctcgaactcctgacctcaggtgatctgcccgcctcggcctccctcccaaagtgttgggattacaggcgttagccactgtgcccggccccatgctatttttgttcattactctttttttgtaattaagttttagattttgagctaattataaattcacttgcaattttaagaaatagtacaaaaaggtcccttataccctttacccaatttcacccagtatctgaaccaaggtattgacgttgatacgatcaagatacagaacatttcaatcaccacaggattttttatttctctttaacagccactgtcctcttccctattactaacccctggccaacattaatctggtctacatttttataattttgtccttataaaaatgttatataaatggaattatccagtatgtaaccttttggaattctgttttcttcagcataattctctggagattcattcaagttgctgtgtgtatcagttagttcctttttattactgagaagtatgtaatgctatgagtgtatcacagttagtgtaaccattcacccattaaaggacatctgggttgytctcattttttggctgttatgaataaggctggtatgaacattgatgtacaggattttgtgtgaacatagttttcatttctgtgggataaatgcctaagagtgtagttgctgggtcagattgtagctacatgtttagttttttacatagtttgaatgtatgtccctaccaaatctcatattgaattgtaatccccagtgttggaggtggggcctgtgggaggtgtttgagtcatgggggtgaatccctcatgccttggtgctgtccttgagatagtgagtgacttctcacaagatctggttaagtgtgtggcaccaccccctcactctctcttcttgttccctctctcgccattggagatgcctgcttcccctttgccttctgccatgattataagcttcctgaggcctcaccagaagctgagcagatgccagcaccatgcttcctgtacagcccacagaactatgagccagttaaacctcttttctttataaattacctagcctcaggtatttctttayagcaatgcaagaatggcctaacacagttttataagaaactgtcaaactgtctttgcagagtgacagtaccattttacattcctactagcactgtatgagtgatgcactttctctgcatctttaccgtcatttgatgtggtcactcttttttattttagccattttgataggtatgtagtgataatcacattgtggctttaatgtgcctttccctaatagctaatgatattgaacatcttttcatgtgtttatatcctcttcagtgaaatgttagttcatgtctttagctcattctttttgtttttttttgttttttgagatggagtcttgccytgtcacccaggctggagtgtagtggcgcaatctcagctcactgcaacctctgcctcccgggttcaagcgattctcctgcctcagttcctgagtagctgggattacaggtgcccaccaccatgcccagccagtttttgtatttttagtagaaacagggttttaccatgttggccaggctggtgtcaaactcctgacctcaagtgatccccccacctcagcctcccaaagtcctgggattataggcatgagcctccacacctggccttcagctcagtttgaattggaaagttgttttttttttaaactattgaattttgagaattctctatatcttcctgtcttagtccatttttattgctataaaggaatatctgaggctgggtaatgtataaagaaaagaggtttatttgtcatggttctgcaggctgcacaaaaagcatggcaccaaaaactgcattgggtgaatgcctcaggctgcttctgctcttggaagaggatgaaggggagctgttgtgtgcaaaatcagatggccagagaggaagcaagagagagaaaagaaagggccaggctctttttaacaaccatgtctcatgggaactaagagtgaggactcatgcattccctctgagactggcaccaggctgttcatcagggatctgcccccgtaattcaaacacttcctaccaggccccacctccaacactggggatcagatttcaacctgagacttggaagggccaaaccatatccaaaccatagcacttccaggtattagtcctttgttggataggtggtttgcaaatgttttctcccagtctcatagcttgtcattttattctcttaagagggtctttcatataggaaaagtttttcttttgatgacgtcaaatttatcagcttttgtttttatggattgtacttttggggtcaagtctaagaactctttgtataaccccgtattctgaagattttctcgtatgtttttttcccgaaagttcgatagttttatattttatacttaaatccatgatccattttttttttgttttcttgagacaagatcttgctctgttgttacccagggctrgagcatagtggcacgatcaaggctcactgcagcctcaacctccagggctcaagtgatcctcctatgtcagcctcccaggtagctaggactatgggttgcaccaccacagctggctaatttttttctttgttttttttttttattttttgagacagggtgtcactctgtcacccaggctagagagcagtggtgcaatcattactcactgcagcctcaacgtcccaggctcaagcgattctcctgcctcagcctcccaagtagctgggactataggcgtgcaccaccatatccagctaatttttatattttttgttgagacagggttttgccatgttgcccagtcttggcacatttaattttttaaaaagttttttggttgggcctggtggctcacgcctgtaatcccagcactttgggaggccgaggtgggcagatcacgaggtcaggatatcgagaccatcctgactaacacagtgaaaccccgtctgtactaaaaaacacaaaaaattagccgggtgtggtggcrggtgcctgtagtcccagctgcttgggaggctgaggcaggagaatggcattaacccgggaggaggagcttgcagtgagccaagatagcgccactgcactctagcctgggtgacagagtgagactccgtttcaaaaaaaaaaaaaaaaaaaaatctgtaaaaatggagtctatgttgctctggctggtctcgaacttctgggctcaaaagatcctcccaccttgacctcccaacctgcaggaattacaggtgtgagccactgcacccaacttcgtgatctattttgagttaatttttgtataaggtgtgaggtttaggtcaatgttcatctttcaacttttaatactagttgttccagcatcatttgttgaaaggctgtttgtgatgttttgagttggctagctccttgatatcacctaaatcttatcagtagtccatttccaagcttcattgcaagatgacttgccaatcaactaatcaagcttgtcattagacagaaaaatctctttcctattaatgtagagtataagggctgaaagttcaggttttggaaccagttcctgggtttttaaaactagcccttctgcttatgaagtaacttcgtagcttaaaacaactgtctgtttaggtcacaattctgtgggatggtattttggackgggctcagctgcacagtggttctgtgtctgtgtcaggtctcagattgacttagggctgattgttggggatgaaggggcctctgctgggatgatacatcatgtacattccctgtggcttctcattctccagcaggctgttcattgctgctttgcatgatgcttgcagggtccccagaacaggaagcatggtagctacaagtcctcttgagatgtaaactcagaatttatgcactgttccttctgccacatttgtcaaagcaagttacggggccagctcaaatttaagaagtttggaagattgactcacctgttaatggagaagctgcaaaaggattgtggccatttttgtaatctggcaatgctggtaaattactcagttactctgagcatcagtttccttatttataaaatggggataataataataatgaactcataataatacctaacttatgaggcttaattcatgagaattcagtaagatgatgatgatgatgatgatgatgatgatgatgatgatgaaggtagaatatggaaaagctcaaactatttttcctctgctctcactccataacaacaatcaacacagaagacttctgtgaccaaatgtacggggttgcagtggacatcagttgggtatcctccaattcaattctgacactgtctccctgaggacagcccacaggttgagggctcagtccctcaagatcatccccatcttcctagtagtcctgagtccaggcttctggaacttctgactgactggcttcaagttggggttcccacagtaccctctttgggcttgattgatttgctagagtgatgcagagaactcagggaaacacttagatttaccaatttattacaaaggaaacagatgaagagatatgtagggtgaggtgtgtggtaagaggcacagatcttccatgcccttccggggcacgccaccctccaggaacctccacatgttcagccatctggaagctctccgaaccttgtccccttggacctcttatggagacttattggataggcatgattgaagcatgggcaactgtgtcgaaatgtgattgaacaaaaagaatgtgacctgatactaatagactgagtggggtaacccagcaaggcctgtctgttcagattttgtcttggtcttcctgtgcaatatttcttcctccaaggtatggggcaggaccctctctggactgagggtcttacaacccacaatcaaattagagtcctgccttgagtaggtgaaaggagttcaggagaatatcagagagattctgtttccttacaccaacattataacaaaagactgtaaaaaggattattagagttataagccagggaccatggatatatatgtcatgtcacagtaagtaacactttttttacagtaccagttaatattcattgagtattttgtgccaatctctgttcatgcatgaacttgttttatccaccctaccaaccttatgagatagttaaggagacagcaagtaagtgaaggggttgaaatttcactcaggcagtctggctccagagccaacacttgtcctttttactcctgtagaaggtgtatgaatacttagcacaactcctggtatatagtaagtgttcacttcagtatttttattgatacttatcctcattagactcattcacagaaggaggcactttctaattgtttccctaggtttttgaatttggggatttggatttttctggaacgtggagctctttcactgaccatgataagcagaatagcagagggaaaaaaaaagaaaagaaaggcaaaatgagaacgcttgtggagataaacagagaaggcaatggaaggccagagagaaaaagagtagtcatgtctgggtcccttcttgttgaggcctggaacacagcctcattggttactgggcataaggattctgatgctgaagaagtaaagggttctcctctgtcagagtggtaagagtataatccgtggcccttaagaagaacatggacaacccctcccatcccccaccatgccacatctgtacacacatacacttcagtatgccctcatacctactaagaggggacagattttctttggaacttagagcctaaaagttccttagaagatgggaaacaattatttctctagaagccttgaattttcctaactaatcaaggccttctcagttttcaatatggaccctaacaagtataatacattgtagaacattaaaaaaatacccccaagaaaggtagggtcagccttggaaggtaaaaggcgttgttcaataggaaacccaacaagccctgagtcccctgaagctctcctttgtgctagaacctactggatttgactgagtcaactgcatgaaaccttgttgttagtggtgacctcctcttgaaccctaacaggccttatctactgctgttaccctattgtctccagccagaatgacccttgactacctggcactgaaccatgcgacccaccctcttctcctgatacagactgtgggttagcctccttcatgctagcctggctgctggattctgattggcttctaccatttgatcacctggacagacatgcatgccactgcctgtgttcctaaggtaccctctcaggctgctccacccatgctcaccacccttccaggtcaggataggccctccagcagacaggagagaaagccagaaagcctagatctgacagctaccaaaaggataatacatgatacttggcatagctctaagctctgcaaacagccactgatgatccctggtccaaaccctaggggagtaagcctgtccctccaccacccttctctctggcagatcagtaagaccaaaccattaggcatacaacttttaaacttaagacttagttgtacatattgcttaggataatattcctgaaagcagagtagggtacctatattattaataattaacccaatgaaggaaagtagcactccataaaacttagcctcaacaacaaaccagtcttttagtcccagggactcccacagcaggaagagaccgtgcacctgtggatccagcaatgccatcggaatcccagttccatcccagatgatggcttaccaagcagctctgtgccaggatctagatgccaagcctgttgtgaaaaaaaatcatattatctttcttatatctccacaaacctgaaacatagtcacttgaaaaacggttatttaaggaaaggcagaaatgactattacttcattagaaatgttctttctaagatatgtgtgtgaaggaggcaggaagggaggagaacccatagtcgccttcccattcatgagaataaggtcctgcctgctttacccaccatcagtagattgtggttagggagtgagttagcggccaggagatagtcagaaggtctaaagaaattttgagaaaattgtctgtaatttatagacagacaatataaagggaagtgatagtggttcaagtgaaggtagttaactctctaataaagttatagaacagtggttcaaaaggtggcttggaatgataattttagtaattcattcaaatatttatgagttgcttgtaatgagatatagaaaagtctttccagggaattgcttaaagcttagtcctgctgagaacctatgttacccaccttgtcttgcttcttgctatcagggaggaacgtctatttgcttaagtgctcctctaccccccactgattgacagcatcttatctcccatgtaggcctcacacagtccatctgcctatgcactcattgtccttctgtgtcagttacaattatgtgcatgtagcaggaaactcagaatattcatggctcaaacaggatagaaatgtttttctctctttctcctgaaggaagcctagcagccctgcaagaaggtaggcagtccagggcttccagaatagcactgtgaaatccatcagggatccctgctcgttctttcttgttgcttcacagttccttctagtccaaaatgaatgaatgagctccagccttcatacccatgttccaagaagcagtggggatgaagggaagaaagcatgtctcttttaagttcctagaaatcccacataacattttcacatgtatcttgttagccagacttggtcacattgtcctgtctacctgagcaagaaaggctgggaaatgtagtctttcgactggtggcagtgtgcctggctaatacttggggatctggtaattgtgtgagaaaggkcgaatgggtaagtagtaagcagctaagcaggaggtgttgggcccataagaagtattgaaggggttctgtgcctgacattcagcttttactcttttacttttggctttatgcaggtatctatttggcttttaatgaagatttttttcctccttagaaatcttgtagaatttttgtttgtttgttcatctgtacaaattatctgtaatcttgtacagtgttacaagaaaaagaatcaggaaagaattggttagaggcagatgtccaaggggatagaaagtatctgactctaacattgcttttccttcagaaagctgtctggtttctttgatcattgttacaggcatctggattcatcaaagagagaaattgtaggtagaatagttgagattttgtattattcatacacttactttgttctttactgtctttgctaatcaggctcttccctctttttttgtttttttgagaaggagtcttgctctgttgcctgggctggagtgcagtggcacgatcttggctcactgcaacctctgcctcccgggttcaagcgattctcctgcctcagccacctgagtagctgggattataggtgcccaccaccatgctcggctaagttttgcattttagtagagacggggtttcaccatgttgtccaggctggtctcgaactcctgacctcaggtgatccttctgcctcggcctcccagagtgctgggattataggcatgagctgccatgcctggccggctttttcctctttttatagtaatatggtttctttagaaacacccatatttttctgattatgaaaaaaaaatgcatctttactgcataaacttggaaaatctaagaaagaacaaagaagaaaatttaaaattgcttataatcctatcaagagataaaatattaatttttcattaattttatccatctatgtgtttatacatgtatatgaaattaacatgtatttttctacattattaaaaattctaaaaatgttaatctttttccctttatccaacatttactctgcttctgatttttctgataataaataacagtgatgaatagctttctgataaatctcttttttagagaacttttttaaggctttcgataaatttgccaacctgtcttcaagagagattaatttgtttgtactcttcaccaacagcatttgagtgtgcctatgacctgcatactgggtgtaaactccatacaatactaaaataagaatacgctagatagagcttttgatacactgtgctagttttacacagttaataatgataatgctattttttggtatctaaactggttaatactgagcatgtatatttttattgaaaaactatattgagtatttctttttttcttgcatttgactttgatggctacagattgtatccagccttcagtcatcagacatgttcgttcttggagcaacatcccgtttatcactgtacccctcagtcgtacacatggcaagtccttcgcccaccgcagtgagctgaagcatgccaagagaatcgtggtgaagctcggcagtgccgtggtgacccraggggatgaatgtggcctggccctggggcgcttggcatctattgttgagcaggtgattgccaagatagaaattatgctgtactaaaattgggtttttaagtcgctagttcagattaggtttaagttgctcatcaacttaaaaaaataattgtgatttcagtgcagtagatttaacccaatgtgaaaactgtttcccactgtagacgccagtgagagacgacatcttagggcaagaaaatgggatgttaaggagtaggggtgatttcatgcagttcatgtctcagacttcttagtgataaagagctgtttctgtcagagattcttagttctgactacgcagtagaatcatcttgggcctggagatgcttgggcttcacacctagccatttaagaagtatctctgggatgaagcagctgtgtttgtttgttttgagaggatctcactctgtcacccaggctggactgttgtggcatgatcatggctcactgcagcctggacctatcgagctcaagtgatactcccacctcagcctcccgagtagctgcagctacaggcacaaaccattatgcccagcaaatttttgtatttttcgtagagacaggggtcttgctatgttgctcaggctggtttccaactgctgggctcaagtgatcctcccaccttggcctcccaaagtgctgggcctgcaaactttttctgcaagaggccagatagtaaatattttagtttcgtaggttatatggtctttgtctcaactacacagctctgcagaagcaaccatagataatatataaatgaatgagcgtggccgtgagctgataaaatttcatttacaaaaaccagcagcatgccagatttggccaaaagtaaaaatccagacatccaggcatcccacagataaagcaagagctattccatggcagctgaaatcttacactaccttgtaattaaattttcagtttttaaaaaacaakttcctgaggtgttaatattgggaaattgctaacctgaaacttgatacaatttttttcttatattttctattctaaattatcaagcctgagcaacaaagtgagaccctgtctctacaaaaataaaatcggttgggtgtggtgacttgcgcctgtaatcccagcgctttggaaggctgaggcagaaggattgcttgagcccaggagttcgagaccagcctaagccacatagtgagacccccatctctacaaaaatttttttaaaaattagccaggcatgtggcacgttcctgtggccccggctactcgggaggctgaggtaggaggattgcttgagcctgggagattgaggctgcaatgagctatgatcatgcgactgcactccagccttggtgacagagcaagaccctgtctcaaaaagttctaacttcttggtaggctgagacaaggggattgctggagcccaggagctcaaggttgcagtgaactgtgataaagtcgctgcactacaacctgggcaacagagcaaaaccctgaccacccccccacccgcccctgcagaaaaaaaaaaacaaaaaacacccagaacaacagcaatgatcaaacccacctcccagattgagtccatcagataaattttaaaaatatttatcaagagactacactgtgaggggcactagcctctctaccctctctaccttagaaacataacagtctttaccctttgcgagccagaactgggactccccacacattaaggtgactgttcagggcagtaaatatccaaataagtgggcccaaatgacagtgagcgatgggtccagaggtgggaaactcagatgagagtatggttgttcctggggcttcctaggagagctggaactcagcctgggccttgacaactgatgggatttgcacaaacagaggggaaaagttccatgctactaagtacacagtgtgactggtgcccctgcagttgtgcaatccagtggttctggggaagggacaggctctaggagtgtattccaggtagaggacaggcaggaatgagtatggcatgctgtgggccagggaggagacaagctggaaagcagaggtggtggtctcattaggaagaatgaaaaataaagtggatcattccattaggcagagctctgaagccaactaggtgagttggagttcagtctcaaaagcaggctgaagattttgaacggaggagaaacttgatgaaaacggtaggaaaaacctggtaaaggtttgcgtaggttaccagctttctttctagggctgcgtgtggacctaatggaagagctgtctccatcagggcctgactaatagacatcttatcatgtcagatggactcaggagccaacttaaactggcttccactggccataaatgggatgatgtaaacatcaagaaagggaatcacagctgggcacagtggcttacacctgtaatcccaacaccttgggaggccaaggtgggcagatcacctgaggtcaggagttcaagactagcctggccaacatggtgaaacctcatctctactaaagatacaaaaattagccaggaatggtggcacctgcctgtaatcctagctacttggtaggctgaagcagtagaattgcttgaacctgggaggtggaggttgcagtgagacaagatcgcaccactgcwcttcagcctgggcgagagtgagactcagtctcaaaaaaaaaaagaaaaaagggaatcactgcacaatacaacaaaatatgtttaaatccatgagttcataattatacttaaaaaaaaaacttcattggccatttttggaggccactagagaagctactcatattgaaaatggatgagtaaaggggaagagacacacatttgtcctgcttttcatagacaaactgtacctcagggtaaccaaatagttggtaaaggagagtttcccttttggaattattccagattataaatgacraaggaatcattgagttagagtgtcagcattttgcatctcctaatggaataatggatcttggcaatgatcatcaacagatgctaacatcacaaaaagaaagataaccaggcattatgtatccccttgatgaacatgtacaccacaacttataaagacttgttggggaaaaaaaaaaaagccttcataccaaacagcagtttatagggtatacaaagagcagtattaataccataaggacacaattgggaaaatgtaggctgggaaatcctaaagaataaacaactcagtttaacaaaaaattacaagggggaaaactgatggagaagggaacccatgaatgaaagagacttgagagacacttcaattaatttgtaatgcagggtttaatttgcatctcaatttgagcaaggtaaaaaaaaattggaaaaatatgaacactggctatttgatatgaaggaaatcattgaaatattccagataatggatttgtggagagagaaagacatataattatatattatatataatatatatgattatcttttagcagttattactgagctatttacagatgaaataacatgtctgttgcctggaatttgtattaaaacaatggtgagggtatagaggggttattggagagtgggaagttggccatgagagatagttggtgaaactgggtggtatgtacatggggatttataatactattctcagcactttggttaagtattaaattttctttttctttttctttttatttattttagagagagggtcttgctctgtcacctagactggaatgcagtggtgtaatcatagttcactgcagccctgaactccagggctcagttgggatccttcttcagcctcctgagtagctgggactacaggcacatgctacttggctattattttttttaatttttcatagatatggggtcttactattttgctcaggctggtttcgaattcctggcctcaagcagtcgtcccacctcagccagctgaaactttctgtgataaaatattattgtcggggccaggcacagtggctcacacctgtaatcccagcactttgggaagccaaggtggctactcaaggggctgaggtcagggggttgcttgagtcctggaggtcagggctacagtgagccatgattgtgccactgtcctccagcatgggtgacaaagcaagactgtgtttcaaaaaaaaaaaagttattattgttttaaatcatggtttatcatagctgtttgttaaacagctggaccagttaaaaggtttcagacatcagaaggaaaggacagtttaggaatattgactttattacatcttgagtctttaattttttcatgtaggtctgcttaaggtaggaaacaaagtgaccgcatttggtcttgggcagacagagcagaacaaggtcagcatgtgcccctggtgtaggcagaggcaacccataggattagacatgccaccagaacagcctcctttacccgggttaagccttagaacctgagaagccatctactgagtctgcgttgcatttcctacctgcrgacttttattctgggcttcatttcttggaggaactaggccttctgcattacacactccctgcaaatattaggttggcacaaaagtaattgtggtttttgccattactgtcaatggtaaaactgcaattacttttgcaccaacctaatacagtcaagtcctatagatgtcaaacttggctacacaccagaatttcctcattaaaaatgtcttacttaggccaggcatggtggctcatgtctgtaatcccaatgctttgggaggccgtggcaggaggatggattaagaccagaagtttgaggccagcctgggcaacatagtgagactctgtttctacaaaaatgtgttaaaaaagaaaaattagctgggcatggtggcatgagcctgtagttccagctacttgtgaggctgaggcaggaggatcacttgagcctaggcagccaaggctgcagtgagccacattcatgccacggcactccagcctgggcgacagagcaagactctgccttaaaaaaatttttttcttagggtgttgttgttgttgttgttgttgttgttgttgttgttgttgtttttgagacagcatctctctcattctattgcccaggttggagtgtggtggtgcgatcatgggttactgcagtcttaacctccctgagctcaggtgatcctcctacctcagcctcccaagtagctggcatgcactaccatgcctggctaaattttgtactttttgtagagattgggtcttgccatgttgcctgggtggtcttgaacctcctgggctcaggcattgtgcctgccttggcctyccaaagtgctgggattacaggcatgagccaccatgcccagccaattgttttaattaaaaaataaattaaaatgtctgatttttgtctgccacctgctaaatagaaatttgagacaggatgtaggaatctgtgtttttaccaatctggctgattcttccagagccagccacatgctggttcataaaccagcatttgggatctactcgatagcccaccctacctccatcccttgtgaagagatgaaagagacagtacggtracttacagtcccctttcctttctcaatgcccaggtatcagtgctgcagaatcagggcagagagatgatgctggtgaccagtggagccgtagcctttggcaaacaacgcttgcgccatgagatccttctgtctcagagcgtgcggcaggccctccactcggggcagaaccagctgaaagaaatggtgagtgctgcttccccacacattgaaatggatcttcaggtcttcttccctcattccctaccacaccttgtctcattggtatattacaggcaattccagtcttagaggcacgagcctgtgcagctgccggacagagtgggctgatggccttgtatgaggctatgtttacccagtacagcatctgtgctgcccaggtgagaggctgggctttgaaatgggtgtgggacctgtgagggtggttgttgtggaacaaaggggtctggagccagactattggaatatggtgtcagcttcatcacttgctacttgagatctgaagaaagtttcttttcctttttgtgcctcagtttcctcatctgaaaatggggataatatcagtgcctatttcagataatttttggaagggctcagtgagaaaatatatgaaaagcatttagtatagtgtttggtacataatacattgtcagtaaatatcagttcttgttacactaataacttaggattccaagtgctaacacttctgaagacagagaagttaaatgtctttatttcactggcttctttgatttcaggkggcttgcttctctttgcacctggttggttgccttttatagcagatatttattaagctttgaagggaaagaggaatgctggtgattggttggtttttcactcattcagcaaatatttattgagcacctatggtgtacctagcagtcttgggcattggggatactgtggtgaacaaatcagacatgattccagtcctcatgggacttacgaatttttggtggctacycctaaatgttctagaaccttctttctacattgtttcatttttacctaaatctcctgaatttttttgaattatattcttaatcaactgtacaactacacactagagacatctcaataacagtcacttcaggaaacaactgaawaaaaaatctaactcccaaattattttattttgaaattcctttacctgtaaagatgtaaaatagctgttattttatattatggatattattttacatgtacactacatgcacagatgttattttacacaggtgatattgttatatatacatatattgtttcaggttttgcttcttcatttcctgttacttttttttgtttctccatcatttgcctgtttgtacccacagtgatgttctggtattacaccagagtgtcctcaagtcagtgaggtaaaacagaaaggcacggacttgtcccattgcctatggctggggaccccactttctgtagtcttagctttttttctgttagtataaatacagtataaatctctatttatatcactcttctttattatttggtttctcttcacagtccaatgacaactttggtctttaatttttttaaagtgcctggagccaggtgaggaagctcaagtcagggagctatggttttgctttggtttggtttttcccagggatgaaaccttttgagagtttgtttttgttttattttgttttgaatgatggtagcattaagagtccatgcagcatcagccattgtttccatttacattgagtgaaagaagagccctgccccctccagttcccaacaagcttcaacccctgggctctttcctctcacacctgtgtcttcccccaaggccatcatatctacagaaaatatttgccctttgtaccttttcctgtggttccttattttcttcagtaatcctatatagaagaccattgtcagtggcttttgaaaatttccagtaggtggtttgccaggttaaagacttaaacacttaaaacagcttgttttttcttcatagaagggaaactgattttccctcaacagattgcgcttgtctaaacacgtacttttccctcttgggactctttatctcctaccttcatgctgagatccccaggccatgtttgtgaagctattttggtgacaggtatttttcctggacctttagatctcctgcttgtctctcctacacacgggtttatattaattgtttgatctttcaccatcgtgactagaatctatatgttcagtttggacctagtcctgtgtccaacagcactaagcttttctgaaaaggagttcatgatcttccctttcaaaaatatgctccattttatttttccccaagacatcaacattcttattctccattccagcagctagacyctggcatttcagaggtactcaacaaattttttatcgagtgagtgaattatttttctatatgtatgtttcctgtgttttatataccattaaggctactgttttattgctatattcttctcagttaccatagccagacccttaaccatcctcactttgactgtttcagtgcctgctttctttactatttgcttccagctttccctacctcatcctgccctacacagcaagaacrctcttccgtaaacattagagagattgcattatttattgttgagcctcaaggtttgttgccatttagtttcttgctatctccattcacccatttatctttttctcctaaacattgcataaaattctgatttaagctagaaagcagagctgtttaccagcccacacaccagctctccattctacctttgagcaccttatgctcatctcctcccttgaaccaagttgtgttctgcccccctttcagcttgtgaccaaagactaacttccataaatttctcagactaaccccacatgctcacacacaatcttagttaactccagtaatagtctgctttagagcaagagcagtgacaacacmgccctattccattttgtctaacacactttcactcactcaccaaatatttaagggcctactatggccaggccctgaatcagatcctagaatacagagatattttagaaattgctggggcacagcggtgtgcatctttagtcccagttactcaggaggctgaggtgggaggatcacttgagagtaggagttcaagtccagcgtggacaacagagtaagaccctctctataaaaaaagaaaagaaattaatggataatcactgattcccccagtatccctctaaaatagatacattaattttcttaattttgtaaatggatgagattttggaatttggtagctctttgaggattaaagtacttttgcaagaagtcttgaacattcttaaataaatctttcagattattgtaattttttttatctctacaaaaattggggccaggtgcagtggatcacacctgtaatcccatcacttgaggccaggagtttgagaccagcctggccaacatggcgaaaccctgtctctactaaaaatacaaaaattagctgcgtgtgcctgtaatcctagctacttggaaagctgaggcatgagaaytgcttgaacccaggaggtggaggttgcagtgagcagasattatgccactgcattacggcctgagcgacagaatgagaccctgtctcaaaaaaaaaaaaaaaaaaaaaagaattggatagcacccagatatgtgtatttcattctaatcttctaatctgtgtggggccccagaaacctaaagtttaactcccctgctcttagcrtcttttgtatactgggaagtttagcgtttttctccctcatgcattttccatctatttaatccttttagattttggtgaccaatttggatttccatgatgagcagaagcgccggaacctcaatggaacacttcatgaactccttagaatgaacattgtccccattgtcaacacaaatgatgctgttgtccccccagctgagcccaacagtgacctgcagggggtaaatgtgggtaaagtatttctaagggtttagcatgctggagacactaacaccatgctatgctgcatgcactaacaccagaagtttggcataaacaagatggaaaagttgtgagagaaacttgtcatggagcagtgactgcataagctcttctgaactcgtggttgcattcaacagggtgaggtgctatagtcactgaagatggtgcgatgagcatggcttgtatatttcagtggctagaagactgcatgtttggaaaarggattgccagtagacagtgtgttytgcagacagaaggggcctgcaagagccgtcatctacatatttgggttcattggttttgcctgatcctagcttggttttgcctgagcttggctgtgttcttccatgaatttctttttggactgcttagctcactcacttatgactttttaatctgcattctaggttattagtgttaaagataatgatagcctggctgcccgactggctgtggaaatgaaaactgatctcttgattgttctttcagatgtagaaggtacaaagtaatgcttttttcctttatctgccctttgttttaaatgctacatatgtgagcacatgagtttccctctttctttgagtccctctgatgtttttttgctatagatcattagccatatgttctgacaaagggcttttatgactcaaaacagggtgggtgagtctaagagatgtcatttgaatcctgaaatgttacttccaggtgctttcagttgttttccttaaataacagctttatggagatgtaattcacataccatacaattcacttatttgaagtttacaattctgtcctggcrtggtggctcacacctataatcccaacactttgggaggccaaagcgggaggatcacttgagcccaggaattcaagatcaacctgggtaatatagtgagtccctgtttctacaaaaaatagaaaagtcagctggacatggtggtatgcrcctgcggttccagctactcggggctgaagcagaaggttcacttggagctgggagttccaggctgcagtgagctgttatcgtgccactgcactccagcctgggtgacagagcgagaccctatctcaaaaataaataaataaataaaagtttacaattcagtgatttttagtatattcacataattgtgcaaccaaaaccacagtcatttgtagaacactttccctttcatcacccaaataagaaattccataaccattagcagtcactccccacttctacccmaactccccatccctaggcagtctccagtatattttctgtttctatggattaacctgttctggaaattttatttaaatggcatcatatactatggtggccctttgtgaccggcttttttcacttagcatgttttcaaggttcatccattttacagcatgtatcaatacttcatttgtttttattgctgaataatattccactctgtggatgtaccatgttttatttatcagttcatctattgatggacattagctgtgaacattcatgacacgtttttgtgtgaacatgtttttatttcatctaagagtggaattgcagggtcatatggtaactctgtttaaaagacttttgaggagctactagactgttttccaaagtaaggccccttgtaccatttcacattctcaccagcattgtatgaaggttctaatgtgtttacatcattgctgttattcagttgttttttttttttttttttttttgaggcagagtcttatcctgtcacccaggcaggagtgtagtggcacaatatcggctcaccgcaacctccacttcccaggttcaagcgattctcctgcctcagcctcccgagtaactgggattataggcacctgccaccacacctggctaatttttgtatatttagtagagatggggtttcaccatttgggccaggctggttttgaactcctgaccttgtgatccacctgcctcagcctcccaaagtgctgggattacaggtgtgagccaccgcgcccggcctattcagttgtttttatctgccttttttattatagccatcctaatgggtgtgaagtaatatcttactgtggttttgattactttcagtttttaatgtaaaccatgggacagattgtggattttttttgtttttgtttttcctttgttgggacagattgttttaagttggagccaytgtagaagtctaggctatctgggtaccatattcttatatgttactctgttcttctctgctgttcccttcttcctggaggggccactcttggctctaatatgtctttccattcactcctctcaagctttcttaagctatttccatttcacagtctgacccataagaaatatagtagctgtgtccaaaatctaggattccaaaagtcccctgttaacactcccagaaggttagaaaacctctacttaattcccagcccacatcaaggcaggttaacatggcaggacctgttctctgttttacgctcaagcagttgtgaggtaagggcagggactacctagtggaggcaggggcagacatagatgaattgatctgtctctgcccatgtggaaagtcagagatacgacacctacatgtcaatatctttacctgtaagaagtcttagtcctgtgttatccactgtaatttgaagtcccaggatrggaacaggtaagttggggtaagtgtgagccaccctggagaaaaaaggcattttggttcatcaacaggttttctatttattcattctccccaccccccygagatggagtcttgctctgtcacccaggctggagtgcagtggcatgatctcagctcactgcaacctccgcctcctgggttcaagcgattctcctgtctcaccctccctagtagctgggattacaggtgtgcgctatcacgcctggctaatttttgtatttttagtagagaaggggtttcaccatgttggccaggctggtcttgaactcctcacctcgtgatcctcctgccttggcctcccaaagcactgggattacaggcatgagccacggcgcctggccaatcagcaggtttttattgaatttctagcatgagcacatagtgtgctaggtgcttgataaatgtaatttattcaatctttatagcaaccctacaaagtaggtagtgggtaggctaacccagttttacagatgaagaaattaaaaattaggttcaagctgggcacggtggcacatgcctgtaatcccagctacttgggagggctgaggcagtaagatcacttgagcccaggaagttgacgctgcagtcaactgtgatcatgccaccgcactgcagcctgagtgacagaaacagagaccctgtygggagaggggggggaaagaagaagaaatattttttttagtttaatttaaaattaaattcagatctattaaatggtgtatctgaagtcacatagcaagtgcttgacagaggccagtttcaaatctgagtctgttcaattaaaaaagctacactcttccttctctcttatactgcttgacaaggtaaaaaaaaaaatgtaaggttttgagattaatttataaaacccagtttgaacaagactctagcaaatcgttttgatgcagcttcaagcaccaaaatcgggtcattggtagactggcattcttattgtgattatcctaattcattttctactgagtgttgattttttagaacagtatctgaattttaactatgctcttggtggggtaaggggaaaagaggagtaggcacattatcagaatgctaggaacccctcactgtctttggagaaggtttggctagaattgtccaatctttcctgtactaatatatgaaactgaaacagcttccaaatctaaatctgtgatctcatagcactgtatcttctgggaagatcctaaccctaaatcctggagagttgtggagtagtaggttgagactgacagattgtgaaaggttattttttcttttcctgtaataatttgcactgcttatagttgccactgctttgctctacaatgggcattgatttcctcacttccctgattcacttactcctgcagagaggtagtatgtagcaagattgtcttaaagatttggaataatagaggggagaggtatattatagcacaggaaaagcagtaacttgagaccagaaaaatcactgcccaaaatgtccttcagccagtccccagcctccccatctgtgtccactttaggtcttgatttaactctagtttctcagccctttcttacccccactttttcttgtccaagctcctacttactctttttcaaagtgaaattgtgagggtttttcatcttggattgtatgcatgtaacatttcaggtaactattttatgtcactccacttagttataaaagggacatacactttatggtaataaatccagactgaatgccaagagtcacgcactctcctgctgactgagcctaacctctacagtgactcactcataaaactgggagtgtaaattagtgactgtttcaaagggtactgtgagagttaatgagtacctctgttgcatttcatcctgcttggaaacagtcacattaaacagtatatggctgctatgctgtttctgcaatagccacccttctttttcagttctgtccttaaagcacagcatcataagtagcaatggcagaattaaggacaccttgccaggaatatgggcagggctaataaatgttgtgctgaggatatggccatgatctgatgttgggaaacatttatttattaagccaggttatagaaataatgtaaggtgagtcttcctggagatgtttgtcagtgtcgaatcccttgttctctttttctggttaaagcaggtggtagtgcagtggaattcatttggatgagtaaagtacagagtgattggcaggtgccctggggaggcctgtcttggagacacttccatcaaagcagtattactgactcttgtctattttttaggcctttttgacagccccccaggttcagatgatgcaaagcttattgatatattttatcccggagatcagcagtctgtgacatttggamycaagtctagagtgggaatgggtggcatggaagccaaggtaagaatctggtgccttaactgcctataacaattttaaagcccaaactatattgtatcctttttacttttgtaattatttgggggttaatggttcagatagtaggcacatacacacttaaatatgtacatacctaaatacagatttaatgagtgttgcattccaacatttgsttatgtctgtgtatgtgggttttctcattaatattgtatgaacagtgtgttcatgttgtaaactctgcaagggcagggcctatatatttttcataattcataaatctctcatttatcagttcaaatatttcttgatgaaatctttcaaaaattgtgtcccattaattgttcttagaagttatacccgtaaggtacagcatcacatgtatcaacagcacagatgaggacaagacccccacttagaaaagccagaagtactcaagatcagactctggtcaaactccagcctgttggtctacttaattgtttctaagttgaggcacagtaaatcaaatgtagaagttatgagtcccatactagagagactgaagagagaacagactggaaacaaaggataggttggtttacctttaagtaacacaggccaaggttgagctggaaagtgtgtgaactgttatgtgttttcagagcttctaagcttttaaaaacattctctcatatacttaagttgttcaatatcaacttgtattttatatctttttgcaagtttaaaatgtgggtgaataggtctgaatctcatctttactggatctaacctgtctcattaggtgaaagcagccctctgggctttgcaaggtggcacttctgttgttattgccaatggaacccacccaaaggtgtctgggcacgtcatcacagacattgtggaggggaagaaagttggtaccttcttttcagaagtaaagcctgcaggtaaatagttcttcataaggtcccaaggcctgtgatgggaactagtgacacctggcttagttagagatcacaaaattgatatgctaatattatgaaatatggcattgttttgaacgctatttgcaaaatcggattttgctttgcttttgtgaaattctatctaacctgcctatctagacctattctctgcaaaatcactcggttaaaatatataagcattgattttctcaagaaacatttgctaggcctatgttagatgccaagtgctaaataagcactagagatgcaaagatgcatatgatacagtatgtgctctcgagtgttcacaaaggacagaattgcctcataatctgcattcagaagtgtaaacacattaaaaaatatcgccaaagtggaattcagaagaattctagaaaacaaagtatattgtctgccccagaaatacaggcaagttcttatgtttatacctgagtgaatctggcacattcttttgctattttattggtcatggtgatcccctgtgtgaaacaagcataccaagacatcatgtgttccttctgtgggcgtgatgagcttgtgcatgtgctggtagttctctctctagtagtagaactagagagagaactaaggtgaccatgacctgatatttgcacatattcttgcaggccctactgttgagcagcagggagaaatggcgcgatmtggaggaaggatgttggccaccttggaacctgagcaggtaataaccttaggtgataatattgttatagttttcagagtgagtcatgctgtgtagttacaggagtcaaacctgctgactccatctttattcctagtgagccacagagttatctgagttacaagtytgattcaaatttgctctgccttttttctttttcttaattttattttccgttttatcttttatagacagaggtccaagataacttttcatcactatgatgttttgatcaagagcatcataaaaatgatgagattagaaaggttacctaattctgccacatactgggcatggaaatgtgggaaaattacttatcccaccccattccaaatcccctgacttgcctagaagatgggaagctcgagagcctgctccatagttggtagccctgacctgtctggcttgaattagtctaagtagcagacatgatgaggctggaagtggtgaggaggtcaagtagaagctgggagctagtcccccaggggttatgttgtcaaggacggatttgagagtgaagatgtgtgtgggtttatactagtgaatcctttggcctgagaaaagaaaaagtaactccaatggcagagaaaggaaagcaaaggaggagcctagcttccctttcaaaccacttccctctgctcctccaataatcagcatactgatttgccacatttcctcatctagcagggtcaggtttggggtgtcttcaagtacctaggactgaattttttcactttgattaaatgcattaaataaataatttacaaggaagaaccagatgtaaaaacttacctggamataaactaactaatgatattaaatatgtaagactctatgtaacatgttaattcaaagtactggcccctgtacagttacataatctcctacagattatacagtctcctacagattgtatccatcatgccccttcccccccttttttttttcttatgactcctgattattaytattagccatggtttgctaattataataatcaggagtcataagaaaaaaaaaggaggaaaagtaagaagtgacctagaggttggcagtgagagaggaaggaagaaataaggggagcagtggtgggaataagtgatgggaagtcaggagatttcaactggtgatgaccgtggatgtgggagcaaggcctggcactctcagaagagtaggtttaaaaactgtggtgtgcattcttcttggattaacatctcygtttttttaatggtgtacctttcttctagagagcagaaattatccatcatctggctgatctgttgacggaccagcgtgatgagatcctgttagccaacaaaaaagacttggaggaggcagagggtaaagaccaggcaatttaaagtcaatgttgtggaggggtgtgcattattttggtttttagttttactaataattcttatgtctgcctaaagakaaggatttttrtaaaagaaattgtacattatgtatcatttctattgagggtaggtgggtggctggtattctccttccccaaatactttagtacaacccccagaggagcttttttcattccccacaggtcacaagctgtggctactatggcggtcaggacaaaaaagaacaagattgagaaccccactgcttaagacattcagctaatagctaacatttattgaggcctttctctattgacaggcactgtgctaatggctatgcagtcaggatgtcatttaatcttcataacatagtgcctctgagatagctactacttattatccccatttgacagagaaggaaactgaagctcagagaagttgtcacttgcccaaatccacatggtcagtgatggaccaggatttaaacacagatggactgtacatgtgaaagagttgtagaaatagtttgtgcagcctgtgaagaaagatagcttgtttcttagttaattaaccagtcttttgtcttccctgagttagcaccaggtgccatccagaaataccctagaggtgctaatggtaaagtaagatgttgaattcacattgtgaacacctagacatgtagagagtcagggccctgactctttctcctctttttcttaattctgtcttttcccccttaaaataatagggattgattttatggggttttgaatttcctttgcattatcttgaacatccatattaatggtgtttctttcaaagaaattttgcacggttcaacgttactttcattccttaaaacatttttgaaccattgttttagaacttcctctagaatttacatctcatttttatagtattacaaaacgtaaaatagattttcagaactggaagaaatctttgatactatccactcattaatttaaagtaaaagaattaagacccacagagggtaaacctgttgttgcccaaggttccacagcttgttgttggcagaagactcctgatcccagctatacctctctgaacatgcataaggacacatagtgggttaagaacaaagccgtgggtatacatgagcgtggcttagcaatcccagttcggggaatttatcckcaaaaactatttctaaagaaaataggtctttaggccaggcacagtggctcacgcccgtaatcccagcactttgagaggccaaggtgggcagatcacctgaggtctgagttcaagaccagcctgaccaacatggtgaaaccttgtctctaataaaaatacaaaaattactgctgggcgcagtggctcatgcctgtaatcccagcactttgagaggccaaggtgggcggatcagctgaggtcatgagttcgagaccagcctggccaacatggtgaaaccttgtctctataaaaatacaaaaattacagctaggcgcagtggctcacgcctgtaatcccagcactttcggaggcctaggtgggcggatcacctgaggttgggagctcaagaccagcctgaccaacatggagaaacctcatctctactaaaaatacaaaattagccgggcttggtggcgcatgcctgtaatcctagctactcaggaggctgaggcaggagaatcgcttgaactcgggaggcagaggttgccatgagccgaggtggcaccactgcactccagtctggacaacaagagcaaaactccatctcaaaaaaaaaaagccggccgtggtagctcacatttgtaatcccagttactcaggcagctgaggcaggagaatcgcttgaacctaggaggcagaggttgcagtgagccgagattgcgctactgcactccagcctgagcggcagagcaagacttcatctcaaaaaaaaaagaaagaaagaaagaaaagaaaatagctctttatctaaggattcttagagcaagatttatcacactgaaaaactggaaacaagctgagcatttaataacataggtgtggttaagtgcgttcagctgtatcaaattaatggaatatttagtagtaattaagataatttttgcaacatggaaaatatactcgcattgtgaggtgaaaagctaggatgtaacatttaacatatactataattaaaactttttttttagcatatggggaaaagtaaagaaaattaattaatttgtataattggttggtagaaagatggtttaatttttttttcttaatataaggtcagttgcttccccccaaggcagaaatctttttattattttatcttggtggctatgactgtaaaaaaaggaaagggaaaatttttgtaatctcaacattgaccacagtaatgatttgtgatatatgatttcaaatggtcttcctgagtatatacatgtatatatatgaagatgtacrtacatgtttgtgtgtggagagagggaatcacatcatgcatactactgttttttaaaaaaattctgggccgggtgcggtgtctcatgcctgtaatcccagcactttgggaggccgaggtgggcagatcacaaggtcaggagatggaraccatcctggctaacacagtgaaaccccgtctctactaaaaatacaaaaaattagccgggtgtggtggcgggcgcctgtagtcccagctactcagaaggctgaggcaggagaatggcttgaaccctggaggtggagcttgcagtgagccgagattgcgccactgcactccagcctgggcgacagagcgagactccgtctcaaaaaaatatagaaaattctgcgtatgagcttgccataatcctatttttttttcagccaagcatggtcgctcataccagtaatcccagcactttgggaagtggagacagaggaatcactttagcccaggagttcgagaccagcctgggcaacatagtgagaccccctatctctacaaaatatgttttaaaattagccagccatggtgatacgtgcctgtagtcctagctactctggagactgaagcaggaggatcacttgagccccggagttcaaggcttcagtgagctatgattgcaccactgcagtctagcctgggcggcacactgagaccctgtctctaaaagaaaaaaaggaaaaaagttttcttttttaaaattctgttctccttcccaaaatatttaacattttattttagaagaaaacatctttgttggttctgattataaaaataattcactcattataaaaaaaatagaaagatagattattactattctggatgcgttccagatttcttcccgtgcacacatatatgtgcagtgtttgataaataagatcatatcatacatgctgttttatagtttgcctttttcgtagactatatcctagacagctctccatgtcagtgaacctagatatattatttataataactgaattataaaccattgtctgaatatttaggtagaattcaatttctcagcattacaaaaatgccatgctaagtatccttattacatgcctttctgttcatacaaatgataaatttctggaactgaaattgctgggacaaagggtatcagggtacacagctttacatgatgctatgtactaccaaatggacccccaagaaagacagtttaagtggcatgtcattgtcttcccaagtctgttcctaatgcagtcccacatgttcagtaaaacatcaagacacatcagttgggccaggcacggtggctcgcacttgtaatcccagcactttgggaggtcgaggcaggtggatcacttgagttgaggagttcgagatcaacctggccaacctggtgaaacccccatctctacaaaaataagccaggcctggtggtgcatgcctgtagtcccagctactaaggaggctgaggtgggagaatcgcttgaacccaggaggcagaggttgcattgggcctagatcatgccactgcactccagcctgggcgtcagagtgagaccctgtctcaaaaaaaaaaaaaaaaagacacatcggttggtagctgtagcctgccaggtctgctactttatcatatcctcttaatggcttttcagggagacttgcagctcctctgctgaaacgtttaagcctctccacatccaaattgaacagcctggccatcggtctgcgacagatcgcagcctcctcccaggacagcgtgggacgtgttttgcgccgcacccgaatcgccaaaaacttggaactggaacaagtgactgtcccaattggagttctgctggtgatctttgaatctcgtcctgactgtctaccccaggtgtgtatataccccgggagaataaataccctgccattgggggctggtgtggatattggaggaagaatatattttcttttctttttttttttttttaatttaagttctagggtacatgtgcacaaygtgcaggtttgttacataggtatacatgtgccatattggtttgctgcacccatcaactcgtcatttacattagttatttctcctaatgctatccctcccccagtcccccaccccccgacaggccccagtgtgtgatgttccccaccctgtgtccaagtgttctcattgttcagttcccacctacgagtgagaacatgcattgtttggttttctgtgcttgtgagagtttgctgagattctctcaagagaatcatgcagcttcatccatgtccctgcaaaggacatgaacttacccttttttatggctgcatagtattccatggtgtatatgtgccacgttttcttaatccagtctatcattgatggacgtttgggttggttccaagtctttgctattgtgaatagtgccacaataaacatacgtgtgcatgtgtctttacagtagcatgatttataatcctttgggtatatacccagtaatgggatggctgggtcaaatcgtatttctagttctagatccttgaggaattgccacactgtcttccacaatggttgaactagtttacactcccaccaacagtgtaaaagtgttcctgtttctccacatcctctccagcatcttgtttcctgactttttaatgaatgccattctaacaggcatgagatggtatctcattgtggttttgatttgcatttctctgatgaccagtgacgatgaacattttttcatgtgtctgttggctgcataaatgtcttcttttgagaagtgtctgttcatatcctttgcmcactttttgatggggttgtttttttctcgtaaatttgtttgagttatttgaagattctggatattagccctttgtcaaataggtagattgcaaaaattttctccattctgtaggttgcctgttcactctcatggtagtttcttttgccatgcagaagctctttagtttaattagatcccatttgtctattttggcttttgctgtcattgcttttggtgttttagtcatgaagtccttgcccatgcctatgtcctgaatgatattgcctaggttttcttctagggtttttatggttttaggtctaacatttaagtttttaatccatcttgaattaatttttgtataaggtgtaaggaagggatccagtttcagctctctacatatggctagccagttttcccagcaccatttattaaatagggaatcctttccccatttcttgtttttgtcaggtttgtcaaaaatcagatggttgtagatgtgtggtgttatttcttaggcctctgttctgttccattggtctrtctctctgttttggtaccagtaccatgctgttttggttactgtagccttgtagtgtagtttgaagtcaggtagcatgatgcctccagctttgttctttttgcttaggattgtcttggcaatgcgggctcttttttggttctgtatgaactttaaagtagtttttccaattctgtgaagaaagtcattggtagcttgatggggatggcatcgaatctataaattaccttgggcagtatggccattttcatgatattgattcttcctatccatgagcatggaatgttcttccatttgtttgtgtcctcttttatttcgtggagcagtggtttgtagttctccttgaagaggtccttcacattccttgtaagttggattcctaggtattttattctctttgtagcaattgtgaatgggagttcactcatgatttggctgtttgtctgttactgatgtataggaatgcttgtgatttttgcacattgattttgtatcctgaagaatatattttcaatactggagataggtttcccaaagacaattgtgtgtgtgtgaaggtcttttaaycaaaaaaaagataatttttgagactttattctcaggttgttcttgaggtaatatacgttcttgattcctccagtatcctaaagtagttgttcatatgtccattttagacctggagaaactgaacctcatagaaggtaatattcctgtcacacctgtaaggtgcaactgggactggaacccaaatcaacctaccataccacagtgcaggagcaaatttccaaatatctyagcctgtggttcactttgttctctgaccacaagtctctgttagcctgctgctgtcattcatgaataactggcttggcccatgtgaaaaggacccctttattgtcagtatcactgatggcttcctataagtacatctgttaggaaaaagaactttcagtagttaatggaaattagaatgcaactgtcggycaggcacagtggctgacacctgtaatcccagcactttgggaggcccaggcaggtgaatcacgaggtcaagagattgagaccatcctggccaacatggtgaaaccttgtctctactaaaaaatacaaaattagttggcatggtgggacctgtagtcccagctactcaggaggctgagacaggggaatcacttgaacccaggaggcagaggttgcagtgagtcgagatcgtgccactgcattccagccttgcaacagggcgagataccatctcaaaaaagagaaaagaatgcaaccctctttaagcaagttgacatatcacagcctctggttgagaaagcatgcgttaaagttcttgccaagcagccatgctgggaaatacaaggtgtcattagagagtggccccactttattaccctaaactgcctcccagaattctgggagcatttcccccactggactgtcctatrggataccagctcttcctttgcactagccccaaagtctcaaagggaaattctactgtaaaaacaaaaaactagcacctctttactataagacatagttgactgtggaatctggaatgctctgtgaagggtactctctgacatcccctaaaaccagtgtgttcaccaagggactcccataccactgaggcctatcctcagtccctggctgatgctggcacactacctctctggccacatacctgtcttgcagaaatgccccagtgatgactgccagactcacctctgctagtagaaatgggcctaagtctctctgtggactgtatccgtgaaatttctttgctaccactcatccataccagctgatacctcacaaggagctgatacctcattagctaactacagctaaggctcctcatctggactcagccctggatggtttcacagaatccatgaatcctaaaaattgtgtgcaatattctgtgtgtttatgtctggagaaagtttacttaacttttgtaagaggtaggatgatcaggtcagtgtcactcactctttgctctaacaaggcaactagccctcctcctggatggtttacgttttcctccccagacaggcatgtgggaaaaagactctgttctcagcagtctctaccacagctgcccaggggctggcaggagctctggtcttctccaggttcttagcaccaagcacttagagctctcagaacaattccaaggccagagtaggatgtggccagaggagctgcccagcctcagcctgatcagatgaagcaagtgcttccttacagaggtggctgaagaccctgttctccacggtggggggtgccatgtggccctggccacttaactcagttctctttgctttatttgtttgtttgcgacggagtctcactctgttgcycaggctggagtgaagtggtgcaatctcggctgactgcagcctccgcctcccaggctcaagaaagtctcttgcctcagcctcctgggtagctgggactacaggcacctgccaccatgcccggctaatttttgtatttatagtagagatggggtttcaccatgttggtcaggctggtatcgaactcctgacctcaggtgatccacccacctcagcctcccaaattgctgagattacaggcrtgagccaccrtacctggccaactcagttctctttgctaatggtgctaaggaagccatatagtttagttgctaaaatccagtggtttgttctggagtcaaaccacctcagtctggctcccatccctgttatttataagctgtgtgacttcggggagtcatcagcctctctgggcttcagtgcccttatctgtaaagtaggggataaaacaggcacttaattcactgcagtgttgtgaagatgaaacagcataggccttctaaaatgatgaacacagtgcttagcacagaaggagtgcttgtgaatgctaacatcactgttgctattactgtttgtctcctttgatccactgctctccctttgatctgcaggtggcagctttggctatcgcaagtggcaatggcttgttactcaaaggagggaaggaggctgcacacagcaaccggattctccacctcctgacccaggaggctctctcaatccatggagtcaaggaggccgtgcaactggtaggtccctgggaatgcaccaagtcaggcccagaggggccagatcaggtgtttgggaatttaaagcaaaacttaggccacacagagccaagacactactacaagcagacytgacactycagcaggcctgtgagcctwcagactttaggccattctgcagagccagatgggtcctcagtggcttaggaaggcccctcccttacagctgcgtcttggcactatttatttacaagaatgtcaattagaccttcattctttgggtcacaaggcagcaggagtaccagaactagagtgtgaggcctaggttcctgtcattggcagagtgatctagggtaagtcagatgagaaactttacaaaagtttgtcataaactgtcatgcggtgtgttgagtatgagatcatgctgttatcactattattattaaggtcatcactttaactgaccatttctcattctcctcaactgtcaaatgaagtttgataataatagctactacttgttgagtacctactatgtgcaaggctcattttatccgttaactcatttgatcgtcacagcagtcccataaggaaaatatcattaattattagactcattttctacattgggaaaaaacagattcagaggtaaagtaattccccaagagtcacatggtgtgtgatagagtttagatttggacctaggctgactccagatccttttttttctttggctcatttgctccaacattccaggattctgttggctactgggaggatgtctacaaacctgctcattacacactcagtgaccagaatctggtttttttcttatgcccacatagtggttggaaagagcgcagattttagggattcaaatcccagccccaccacttcctagcttacacaggtgccctccctccttttcttcctattgatgtgtaacatacgtacagtaaagtatacagatcctgtgaaccactctgygactgttcacacacacacatgtataaccaccagccgtatcaagatacagaacagtccaacatcctggagggcccccttgtgcccttcccagtcaatrtgtagcccccttccccacaaactacttttttgacttctgtcacattaaattacttttgcctttttttttttttttgagacatggtcttgctctgttgcccagactggaattcagtggcacaatcttggctctcggctcactgcagcctcagcctcctaggctcaagcagtccacccacctcagctttcctagtagttgggactacaggtgtgtgcctccagacctgactaacttttgtggattttttgttttttgtagagacagggtttcaccatgttgcccaggctgctctcaaactcctgagctcaggcaatctgcctgcctcagcctcccaaagtgctgggaatgtgccaccacgccctgccttttgcctattcttgaaatttatataaatgagatcaaacaaaacacacgtttatgttgcctgtcatttgttcgttatgtctgtggcattcattcccattgttgcatctagcagtagttttctcatttaattgctgggtagtgttccatttacctgcatatactacagttcatcttttcttctcttgatgaatatttagattgtttccagttttgggctatgtggaataaagttgctgtgaacattctggcacacatatatatttgttataaaagtaatatgaccatgtggagaaaaattaaaaatcaagagaaaacaaaatgcccataatctcagtatcctctcacaggctctttaagtcattctaatccacatcccagggtagaagttgccatcagaagtcatgagaaccatgactccctagcaagaccaacccaacatttcctcaatgctgtgaatagaaaaccaacagagaagccactcccttttgtgatcttcatggcctggagtagtgtactgcatttaacctccatagatacccctttgtgctgcttctggcattttaaaaattgtctgccctgtattatggctagcagtaccctagtgctgccttccctacttgatgctgagctctttgacggcatgcagtgtcctgcgtgatatgtgatgtggagcacagcaccgagtatatagtgtttgataagcatttgctggacaactttttgattcccatgatcgggaacttaattttgtttttagaataagttttcacagtgtctcacttagttctcagagtgtacagatgtttatctgtaaaagggaagctrctgtttttatattktgtgtggtcagatgtcatctttatctttttcttctttccttctaaaggtgaataccagagaagaagttgaagatctttgccgcctagacaaaatgatagatctgatcattccacgtggctcttcccagctggtcagagacatccagaaagctgctaaggggattccagtgatggggcacagcgaagggatctgtcacatgtatgtggattccgaggccagtgttgataaggtcaccaggctaggtgagctggatggggtcttctctttcacaacggagaaatattacatcctctgcagctctggatcatgtcaatggaaacaattctttgctcatcttctttcagtcagagactctaaatgtgaatatccagctgcctgtaatgctttggagactttgttaatccaccgggatctgctcaggacaccattatttgaccagatcattgatatgctgagagtggaacaggtaagagttccataggactagtacattacttcctgtcttagaagcctgtggaattagaccaggcacagccataccatataaggcagtttaagaaacaatattttttaatatcttctgtgtacaaagttccatgctaagtaaagtgtgagtaaaacacaacccctgccctctagtagtcgaaccaaaccaatacacaaatagctttattacaaagtggaatgtgttgtgtgctaaagagggttcaaaggtaagacagaccacatggcactatgctgactgaactgtttctggcaaccttwtattcacgtgtcaaggtgttcccaagcatatattattttttggatttgatttgaaaagatggtgcagaaacgtttcaaaccaaaaacttatgtacattcactgcctccccccagtgtctttggttaccaatattagtgtacttaatgcagtgatatttgggattcagtaatttgtagaatgtctccctggattatgtttttactatattgttaaggttgtaaacaaaycaaaagccagtaagtttcaaatataaagttgtgctgtgtcctaaattcatgcctgcaagaaaatataatagatgccctcaaggcaaaaatggacaatctgttaaactctctgcatggatgcattttaagctttaatttctgatgtcatagtacactttcagagttatataaaccagcatggcagtagagaaggtgcttgttggccttggttgctttgactctgaacatatgtctcttcccttccatcctttgactggaaaggaaggctccagttagcttataaatgtggcatggtcccagtgagaackggaaagaattgttttaaaaatgaaactgtactccatggattacaaggaagttagatcacatggtcattcatgttcggggaccttactttactttggtaaggaagcctgtygattgggcacctgtgtttgccaagcaccacagtgaactggattagacaggaggaaagctctcctttagccaggactaaatccctccccagacctaatttgaacacacaagtggtatcctcagtcattaaaatgaggatggccttgaaattccaaatcaaaatgagtcactgtgtgtacttcatacagcacttttggatggcagaaagtaaagctagaaggatgacttgcacagggatggggttccagtccccaaggaacacagaagaagtgagatcccagataagaaacaatggcagggcctcgggaatcatgaggataaggcagacaccacttataacttgagccaaggcaaaagcttgatcccaaagaatcaaggcatgaaccctgtcctggggatgtctcagaaaacaaggtttaagtgggatccagcttgtgattgggatcctcggtgaccagcctcagaatccttaaattcctctaaccagcagcaggattagagccagagcctggggctgagctgaacctagaggtggggccagactgacgcagttggaaatcaaatgagtagccacagtttcaggtgctgaaagcacctgaccaagtactgcttacctctaaagcaaacctgggacttcgctagggtacagggagtagsaatgtatatgtggcacctccctttttccacacgagtctagtgcctaggtaccatatgcaggaactgggatctttattgtcaagtattcattttaggaaaatgccagaagtcaagcccttgtgttgataacccactaaacgccttgcacattcttttttattcttttttttttctttgagacggagtcttgctctgtgccccaggctggagtgcagtggcacaatcttggctcactgcaacctctgccttccaggttcaagcagttctcctcctgcttgaacctcccaagtagctgagattacaggcacctgccaccatgccctgctaatttttttagtaaagacggggtttcaccatgttggccaggttggtttttgaactcctgacctcaagttatccacccgtctcagcctcccaaagtactgggattacaggcgtgagccaccatgcccggcccaccttgcacatcsttaacgttcaaggcttcctgcttcaatccctgttccaactgtcttgagggcccattgctggcaagtggccagtcagatcatgctggagggaggaaagtaggactasttcagttgtygaggctacaggagccactttgggctgtggttttacaggctcacctttctgttctatcctagaacttgcttatttcagttgtttttatgttgttgcccctggacttcctctgttccaggtaaaaattcatgcaggccccaaatttgcctcctatctgaccttcagcccctcygaagtgaagtcactccgaactgagtatggggacctggaattatgcattgaagtagtggacaacgttcaggatgccattgaccacatccacaagtatggcagctcccacacggatgtcatcgtcacagaggacggtcagtgtccagatgcttcccgcwtacagtgtctgcctttgctgctttctgatcctgctcctcttagcccsccttgggctgcagaaaaacatcatttgagtaggcttatggtaatgtttagtagtggttgcatttggtactttgatgagtgctttcacatcactttattrtattgtcacagctggaggaggaggggcagggatgattagctctgcttcgaagatgactaaccctgtcagaggcactatcatttaatgcgtgcagcaaatcttacaaggtagttaaaataaacccattttacagctgaggaaaccaaggcagaaccaactctgcacattcattcattcattcatttattccacaaatatgtatgcagggacactcctgggtgtcagatactggagcctcaatgrtggaggatgccagtagggccccaatgaggaatttacagtcagctaattagggcaccagagcagtaccacccgtattaacagccaacatttaccaagcactcactgtgtgctaggcactagcatgagtactccccaggtgtttcatcctctctacaaccctatcagctaggtcatgttgtaagtcccttttgacccagacacagagagttttgtacacctgcagaaggtcacaaagctagcaggtgtacagctggagttcaggcctaggmagtctggctctggagcccataagtaggaagtttaggcaggtcacctgcatgggagatctggattccaactcagtctttccacaacacygtgattgatgaagctaacttgtcttcttcctgttgagatttttcayaagcctgagtatttaatacgtgagaacacatggagaggccccagtggggacccagaccctgccctgatctgtcaccagtcaatggctggaaacagggatgttctctgggtatcatcctaacttggtttctccttcttcaccctgcagaaaacacagcggagttcttcctgcagcacgtagacagtgcctgtgtgttctggaatgccagcactcgcttttctgatggttaccgctttggactgggtaagaaagactctrgttgggaagaaagaagttccttgtgaagcactgtgtggtctaggggtatgttgaggtgggaaagacacctccccttgactgtcacatgcttggtcaagataagagagaaacaggctgggtgccgtggctcacgcctgtaatcccagcactttgggaggccgaggtgggtggatcacctgaggtcaggagttcgagaccagcgtggccaacatggtgaaaccctgtctctactaaaaatgcaaaaaattagccaggtgtggtggtgcatgcctgtaatcccagctactcaggaggctgaggcaggagaattgcttgaacccgggaggcagaggttgyggtgagcccgagattacgctacagcactccagcctggaggacagagtgagacaccatctcaaaaaaaaaaaaaaaaaaaaatagagacagacttctggcaaggtaggattatcagggagaataattaatgaaacctcccatgagttggtggaaggcctatcttctaagcatttcacatgctaagaaggcaggtacttgtattcatttttcaaagagggagaatgagattcagagaagtatagtaacttgcccaaagtcccacagctggcattcagacccaaacttgagcaagtccaaagcctgggttctcccgctacagcgtgggcaaccacagcctgcctttttacacaggctgcgccagaggtacatgctgtgtcccttgagagcactccttttacagacttatttcgtcaaaatggcacagccaggttgcctcggagataggaaaccccacaatggtaggacaaaagaaggtgccgtgggcctaagtaccagcatcaaaacaaacaggccarccagaagtacaaggttaccttctacagcagaccttgaaataaaaagcttcagaagggcacttctgtccctttccattaggtataaaatttccagccctctgtcgtgttggggttatttggacagtctctcgttttcaggggtaccagtatataaaactccagaacgggcgcagtggctcacgcctataattccagcactttgggaggccaaggcgggcagatcacctgaggccgggagttsgagatcagcgtgaccaacatagagaaaccccatctctactaaaaatacaaaattagctgagcatggtggcacttgcctgtaatcccagctactcgggaggctgaggcaggagaatcgcttgaacctgggaggcagaggttgcagtgagccgagaccgcaccattgcgctctagcctgggcaacaagagctaaactccatctcaaaaaacaaaacagacaaaaaacctccaataatacatttatgacacgttttctgaatatttgagaattatttcaaccactcaaaacattttaggccacgggcagtggctcacacctgtaatcccggcactttgagaggctgaagcaggaggatctcatgagtcggggagttcgagaccagcctgggcaacgcagcgagacctcctctctacagagatgaaaaaattatccaggtgtggtggcgtgagcctgtagtcccagttactcaggaggctgaggcaagaggatcccttgagcccaggagttcgaggctgcagtgagctaagatgatgccattgtactccagcctgggagagagtgaggccctatctgtataacaaaacaaaacagaaagacacacattttaatccttctgaactttttgagtagatgatctgcctggagaaataattctcaccaaattgttaaaaggttatgaaagggaatttaactcagttattcttaatcatgatactctttatttttagttccccatttgtattatgttgggattttgatgtaattatcacatcacttgcattgatctttatactctccatgtacttgaaaaagaaatagcaacatatttttaagggctggggcacccagcattcaaatgaaaatccaggatgaaggaagaacaaaagatcatttcattgtccttccaacaccagctcagagtgaaagctggttgagttaaattccttgtgaaatgcattaatgacagtaacagattttactgagcatttactacattcccagcactgtgctaaatgtgtcgcaagcatgctctcacttcattctacaagatgaattctcattttccagatgaagaaactgaggcatgagacataaagttaggtagtatgtccaaagtcatgtggtctgtatgctattgaaccagaatttgaatcctgctggtttcactctccttgccaaccactaccccaagcacatcccgcccctactgtgtctcgtacttgctcttctctctgcctgcagcacctctgtctggttttctccagccagctccttctcactgttcaggtcccaaccaaaaggcacttccttagggaggctttccctgaccatcctacccagcgtgtccccagctccaccacacagcctctgtcatagcacccatcactgcacttgagcaccacaggagactatttactcacctgtcctttggctgcctcgcctgctataatatcagcgccacaaaaacagggccttgtatctattattcaccactttatccccagggctcaacacagtgcctagtacatagtacatgctcagtaaagttgtgatgattgagggaaccctgcctccactgtatacagtgcagaacaccaagccagggccaggaaaacccctgacgttccctaggtctgagctgggagcaagaggaaagggaatgaacagtaaccctttgatgtattcagtaactgtctaatgagtcccttgtgctaagacttctaggggataccacaaacatgtccctttctttctaagatttaaagagtatttgaggaggtgaaaccatcatggtaaacattgtcgtacccctcaaaacatgcccaaatgtcaaaatatggtatgcaattcagatgctaaactgataaaagagacagcacttgtattaatagcattgtcaaaatgcactggggataaaatacagaagaagagtccacacactgtttcacgagaaggagtgtatcatgatttgtagtaatcgaagaacatgtttatgggaacagggtgactcagctctyctggggaggatggatgaggagttagcaggaagagagggtaccaagtgaggggaaagcagcagggtgggtctggggcatggacaggaagcagaggctgggaaaagctacatcttttattcatgctttttcacaggagctgaagtgggaatcagtacatcgagaatccacgcccggggaccagtaggacttgagggactgcttactactaagtggctgctgcgagggaaggaccacgtggtctcagatttctcagagcatggaagtttaaaatatcttcatgagaacctccctattcctcagagaaacaccaactgaaaagagccaggaaaacccgggaattttccaaaaggtcttcacgttaaacttgtcttatctcaggagagagcccgctcttgtctcccagttcctggtagggtctgcctgttggaaagtgtacctggatgcttctgggctccgtttggcaatagcartcttggctgatgtgcacagtctggctcccagctcaccctttttttttaaagtaagaaaatagttgctaccgrtagggactttgccaagtccaattatcttctaggattgaaaggtgcattttccccataaaaaaggcgaggaaaacccatggctgctttgtgtcacctcagtgacttacagtcccccttggcatttagttggtactagagccagtcatccttaacaaatcttttcacattttatttctttcacatgyagtcatcttcaaaaaggaaagatttggaattttagaaaaggggcaactcttctttttagcattctcatcagaaagtcacaaaaatcgatggaatcatttccactgggaagattgaccttttgtatttatttgtggggtaaattaataagcattccagatgcttgcagcttcctgcatccaggagatgctgtgttccccgtgatgcagctggaacccaagctgcagcaggagatgcaagtttcaggatgttccccactgagctggaggaatatctacagcagtgatgyttgaaatttttgtatgaattattttgtcgtcctacccttttcctccaaaacaaaaattagaggattattttaatactttggattcttcccccttttttgagaaataaagttttttatgaaaagcctgtgcgtgattgaagttttctcccttaattgttgttacccccttccttttcctctcttgtgaccctcgtgccctgcttgtgggcatggtctcttctctggaagctgtctggggagacaagacatctgcctcaacagtgtttgttggtggaagcaacataggcagtccccacagagggactcagacggagagacaggaaaggaaaacaggagattaagccccaagagcttgaagactaaaagtgcagtgaaggtctgaagttggtggggtccaacctgagcgagctcccgcggtggcacatagccccagctgacatccttagttcactgcatccccccagctcctctctgccagtcctgttgcctcaggatcacttgacagctcggaccctccccactctccctccatctctagctcctgtccttagggcccctggtgcctgacagtctgcagttgaaagatttcatgggggcctcctaaagaaataagcactcgcttacgatgctgctgcttttcctctgaggatgttttaccagcacaagaatgatggtgtcatgtggaacatgttcccaggctggctgcacagcctgcctctcctccagacccttacatggtctggcaagtcaccctgactgccctgccctctggatgaggagttctggcatagcttgcctgaaaaggctataaacagtcctgcctgaaactgtcacaaataccacaatgagctcccaaccagacaacaaatgcccaggaatcttaaatagaaggcagcccaagagagctggggcccttggggaagaccactgagaaggcaggcctgcatctgggccctgagaaagaccactatcatcatcagacagaaaccccaagcttcactcattaaactggcctgcatcaatcattgctataaatgcacacattgagttgaactgcatgccacagaaacttcaaagaattggggcttgaacttgatcattcctttttctctcatgtaaaaagagctctggaggtaggcagcttcaaggctgacttaatgcctccatgaaggccatcaggcactggggctgcttttgatttattctcttctgtcctagggtaaggctcttgtccacatggtagtggcattccaaccatcaggactgcattccagccagcaggaagaaggaaaaaccataggcagaggagtgtctgccagctgccccttctaagtgacattccaggaagacccccctgcccagtrcttgaccaaaactagctcatggcctaccctctctaaaagggatctgggaggtgtagcttttttatttgggcacattgcagctccaagaaagtaagggttctattggtaagggaggaggaaaatcggataggggaagaagattatcctaattgattcatggagctgagagcaggattcattcacctaaacagtagggctgctggggaataaaagagggctgggatggcggccagagaggtagccacaatgtcccactgcactgcctgacagaggaaatgggagggagaggtgagcagacactaaagtttcatggtgctatttgcagcccagtgtaatggagggagcactgaactgggactccagaattttttttccagctctgtcactgactggcattgtgaccttgggtaactacttaaacatttttgcctcagtttccacactcatgaaatgggagcttggataagctttctagttagatggaggtgtgggaagctcttcatcactaaattgcaaattagctgaacaaggtgttttttatatctgacatccacagctggccaagtctttggtaggcattgaaagcaaaacccaacatcactgacccgctcttcacacacacacacacacacacccctctgctatttgctgtatatgtgggcctcagactacttcaaactgtggttcaaggatcattgtaacagaatgaccacagggcctagctaaaactgtagattcccgcacccagacctgctgagccaaaatttctgagggtggggcaaagaattggaatttttagccccttatatgatttatctcagcattaccactactgtaagtaacctgagagttttgtttttcttccataatgagaagtccagaagtagctcaagaccaacggggcaactctgtgatgccattaggaacccagactctttccaactttcagccctgacattcttaactccgcagcttcccttgcaccatgatggctgttccatctccacacctgtgttccatctatgtcccagtcaggaagaagggcaggggaaagaggcatgcacagctgagttcgcccaacacacccacatttaaagagctctcctggaagccccagtaagtgacttcccttacatctcatcaggaggaactgtttattgtggccacatgagcaactgtagctgcaaggactgggaagtagagttttacagctgggcacattcctgctcaaacaaaaatcaagatcctctttgtgaggaagaggagaagataaaaatcgggtaagctactacattagggggtagcgatgttaggtacagttacccctagtgactttccaaagagattttcttggaaggctcttttgttcccttgaactcattgatgagttttgtaatgcgggtttaatataggaaagctgaagtgctccataagaggtggagaaaagacaaaattcccaggcagttttggagaggaaagagtgagttgtaggccggtgcagtggctcatgcctgtaatcccagcactttgggaggccaaggcggatggatcacctgaggtcagcagttcaagaccagcctggccaacatggtgaaaccttgtctctactaaaaacacaaaaattagccgagcatggtggcaggcgcctgtaatcccagctacttgggaggctgaggcaagagaatctcttgaactgggagatgggggttgcagtgagatgagatcgtgccattgcagtccagcctgggtgacaagagtgaaactctgtctcaaaaaaaaaaaaaaagtgagttgtaaacttgccctaggcagaggctacagactaagggtcagtaggaaatgaggctagagaaagctaaatgtaagaaacaaagtataggaaaagccatctatttttaaactgatggcttgatgggggttgttatggactaaatgtttgtgcccttcccaaattccttcgttgaagtcctacccctcaatgtgatggtgtttggagacggggcctttgggaggtaattagggttagatgaggtcgtgagggtggggccctcatggtgggattggtgctttcgtaagagatgccacgtctctcaacaaactgttgagtaaaaagtaaaataagagactctagagaccttgacctcctgcccttcatgtgaggacacagtgagaagacaaaacagtctcctgcaagctaggaagcagggccctcaccagacaccgaactggccagcaccttgatcttggacttcccaatctccagactgaaaaataaatttctgttgtttgatccacctagtctatgatattttgttatggcagcccaagcagacaaaaacaggaataattgtcttggagatacctgcattttagaaaaggagtcctaatatttcaaagaattggccagagtggcatagtggaaagagtatggatttgggagtcatatgacttgcactcccatctataaattgtaggaatttgcaggattgttttttgctgcaatgagcctcaatttccttatttggaaaaaagtagacagttaatacttaccttgaagactcctgtcagtaaataatcagataatggaccggacacctagctcatggaagaagcaccatccaggttggccacaattagccacatctggcatatctgtctttgtatcccccactgagcccagcaaggtgcaatgcacacagatgctcactgagtagctttgaaacaggctacttgggcagagctatagagatggagggggctttctctgagatccatggaccattagggacactggtatgaggctggcagtctaagacgatcaagtcgtccctgaccccaacttatttctaaaccactgaagagtgtcattgttctctcttccttatgaaagtgtcctgtggagtctcctgtagtagaattgagttaaatgttacaatgtcttttccactagcacttctggcaaaaatcgatgaataacttcataactaccttaagggcacctcatttaagtttgcagatctctgctattttacagaactctgctattagtgagaatgagattttaaagcctcattcagtatccagtgagcacccactacgtgccagatgctggggataagagacattccctccacctgatggtccaaacgttgatctgtctgagaattgctgctctaaattcaggtaattcttatccttaagtcccaccctttacagcctattttaccctaatccctaggagaaaccctttggccaataggaaaacaccaaactaggcagctatgatcccatactgaaggcaggaggagtcaccataacctaagaaaaccaacttgctctttattccatctggccccaggattcctctaacgctagagggcagtcgggtcccatggacctaaggaagtcggcctgctcttcctcaatgcccagcaaattatcccctcccgatcctcaggctgctctcctggaaatgaagtgctggatcagtaaaataacttccggagatcctcttccttacagggtaagagcacaggccttttcagtttagaggcagaatagggtttggaccttgattctaacacctactagttgtttgacctggggaaagtgtcttaacttctctgaattttgatgatacgtatccataaatggttttgcgagagtaaatgtaaagcactcagcacggtattcagcatatggttaacctttaataactattggctgttactgtttacgattctaaggaatggctttctcttagttttcaacattgcttttttttttcccctttgagacaggggtctcactctgtcacccagactggtctcaaactcaactcctggactcaagcaatctttctatctcagctcctgaatagttaggattacaagtgcatgccaccgcaccaggccctacgtttctcttttatttaaagtccaagcatcaattcctaggacataaagtgaggacattcttaggacagatctactatgtactaagcaccatgtactaagcatcatagtaagggggctagatgaattatgcatgatgccacaataatctgagtaggggaattgttacccctattttacaggtatagaacctaaagatcagtaaattccccaagatcacactgtagcggaggaacctggatttgaacccaagacaacagagcttcaaaactcttcaccaccacagggggcatagcagtagtgttttcccagaagcttcttgtaccttatcccaaaggcaagttgtaaggctgaagaaggaggttgccatagctactaactggaccccttttcacgtaatcagatcctcagtctgccccagttttgcaagaggagctgcttgtctggaaactctcctcaacacctgcccctggagggagccgactgtgtctgaattatttagagagtctctagacacttgatataatgagcaggtgtggatgcttctctgacttcccccacatgcctttacttacctcctttcccctcccccaagttgcctatgaggaaaaaggaggcatcatccgtttcctcactgtagatgtgtctgcctcatcttcatttttcatcccgaagtctgtttgtaagaagtggaccactttctttgcaaatatcaaaaatcatattgatttccattgaaattggtggtgtaaattgaccctaactagtaaatgcataacttggccaggagtggtggctcatgcctgtaattccagcatcttgggaggccaaggcaggaggatcgcttgagcccaggagtctg

SEQ ID NO: 6878 - DNA, 22059 bp, Homo sapiens
tcacaagtggtattagtgcccttattaaagggcccccagagagctctccagccctctttcttccatgtgaggataccaggagaagatggctgtctgtgacctggaagaggaagatggccatcactgaacctgaccatgctggcaccctgacctcagacctccagcttccagaactatgagccactccttctatgacactttgttatagccacctgaactaagacaaatgacattttatcaaagatttttaaatgggtaatattagaagcctccttttagcacacacaccaatagccttttctttctttcttgttcttgatgaagtcctgtgatttccatagctcttcctcttgggatagttctttgcagagcttcttgccagtgttagcaagatctttgtgtctcttattggctgtctgctactaggcactgaaaaaaacaaaatcaatttcagaaaataacatattttattttttaaaatgtctgattcaggtggtacacgtgtaggtttttatatgggtatattgcatgatgctgaggtttgagcttcagttgaacccatcacccagatagggagcatagtactcaatacgtagtttttcaaccctttcctttgtccttgtggaggccccagtgcctattgttcccatcattgtgtccatgtatactcaatgtttagctctcacttataagtaagaacatgtggtatttggttttctgttcctgcattaattcacttaggataatggcctccagctgcatccatgttgctgcataggacatgattttgttttttgtatggctgcatagtattccattggtgcatatgtaccacattttctttacccagttcaccgctgatgggcacctgggttgattccatgtctttgctattgtgaatagtgctgtgataaacttgtgagtgcaggtgtcttttaggtagcatgatctattttcttttgggtttctactggatagacacccagtaatgggattgctgggtcaaatgggagttctattgttagttctttgagaaatctcaacactgttttccgcagggactgaaccaatttacaatcccaccaacagcatatgagtgttcctttttctccacaaccttaccaacatctgctattttttgactttttaataacagccatactgtctggtgcgaaaggttttgatttgcatttctctaatgattagtgatgttgaacattttttcatatgtttgttggctgcttgtatgtcttcttttgagaaatacctgtccctgtcctttgcccactttttaatggggtaatttgttttcttcttgttgatttgttttttatagattctagatattagtcctttgtcagatgcatagtttgctaatattttctcccatttcgtagagtgtctgtttactctgttgatagtgtcttttgctgtgcagaagctctttagtttaattaggtcccacgtgtcaatttttgtttttgtcgtgttttcttttgaggacttagtcataaattctttgcctaggctgatgttcagaagagtgtttcctaggttttcttctaggatttttatagtttgaagtcttacatttaagtctttaatccatcttgagtcagtttttgtagctggtgagaggtaggggtcaagtttcattcttctgcatatatttagccaattttcccagcaccatttattaaataggatggaaaatgacatatcttaaaatttaaacttaccaaacagatcacttagaataaatttttaacatgacaaaatgttgacttcactgtttaatttttacctcagtgcttctgtttcattcaaagcatagatttgttgtttgttttttttggatagaatattaactgatggagaaaatgaaggaaaaagtcaaaatcttaggtgctaatattttttaatgacaaatttatttagataaactctgaaatgataactaagtcaatgtgaaaactccactgcatttacatagaatttttttaagaaatgtaaaccacctggtaataataaaaggataataagaatagataacatacaaaatatatactctgtgacaggtaccctcctaagatccttacatatattatcttatttaatttttggggcgtttttttgagacaaagtttcactcttgttgcccaggctggagtgcaatggcatgatctccgctcaccacaacctccacctcccgggttcaagtgattctcctgcctcagcctcccaagtagctgggattacaggcatgcgccaccatgcccagctaattttgtatttttagtagagacggggtttctccatgttggtcaggctggtcttgaactaccgacctcaggtgatcctcccacctcagcctcccaaagtgctgggattacaggagtgagccaccgtgmctggcctatctcatttaatttttacaatcttataaggtaggtaccattatcattttacaggtgagaaactgaggcacacagaaattaagttagcttgcccaaggtcatagccagcaagtgatagtaacctactctaaaactaccagtttaaatatggctcaattaaaaaatgtgcacatgaggtgaactagacttcgtacttgatgctagagggagatatacaaagactctttctttgaagattttgaaatctagacaaatatcataaaatgttaaatactaatacaagagtgaaataaaaattccagacaatctttttaaaaatccacaaagaatgatttaacttccttaaactttctgcttaaacaagttttcagtagtactctacataaatgagcacgcgtaatttctaattccatcattgttaaatttttttgctgcagttaatgacttctacaggaagttatgcttatacaatagccaaaacatatgcctacgaggtagaagcaccaacacagaaatcaacaatatcctgggctaattaagtgtatttcacattattatactgaacccactcttcagttccaccttagccagattatctgttcctataattacccatcatggaaaggaccccctgtaggtaggaatttcaggcacatctggcagccaactgcacaggacccttccatctgcacatttgctctcatgaaagccctgtgcctgcacttaattgggggtataaccaggtatctcagagacaatttggttggtgaaaaccatattatttttatccaaattgatgtgatggtctgatgactgcaaccactgagaacaccgtattgaaaaaattaatttatctctttgtacctgaaaacatggactgactaacctttccatttttcaaccaattattttgacatcttttaaatgcagtcagaagataaatgctgctccacttccttgtttttcatttttcttggcctcggtccagatgtgggtataaatgttactttgtataaaatggagctggttgctagtgcttaattttcatgagggtaaggacacaaatgtcttgcattagttctgtgagttatggtaaaacccttttcagtcttttttaggagttagtgatgtgtttgatgctgtgaaggttaaggtaacagcaacttctgttacaggtaacctctcaaatctcagtagcttcatccagtggaagctcatctctcattcacataaagtcagtcaccagtggggaccctggcagataagagaagaaaagagaggatgtgaacaattgaacgggcagcttttctgagctctgcctgggagtgacacagccccttccgctggccagaaggctcgtggccttacagagcttcgggaagtggggacggggaaggcaggggctggcagactggtagtccccaactttacaacatggaaggggactgcaaattttctggtgaaaggccaagtagccacctgtgctacaagtactaaatcctgaggaattatatattagaaagggtgaactctgaacaggtctttaaaaataaatgttttatggagtttgcatagagtgactaatttcagtaaaagaaattatatctattgattaagcacctactatgaacaagtctcttgatatacccagtggaaaagtggggagaatggggacaggtacaaagatgaatgaaagaaacatggtctgtctctccatgaagcatggcaaggaaatgaatgaaattttgtgtacattatatacgatctataagatgtaatttaaaacataattttacctacaggaaaaggagcaagaaaaatatttgtaaaggaaatatttgctttattttctgattcacgttttcatcatagaaaattttaaaaatacaaaaaggcgcaaagaaaaaatctttcagcgtccctaatcctatctcacagagatattcactatgaacatttttccttttgactttacatatacacatatttgaaaagttaatgtatgaggattttttccaaagtactgaagttaagaacatcagttgacctgaattaacttatttgtaatcatgaagaaatcctagaaagaatgccaaagtaaactgttttcctctgctggtatctggagcactaaggtccatgatttatcattaaaagaggaggggcagaggaatggttacaccaactttcttttttcttttttcacctcaaatttttactctgaaacaacctttaaacacccaacaaataaatgaaaacttgttgctgcatcaaaaccatcatcgaaatgaactgaaatacccttcattattcaacctacagtgtgtgcaagggccaccagaatgtgttctaggagaaatggctgcaaggccagggggtattaggagaacgtttctggcaggaataactgtccaaaggcaactgggctaagctaggagctctctatcactaaagaacctggagcaaaaactggaagacctctcctctggaatgccgaagaggggatccaagtattgggcaggagatagagaggtgccctaaaatcctttcccacccagggtgcatagatatataccccatagggtcctgcaggagacgatctgaagcagaacttatttgagctgtttgggattacacagtcttctataaaactggcccaatcagaagatttcctagtcagcttgttgtccagaaacaggctttcctagctctgcggcggttaggagttaaatgcatcaccgttggctccccagacactgctgggactcaaatgggtgcaagagtgaaggggaaggtgggaaaaagatggagaagcaggggggaaggaagccacagatgtcatcttttcaggatgctcagaattagccctaatgccctatagataaaggattggtctgagaaccaatcaactccttatttctgtttggcagccaccttcctcttccccgatctcctcttatttcaggtcgggctgcagcaaaatggcccaaattgatctcgaatctttccaatttaggccatggagacacaatcgatattgtatggaaagaatctcaagaagagatacttctttgccacatcatgaattctcattccgtcattctcatcctttgattggctgctttgatcaaacgagtggaactctaacttcgaacagaaagagaaaaacagggtcagtaaattgtgccatcacacaggaaaatacctaaactagtcacactgttttgattcaattggctactgaagttatagaatgttgtttactcttctctcctttgtctactccccagccaacaaaacaaccgaccttagctgttttgaaaataaatgaaaattccaacatgggtttgaaataaaattgcatcataaacaatcggtaggtgtttttcaaagtggtttcagggaagtgccacggagtaagcaggcgaccaccgaggctgctaaaatatttcctgtcctgaccagggttgcgtttctggagaatayttaacagggarggttttaacgcttttaaagatgttgaaactaaagaacaaatattgaccagagggcaccacaacgctcctgaaagagagtaaaatacatcctttataaaatgaaaaactacttggatgaattattccaaaattcctgcacaagtggacctcagaaggcagacggaggcgccaatttggcatggccagggcctgggcactcacgcaccagggagcctcgcgggtccgctctcgctctgtgaggccacggtcttcccgccaggttgactcgagcctcctgccagagccactggccccggaggccaccctagaccgcagctggcggccgctggcacgagtgcagggtaactgagccagggccgctggcgcatttggcctggccgaggccaccccgcgcggccgctccactgtgcccgaggctgtcctggaggtgaggccggcccacagggaccctgcccgtgcccgggctccggtgagtcagggcgcgttatgcaagtgcccccggcgcctccccttcggtctttcaccccgcgcggttacgaaagcgcgaccccctccccccggcgctataaagcagcggggcggccgcggcgcgctcgcctccctcgctccacgcgcgcccggactcggcggccaggcttgcgcgcggttcccctcccggtggtgagtcgcggccggggcctcggggccggcggcgggatgggccggggtggggtggggtggggtgaggtgggatacggcggcgggggtcggctgccgggcactgacggaggcgcgtctcccgcagggcggattcctgggcaagatgaagtgggtgtgggcgctcttgctgttggcggcgctgggcagcggccgcgcggagcgcgactgccgagtgagcagcttccgagtcaaggagaacttcgacaaggctcgcgtaggtatcggcccagggggcccaggcggcccaggtccccaccccatccccgccctccccgcggcccgccgtgcgcccccggacgccaaacccctgctgtcatccttctcacagttctctgggacctggtacgccatggccaagaaggaccccgagggcctctttctgcaggacaacawcgtcgcggagttctccgtggacgagaccggccagatgagcgccacagccaagggccgagtccgtcttttgaagtcagtggccgcyggggcagctgcgccstttgcgctccagggtyccccaagggccctgcctgctgatcgccacgtgggcattgtgaagggaagggagcaccgaatgggtggagggagggaggaagccctttgcccggcttggctgaggatccccttggcttttgcagtaactgggacgtgtgcgcagacatggtgggcaccttcacagacaccgaggaccctgccaagttcaagatgaagtactggggcgtagcctcctttctccagaaaggaagtgagtagtcagctctgtgggactgtcttgggaatggggcscctaccgggccaaatcgctgggtttcttctccagaggtacctacccttaggaagaatggcctgcggaaaggtctggaagtgkcaggaacccgcagcaccacctgaggttaggggaacaagattgggagcagctacctaccscctccccaaacctcagctcaagaaacctggcctaagctcaaaaggacctttcggtttgtcaggtgtcattttccccaccagccactgtgccaaggtgtgtgcyttctccatgctttctcctcctgtctttcacatcaccactccacctagctctgcatttcctccgtctctttgggctgaatccctgagacagcttgactatctggggctcccacagaggccgagagagccctatccaaggacggagggaacactgtgcataggggtggatgcctcccaagtgcctggcctgctgatgctgagattctgagccaggcacagtgtgctgtggctgtggcctcttccctttccactaagctgtgaaaatcagatgtggaggggagtgatgttgaggacttgtagaagaacatcctaaaatttggcctaatcatgagaaaacagtgtctacatgctctttttcccatttttttccccatttatcctaagtttcaaatcaggaatctacttggtagctagagaataatgcaggccaggggacayatatcatggaatcttagagagggagagttaaccttttggagggggttcaatatgtagatgaataaactgaggccaagagaactttgcccaaggacatgcaacaagtttgttagakccaatgtcagaagccaggcttccaaatctcaggccaggatcaggtggccctgaactgyagggactcctaatccagaccagcttttgcaaagtattgtttgagctcttctgtgagataggaccaagggttgttcagggagactctctctgctyggtgatccagggtagaagtgtcctttattgtaaccctttgctctccatatatggcacaccacmctcttggacttcctctaaagttgtgtgttggatgaaattgcatttttaaattttatttaatttttaattttaatttattattattttttttttagagacagggtctcactgtcacccaggctggagtgcagtggcgccatcatggctcactgcagcctcaacctcctgggctcaagccatcctaccacctcagcctcctgagtagctggaactacaggcatgggccagcatgcctggctaatttttgtattttttgtggagtcagggtctccccagcttgcccaagctggtcttgatctcctgggctcaagccatcctcccatctcggccttccaaagtgctgggattacaagtatgagccaccatacctggtagagaaaaagcttagaagctttatttttatttattatccttggaaataataaaaattatttcaaatagtgcagcaaaacatcccaaagtgatttatttagagtaaaatatacttttctgataatggattacaaaaatcaataccagaggtacaagattaytaatttttagaaagaggaaacacatatgttctatagcattttgagatgtgctccttaatggactaggattctgttggcaatgcctttaggcacagggtcagagaggacccartgagaagggagcattttgtttcttgcctcctccccctatcaaaccagattagtttgcttttgtctcttgtatattggtattttatcaggatttcatttggagggcgaaaaagtactgccatcttgaaagtgattgctatagatattaagtgagatgactataatatggaaggcttaaggataaattccttcttaggttacatttcaaaaaagaagctgtgcagtgttgtagttaagcccgcccggttaaaattagacctcctaagttcaaatcccaactccaccactacttgtggaacyttagatatgttccttcacttctctgtgcctatttcgtcatctgcaaagtgaaacgatcatagaacctacctcatagagttgtgttacaagatgcaatgagtcaacaggcagaaagcactcagaacagtgcctgagacatgagttctttgtaagtgtttgatatgatggctgcttagttatctccctggtcgtgaaatcatagctttagattctgggtctagaatgggaggacccatggagaccactgggttcaagtctcttgttttagaagtgaagaaactggggcccatagagaagtgactggcctaggggcacagggtgaatttttggcacttagtgacacctcttaacccatggcttgtaaaaaggcacaaacaatgcctttgttttctgagtatctcgcaaatggcatggcttgatgcacctaccttgttctgttttacatgcttgttttggggtcatcttaacaaactctactttcattcctcgtgccagtttcttccctgaccatggtcttgctttaaacactgacttggacagagggatttgaaggccactccaagagtgggctgcatcctcagcctctcccctgctccacacactgcatctcaccaaacggatgtgtttaaaatgaggtgcgcttatggagagaaagtaactcagggccaagcgatcatgaaatttgttgtcgaattattttaaaattaaatgtgatcaatctctacagttgaatgtcagtgttaacagactgatgtggcttgctgctccagccttgggcatgctccatactggtcttcccttctggctccaccagcagcaagcaggatgtctcaggggttgaggatactaccatcagcaggtcttggttgaatacaggctagcctccctgagatttgacttccttcactatgaaatggggataaagaatagtttctatttcatagaatcattggaaggactaattaaggtaatttgtgaaaatgcttagcctagtgcatagtaagtgctcaataaatattagttatatcatcattgttttgtgctcttgtagaaagacctggacaaagactctccttgtgtccttctgtcagatgaagtctgtcactctgctagtaaaggggcccttgtcagactgaataacaatgcaagcctgaatgtttacattagtgttggtcaaagtcagggttcctgctccatctatatctaaatacactagggtgcttgttaacaaatgcacatttctggactcaaacccagaattatggagtcagaaattctaagggcacggccctggaatctgcattttaagtatgctccttgggtatgctgtttctgcacaatgaagtttgagaaccactggtctagataattcaatctgaagagcttggcttactcaggtatcaaggcctcagactccactcacttttctggggcctgttggggtattttgacaatgcatcagaaatagcattraatctgttgcctggctggctcagctggactgttaggcctgagaaccacagggagcttcccacctggtcttgctgctttagatgattggagcatgcaggtttagggagctgaaaggacacatgccaggcccacagcagtgagcaacagaacagaccaatggaaccaggttgcctgagacagcgccctctaccaagcattttctttggttttgggactggcagtccaaaccgctaaaccagtctgtgtaggtacagtatacacacagctgcagcatgaccccacttcctaggatggtagaggggaggcaggggctcccagccacacagccactgcctccaacgctctctgtccctagctccactgcatgcggttagctggagtctggaaatggctgggggtgtctggttctccagaggagccctgcccagctgccgggtgtgaggaggttagagaaccaacctcattctcgcagtgctctggcagttcatctcttgcaaatactcttaaaagggagagcctggtcaaggtcactatgatttaaattcctcrtctttgaattattcagccaaaagagcctggagattaaccaaaccaacttaggccttcttttaaagtcaagaacagtagccaattttactaaatcsaagtattgaaagttacttaattcctctgtcaaaatttaaatgatggcgaccattttggaggaaaaaaaaaaaaaaaaagttaagctgccgatcggccaagctaatagctgcctggatcatgagtcgaggtaacatttcaaaggcaagtgtttttgtgtctgagggtgcctgtgacagacactgtgatcctcgtaaccagggaaagaatgacttcatccaaggatgaggaagaccacccagatactctggagcctgtgaggggagtcagtggttagggtgaggcccagsaggcagccctgtggcttctgttcccagcctttctgctgaataactttatggttcctgctgagcagtcatggttctggaacatctcctcagccccacctctgacactgttaccctggaacagcctcaaggcayaggagtggctcattctcctggcaggcctagggtgagttgaagagaggggctccacacccactcctgtgacagcccccctgcagagcctgggtttgggctgaaccccatcctaggctggcactccaggggttctcagagaggcacacccagaggcaacttaggaccagcattccaggtggccttacaccctctaacgctgggggatccagttccctctgygcttctccaactggaacactgcagagggagcatcaccccttgctccaacacctgagcctgagatggagacacaaagcctttttgtttcttgcccctctcccgtcagtgtactgattgtctggagacagtgtggtgtagaggtgaagcatgtgggctctgggatcacactcccttgcttgaatcccagttctgccctgctctttgtgaccctaggtgaattattaagtatctctgtgcctcagtttcctcacctgtaaagtagaggatgatagtgtgcagttttggatcaatgtgagaggtaaccgagaaaacaaatgggagtgtccatacagtgactggcacataattaagtgctcagaaagtcccaatcatggtattgtgtcaacaagaaggttaaattaagtagagatgtggcacttttatctcaatacagggtgacactgttctttctctgtggcaaatcgctcacatacattctttttttctttcttttttatttttttaagacagaatctcactctcactcaggctggagtacagtggtgcaaacctagctcattgtagccttgacctcctgggctcaaaacgatcctgccgcctcagccgcaagtagtggagaccacagacgcatgtcaccccacctggctaattattttcatttttcatagataccaggtctcactatgttgcccaggttggtctcaaactcctggcctcaagttaccctcccacctcagcctcccaaagtgctgggattacaagcacgagccatggtgccyggccacacatatactctaattaacattctttcctctcctgccttcgttgatatttttaccactttcatttactcttattcttcatggcttacatttcagccttgaggaatacatataatctaaattcagtggctcagctctgcctctgtgagttgtgaagaggacaaggtctgagaaggaatatctgatgccagatggtgggcctcttgtgtcctcaaggcaaaacctactctttgccggcacaaagaagtgagtagcattaataagcagaattaggatggagccagagaagccgtgaccatgggcgtggcatcctccagaggactgagagagcggggggcagcccggtcagtgagttgattaggaaccagcgatagagatcgagaaagacataagccaatattgggggtaacataagttggtggccatcagatattagccacaaaagacacagatattattggagagtagatggtgaagcgacagtagaacggtttattctgtggttttgatgagcccacattcttggtggttctttggaaagatgctgtcacattatgctgacataatcacagggacagatgatgattgaagtgaatgagatttccctgactccaagatttttttcaataaaggagaacaagatcctttctgatttgccaaattttataaaagttgtcagaattctctgaagtgtcctgcttcctaaagaaataaaaccagcttctggaagtcactgtgttctcaggcctggtcgtgagtttctccgacatctgagcccatgagggaaaggcattgatcsgcrtggtggctttctggcttgcagatgatgaccactggatcgtcgacacrgactacgacacgtatgccgtgcagtactcctgccgcctcctgaacctcgatggcacctgtgctgacagctactccttcgtgttttcccgggaccccaacggcctgcccccagaagcgcagaagattgtaaggcagcggcaggaggagctgtgcctggccaggcagtacaggctgatcgtccacaacggtgagtcaggagcagggtgccttctggctcttcctgcagggcagtgggtttggactaaggggcccaygtgctagtgaaattcattttgtccrtaccccagagaaaacaggggttcttgggagcccctttctgaggccaaatccagatcctgcttggccagatttttcactggccttctcatagggctcatgcaggtgtgggtaaaggcctttgtccagttcactggcactaacactgccgtgggctctcttttctttttattctgctycctcgggccatttctgtggtcacccctggctacactgccccaaaaaaccattgtgactgaattaagattgtttgggattgagcagcccagtaaagaggtgggcagttcatgtggccattgacgtaaaaactccacagggggcatcaatgtagtaagctccaaagagaatgatttcaacgcaccttcttttttctatatgaaaccaaatagccatgacattgtctagctgggtttcctcagttgggggttttgagattctctggaacaaccataggatcttttaggagatattacccttgtctgatcttgattttaaagccaggaacatkgtgcaggaaagagctccatttagtttgagtggacactcactcattgctatgggatactgggtttcaaaatccaaatacagtaatgctaaaatgtagagaaacaaaatgggccaggcatggtggctcacacctgaaatcccagcacttttggaggccgaggtgggctgatcacatgaggtcaggagttcaagattggcctggccaacatggcaaaaccccatctctactaaaaatacaaaaattagccaggcgtggtggcatgcgcctgtaatcccagctgctcacgaggttgaggcaggagaattacttgagcccgggaggcggaggctgcagtgagttgaggttgcaccactgcattccagcctgggcaacagagcaagattctgcctcaaaaaaawaawaataataataatcaaacaaaatggagcatttctgttggtcacgaactgacccactacaccaaacagatgggaacttagaccaaaatcaaattgattttgaagcttcacccttcaaaattaaatgtagggccagcaaggattccaccacagcagggcaccgtaggaagcagattatgcacattgtacagatgagaaaacagaggctgacaatgaggaagaaagttgccctaaatctttaataggtagctgagttggatgcaaacctagagttttgtgactctgaagtcccttgtgccacaccatctggtgacacatgacatgagacatagaagcactttataaaaccatcaccagtgtgtcccaggtcaggctgccttggctcccacttcctgaaagctgagggtggcctccgacactttgaaatgcaataaggcagacttaagagaaatcaaaggaagccctgttcatccagcaagtcatattctctccacccccattacgtccagagaaaattcagtgggtttcagaaacagccttgaaggtgtttatgaattacagccacctgtatccgtaagggttgcaatctgctgtgatgcatttgaattaagaagcatttgaatgaagccagctcyaaggccatcatgatgttcattatctacataaaaactgggtccactttctgtcgttaatggctttgttttgtattttccaggttactgcgatggcagatcagaaagaaaccttttgtagcaatatcaagaatctagtttcatctgagaacttctgattagctctcagtcttcagctctatttatcttaggagtttaatttgcccttctctccccatcttccctcagttcccataaaaccttcattacacataaagatacacgtgggggtcagtgaatctgcttgcctttcctgaaagtttctggggcttaagattccagactctgattcattaaactatagtcacccgtgtcctgtgattttagttttcatttgtgtttatgtctgtgctgcagacggatgggtggggtgcgcttctttataccaggagcacgtggctctttctgacctttggcctgttctagtgcctaatctccattattaaatactggcttctcccaacttcctgaaaaggaagtttcctctttaacttagggaagccttacctaccagcctggccaaagcactggtgccaaaagaggaagtgagtagacaggtcagtccagtgagcccaagtcctcagtcagccctaggcctgtgagtgaggtgggcgggctggcagctcaccagtgctggatttgagaggctgagccacaggggacaaagtgagctctaggaaacactccttagccctttattgtctctagcatgcagctcacctctttcaggtgtaggcaaaatgttgatggggaggagggaggcctctggggaaattcgaagatggggctctggaatctcattctataggaaagatcagagcaccccctacccggaatgcagggaggggctgggtagggggtgagttgcaggggctgggacagagcaccagcatcctgcatcattagcagcacgtgggaaccctagtgtatgggtgcaaggccacttgcctcagttttccaggcgttcccaggggcctccatttctcatcttgaaaaaagcagcaaggctttggtaccagagggtcttggtgtaagtgcaaatctgcttcagatatatattagctgtggatttggggctggttacaaggcttatctgagcctcactcttttcttgggagataagggaaaatagtccttgcctgatgggctgcagtgaggattcaattaggcaatgtcccttagagctctggggagctgtgaaaccggtgatgccaggctgatgtctatgaaatgcactgggagtgaggaaagggtcacagatctccgcctgggtgttggaatatccagggaccgtgggaggctcccgggggccccatgctagtgttctccaccaaagacagaggagacaggtgatgtgcatgggagagctttgccttcctctctcacggaaccacaggctgtcagagccttgctccgcagcttcagtttgacaacctcagagaaccataatgatataggagttaaaaagaaattactcgggcagatagtgagggtatggaagtccttggtaagattttccttttaatgaaaagcagcccctaaatccttttctaacaaaaagcagctgtaaaatcgtgctgcagacatagacaagcaagttggaagcttgcatgggtgaatgccagcagttgtgtccattggaatgtactacctaagactaagcatgttcaaaatggcggctccgtcttctctttttgccagctatgagtgcagtaaggagaagacaagatggccaagtggaaagtccatttgcataatcagatttgggtggggtggccagcctttctcgtgcactacrtaaacgtcacacctggtcaaaccaatctgtgagccctatgtaaatcagacaccacctcctcaagcctgcctataaaatacgctgtggtccaccacttttcccttttcagatgcctctgtctcacgagagagagagctgctctcctctctcctttcttctgcctattaaacattctgttccttaacccacccacatatgtccgtgtccttaatcctcttggcgcaagatgacaaaccccggttatttaccccagacagcaatgccgcttcaataagatagccacacatcacttccaaaaacaggtttaattgatcaaatctattaactaaagtgagcaaaacatctctgttcgtttgtcttcgagcttgtgatatccatgaatctgacttcagaagcaagctgctccagaaactgcataagcagtcactactgctggtgctgatttcctcagcaacaaagatttgttgaacacctactatacaccaggccccgtgctgctgtgcattccagccactggcccagcctccaagtggtggagtgaccctgggttcggtctttggctctggtttctctctatctctccaagggatgtattataaaaccataggtctataaacaccatttatatctccaaacaatgtgcatctccaggcccaagctccacatctctgcatccaactgcctattcaatttggaagtctcactgagatttcaaactgatgagctccaaatgaaactcttggctcccccmcccctaatctttgcccaggcccccccatttttgttgcctgcttcaccatccaaccaatgacaggctaaaaaatcagagtattccccttgagttctccctttccctcacattctatcaattccatccttcccatcaataaatcatctttgttttaccttcccaaggtatatttacaagtcatttctcacaatccctccctaatgccactcacctccaaggtcccatccccatgtcacacttcagcagctgcccaactggtctccattttcactcatgctcctcagagtctattccctgcccagcagccagggtaatctttgcacacattcatcaggtcacgtcagcctccagttgccaacctccaggggcttggagaacagaataaactcctaggccctatgtgatctaaccctgcaatttctctggcctcaactgacaggccccagccgggtacccctcatctcagcattaaaggcagtgcctagtgcagaggaggctccatcaatagtcggcttacgccactctcccttcaagcgtgtcagcctccttgcactaacatctcttctgtgtcccttcccccattcacacaggtggccctttcttgtcgcttaccttttgatccaatttgtcactcctcagaaaggtctccttaggcccctccccatctgatctaaattcccatcactaccatagcccccgtcccattttcttcacagtgcttattcgctctgtgatgctatactatttattgacttgtagccaggcgtggcggctcacgcctgtaatcccagctacttgggaggctgaggcgggaggattgcttgagccaaggcatttgaggcttcagggagccgtgattgtgccgttgcactccagcctgggcattggagcaagaccctcatctcaaatatataggtatctgtatatagatatagtttattgacttttatttagtttttctgcccctgactcgaaggtaagttccctgagagagggccatggctgtctggttcaccactgtattcctagcacaaaggacactgtctgccatggctggtgcttaagaggcatctctgctggatgcgtcaggagtaaaccactcctgaactcactctcaaacatttcagagccatcctactttctctctcatttcatgatgccgattctcttaaaagggtccatagcatttttataaatgaaaaaaaaaaaaaagtaagtcatctttaactgttccttagaaattcttcaattgctcttgacatcaacgaatgatcctaaacccttgcgagtccaaggtagggcacagggtggctgtgacccttcagaggagaaatctgcgtcctgaatcggttctaagactcacttcagaaaccactatggtgtggctttatatgtaggagatgtgattgctgaacagtcataaataaatatttattaaatttgatcatattacaaacacactaaaaaagttcacatttaaaaggaacccataacaaatctttttttttttttttttaagatggagtttcactcttgttgccctggttggagtgcaatggcacgatctcggctcactgcaacctctgcctcccaggttcaagagattctcctggttcagcctcccaagtagctaggattacaggtgcccaccaccactcccagctaatttttttttttatttttagtagagacgggggtctcaccatgttggtcaggttggtctcgaactcctgacctcaggtgatccacccacctcagcctcccaaactgctgggattacaggcatgaaccactgcacctggccaacaaatccttttataaagggaaaatattatgaaacttggtgatcaccccttaatttaccgacgctgtggatgtctatttgcataggttcattttcttaaagcagggtgcactgatggagggtactggaaatgaactctgtttaaaagcatgccacagctcgccaggtgtgagaaactcggctataaagaaaaattagccagaaataatcgacaagtcatttcttttgacagatgtgtctgttaaaatggctcccttttctgggaaccagaagcagcaaaaaattttcttccactcattcctgcacagtgtcatgttgtagaggatggggtttagggctgaattagcaaatgtgaaggccaccacccagaagaagagggacggccagatgaccaggtcttgcttgaagttctggatcaggatgaggaggatggtgatgatgatggggctccacatgatgaagaaggagaccatgaggaggaagagggtgcggaagagccggaagtcctgctgggacacgcggatctggtggctctccgagtaggccaggcttaccgtgagcctcttccttgatgcctttgtgatctgtggaaaaccaaaacaggactggagccacaggtgaccgagggttgttggggattttgagttaggggcccaagagttggaatctgctatccccaaggcactgaagctgtgtgcctctgggactttgtgtgcccgagcttaggatgtgctggagaaatgggaccccggctgcactcctgagaaataaagcagaaaatcacctaccttctaaacagcgttatgaggggaagtgaaaagcctgaattgggtggtctacaagagggacatcttccctgttatttttttaaaagagatgtctctttaattgtttgcaagcacaatgtgcttagggttcaaactcaaacaatgctatactgatggggaacaaatgaagaacatctggccttctctaccctctatttccaccctgggaggtgactaacgtgagtattttcccatatggctttctggaaatgcaccactgccacacacaatattcctggcgtgggattgcaggcatctgctcttttacctggtacacagatgggcccacaccacgcaccacactccgggccttgctcctttttcacctagcagtatatcatggtgctcgggccatatctgcacagagaaggcacttcattcttgttatcttctgtaaatggtggttgcaatttatctagcccctattgaggagtattttatttctttggccttgtttggggaggtagcagctgaaatagcagtgtgcatactcttcccctctctccctatattattccgttctcatgctgctataaggacatacccaagactggataatttataaagaaaagaggtttaattgactcatagttctgcggggctggggaggcctcaggaaacttacaatcatggcagaaggggaagaaaatgtttcctttctccacacggtggcaggaaggagaagaatgagaaccaagcgaagggggagacccttataaaaccatcagatttcatgagaacttactattacgagagtagcctgtgggaaaccatccccatgattcaattacctcccaccgggttcctcccgtgacattatgggaactacaattcaagattatggggattatgggaactacaattcaagatgagatttgggtggggacacagccaaaccatatcactcccctacaggttgttgagtgggagatggcataccagtgtggcaggccaggcagaagggagcactggaccccaccctaggttcctttccttttgcaggagcgggagaaaatggatcctagtcttgcctacaggcccctgagtcaggggttaaggaaagatgatgtgatcagaggctgctcatttgctggggcagcttctgtcaggagccaacctgaaaatgaagctgagtgtgggaagggtctgcccatacctggtgggagtgggtgtgggaagggcctgcccatgggttggagtgggtgctgcttgggaatgatcccctcatcaacagggcctgttggcaccatcaccagacacagggaaatcagaggcaatgaccaacagaagg

SEQ ID NO: 6879 - DNA, 86474 bp, Homo sapiens
ggcctggctgaacatttgaaccaatgatcagagtttcattttatgattgtgttactctgaacagatttgctatttttttccagctacatttagagttcctcatgtatatatcacccctctttttccagtccatctaacctctccttttttttgtgcctagaatcagttctccttgccttcaaaatccctgataagtgtccatttctttttgtatcctttgatgtagaagccacaagaatggctttagcagcttattttaatcttatgaattattcattcaggattttttaaatgattcagatgctttcaatctgttaacagtatttataaaacatgtttcagtgatacaacataggtgaactaaaccaaagatgcaaatgccttggaggaaaagaaattgtattatagagaatcctgagatatatccttttgggttgtttaatttaaagcctatcacaaaacaaagagaattgtcgcactttaattccaacctcctgcagtacttcacaacccttagcataagattctgaaatttgtaataggtggtacctagtttgatgcagggttttgcagcagttgtgcgaatgcctctgcgcaacggcctttcagtcagactaaatgagaaaatccaaactgtcctatcaaaactgacccacaataactgtactctgaggcgaaacagagcaaatgtgggtttcctgttttcattgtaaaacattccaggttctcagattgaagagctacattcagctgatagttgacatctgttccctcacacgtagtggctctcaacacgggctgcactttggaatcacctgaggacctttcggaatcttcggttgaatcatcctggctgtcctggtgatgcttcttatgtgcagctaggctggagaaccactacagggctgacacctggaatgggagcttgtaacttttacaaaataatagatgtttatcatcttttgcaatttttacttttaagtctatactaaaatgagccaaaraagtcttaacaatgatgtatggcacaattggttggttgaggctatcattccatgattacaaataggtggttatgtggggtggttttgcacttgtggcaattggactgcaatttggccttaaaatgacacaattcctcgytctcagatggagaggaattgccttgaaatttgcatgtaccagactaagtgccagtatatatatgactgatattttcgtgactcatagaaggtgtccatggtatagagtttatgcctacatctctatctttattttgggcacacatgagcttttgttaattatttctttgtacttgttagaatctgtttttgaaaaaaaaaaaaaaacttttgctttgatttgtggtggattcaccttcttaaaataataaatttagaggatattaggaatgacattcaaaacaaatatagtgagaggtgattttttaaaaatttttgttcctggtttccaaattatgtttactttgatttgattatatgttggtatctcccaaatataggttaacttagctatttaaatggtatcttttgacatttaaaaagaattaagtacctgtcaaatcttgcattgaggttgcagttgaataagataaaagcttaggatgtcaaaaaataatatagagaaatattataagattttatgattattcttgaagtttttgatgcaaaaggaaaatatgctgaatagttcttccaaaaaatattatttccctcaatattttatttgtagccatgtaatttaaagagaacagaaaataactgcaatcaaaagtatggtttaatatcaatcaaagtggcacaacagaattgataagatctttataacaatcaattggctgatattaaaatattgattttaattgatcttttcaattaaaatctttagggcctgtaactcataaaatcagcatccaccacaatatatggtcattattggtttgtaagcatagatcaccattgactcctacctggagagacatgtctatttctaaaaatccagtagtttctttgcattctcagtagtacacgttgtatatatatatatgtaacaaatttggtagttttcagtatgtgtgatgtcctttgggggttrtttatcttgctggtccataggaggggtacactaccccaagaatcaagacatctgagttctagttctagttctagctctgccactgaagagccaccttacctggggcaagttagccattgtctcccagtcatgtttaccacccatgaaaggactcgtcggtttgatgtttccattaagctcaatgagtaactctaatagttactcttgaatctggattgaaaaacaccatgcatctgatgagataattcataaatgttgccccttttttaaatgatacaaccctaaaagtgactgaattgcccaagtgcttgaacatggcagaggtagttactcctattttgcagtttgtgcacttaaaaattcctacagtgattgttactttactggggaaaaaagatgaggtgaaacttcctcccaaggaattaaaatatctgtagaagccatggcttgcttttataatgtggaaatcatttgatttgctgtaattcacgcagatccctccttttgtcagggggaaatgatttgcatcatgttcttttttcataatgcttttacttcctgtttggatcagttgtatgtaaatgtacatttttgttactttggctgtgcccgttagaatttatcttccataaagtatttctcccattgagtctaatgatgtatactttgcctaggtctttccaaaattaaatttatgtaaatgtctattttatataaaatatgattaaaataagtatgtctggtttcaatctctcaagtacttcatggttagtacctactgatgtccatgtcaccaggagtgtctgttttaacaatgttttaaaaaggaccatcttccttccttcattctttcatttactcatttcattgcattattctgtgtgcttcctgtctgctctctttcccttcctccgcacagtgccaattcagtactcacccactccagatccgctcccctatcatgcttagatgctgtcacctctctcttcacagagtaaataaaaggtagaaagcagctgtcccccaatgccctgcacttcatctatacatttacctgcacctaattctatcctttcttttctcctgttatcgtaatggaagaagaggaccctaggttctgcattttgcctcttatggaacttcattccatgccttaacttctccttcatctttttacttcttccttttgctggctcttgtcaatttgtcagttctactcttcttaaagcacatacacaggcaatcaacaccgaaacaatttgaaaaaaaaaatcctctgtttcattttatctgtagctgctatcacatctccgtctgcccttcacagccaagcttttcgaatagcagatcacagttgtcctatactagtgaagatgtccaaattaaagacagatttgctgtacatcacaagtcaccactgtctgggggtagtccagtccactcctctccttggtatcctttccttttctgaagttattttaaacataaaaagaggattcttccatttggatgttttaatataactacaaactcaatttatattgaaaccattacttttttagaaaatttgagtctaaaactaaaactaatggcctggctttttttgtttgtttgtttgtttttgagatggagtctcactctgtcacccaggctggagtgcagtggtacgatattggctcactgcaacctccgccttctagttcaagcgattctcatgcctcagcctcccgagtagctgggattacaggcatgtgccaccacacccggctattttttttatttctagtagagatggggtttcaccatgttggccgccaggctggtctcgaactcttgacctcaggtgatccgcctgcctcaccctcccaaagtgctgggattacaggcgtgagccactgcgcctggcctatggcctggctattaatggtgtgtaattcttattgaatggctctttttccacttaatggaaaggcattattatgtgaggcctgtaagggactaaacctttgtatataagaatagggtctcagttgaagctgtgggttttgaactctggaaacaaagggagttgttctgtaacaggaaatgagacagtgccccaccgcatggagattcccaggtttgaaacaaagaaaccacagagtatgctgcaaagctgtgtgccatgggcagaagagtgaaaggggacagcacctgtgagcctcacggaagggctggccatggtttgaccagcaacttgaatattgctggcctgaccgttcttgcacagcacatgttcaccttctagtccttacccttttgtttagtaaaggctttttggtgggtttcatcttacctcttgctaaaaagaaagagggctttgggtccatgtgggggctctgagcttttattggagaacggtgtggccctggagctggcatggtggttcaaatggtcacccctgtgtgatgactacagggaggaaagtggtgagggccactgttcaggtagccacacatctggacattccctggacagtactgaagcctggaggttcaatgttttattttcacagaagagctgcttaccttaagagcatgctggacaccccctatcccctagacacccaggcatgaaactaaggagtcatctactcaaactgtcatccgaggtgtctttccttgaaataaatactcaaaagaaaatagtgctactctcaagaacagcacagtcccataaaactattggtgatgacagaatgttctgtatttgtgctgttcaatatggtagccactagccacagagggtaaatggacaccttttgaagatgccacagcgacaggcatcattcactttttttagtcttttcttcaaatggtgtccatttaccctctgctctctcctgcagtcacagaggtcattgtccccagtagattgtcacctgcttgtacctgtgcctgcattctctccaccttgactgccttctgttttcccatctacctgctcatctcccacctgcccccattagtttatgtaccctcctacctcaagaagcttttatttctattttacatgaaagtaaaatagagcacttgaacgtaaaatcctccaactggtgctgaaggactggtggccaggttatttgatatatatggaatgtccacttagccttgccttaattttctgacaaaatataagaccattacaaattctggctttgtcttctaacttcagcttaacttattacaaaataatattcatgggaaaaaaagtgatatctcaccactagattaattttaatcatcttaaatgatggatcctacagttttggggccattctgctgaaatggaggacagtactgccacccagaaaatgatgtcagctcaagcctgatctttcctattcactctttgaaaactctagagggtcaagggcaacaagcttcttagaaggggcagtattgtactaagcttcctgaccctccgcctttcagaagtcctgcctgtgtttcgtgtgggggaccagcttcattgcccctgagcttggaccgcactccccagtctgggaattcgcagggctaagcgttccaggccactgattggcttgctgtggatctgctagcaggaacctctgcacacgtgtgagcaccactgtcaccccttgggccacctcgtgccagtctctaaggctgggtggcggggcactgtgacaccaggggtgaccagagagcggcggcagctcacaatgatcaaatgatcgtgaagagggacacctgcgaaccaaggcgccacggcaggtgctgcccataggcaccgcaggagggaataaagggcgagacccccgccttcaccacagttttctcagcctgcagggagggaggacgtgcgaggccggtgcgtggaggctatgggcctgctggccagtgctggtttgttgctgttgctggtcatcggccaccccagaagcctaggtgagcctagggacctgggcaccaggactgcggaggaggctgagcgtgctggagagggaagacttcattactccttgcctcaggaagtcggggtggtatagccacacctgaggcatttgggaagaaagggtgagggggtggtgcatgctcagatgtccccaaaggaaggtctgggccagactgcctttttgaaattttttgcattttagagttcgtttgtaggcacacctgctaatcatgtgtgtactaaggagcctcctccaaggaaacctaaccaagtagaagtaacttaaagacaaatatctcccttccggagtagtataggtcattcctcagtatcttttgttttgtttgtttgtttgagacagggtctggctctgtcacccaggctggactgcagtgatgcgatcacggctccctcaaactccagggctaatgtgatcctcctgcctctgcctcctgagtagctgggaccataggcacgtaccaccacacttggctaatttttacatttttttgtagagatggggtcttgtcatgttgcccatggttctgacctcctgggttcaagtgatcagcctacctgggcctcccaaagtgctgggattacaggcgggaaccactgcatgtggctcctggtatctttaacacaacctaaatttgcatcttcccagagtaagccccaagtcacctaccagaggcagcgctggctccttcctgcccagtggtaacacaggctgaaagggagcagacaggaggcaaattccggtcaacccaggtgactgtgggatattctgaagaaaatattgagagaagaatgtggtagtctgcagctaagtgctatcagaatgtctgtgccaggccaggaaaatccaaatgggaaatcttggtaaagtgaactcttacataaggctctgtgtgtgcacacacacatgctcttctacacaggactgaagtgtggaattcgcatggtcaacatgaaaagtaaggaacctgccgtgggatctagattcttctctagaattagtagttggagaaattcaacagtgactggacatccatggcaggtcagtgcaacaaaggcattgatttcttaatgagaaaacagtgaaatatttcctttgtttcgaaagcaagaatgcacgttgatatgtagtttttctcctgaacccctctagctctctaccaaaaagtttacttcgtaggaactatcttactatccaatttatgtcggtattttaagaatattatgtcagattagaaaagttgatctccagtgtttccgatggagatacatatgtggggagacatattagctgcatttgtaactttcttcttgggtaggtctccctaaaatcagatgagcaccacttctgtggaggaagcttgattcaagaagatcgggttgttacagcagcacactgcctggacagcctcagtgagtaagttgtggatttccattacttgtcaggccttgattcctggctatgcgactggcagatttgttgctctaaatagcaggttcattctcagtccctttcttacttttgcctcccagtgtacccacccactgatcttcctgattcccagaaatgtgtgtctgtcccaagattcccagtgcttcctgttctactgaattaaacaatcccagacatcatctataatttatggatttagtgcttgggtagaggtggtggttacttactgtaataaagcattaacaagaaatgttaaatggatgctccaaagttttaatcatctgggtttaaatcattaggagggaaaaaactgcagaaattacaaatatttgaccagattaaaagagggtactaataagagaaaagaaggaacagttctagaaaaaaacttctgtatcctgttacaaatggcattgcatgtgtgaactatggtttgtatatcaaagaagaaaaggatgcaatatttaaatacttgactcagaaaaatggaaacatgactgaaaactacgattttttctagattaaaaaaaatatgaccattggtaatactcaataataaggaaaaccttcttcaaagactcagggatgcttaaagatacattaatcacttttcatttaattacatcaaaccaagaagacttgcgtaggggaaacaactacttatgaaacatttttctttggttttaggaagcagctgaagaatataactgtgacttctggggagtacagcctctttcagaaggataagcaagaacagaatattcctgtctcaaaaattattacccatcctgaatacaacagcygtgaatatatgagtcctgatattgcactgctgtatctaaaacacaaagtcaagtttggtgagtatggagagttagaatattaamaatgcagtggaggaaaactgctaattatgtacaagttaactttaatgtctgtgtggctgtctagtaatagaatagctaagctttgtttctttttaaaataattttgttcggtctrtaacctattgagaaaatactgtataggctacatgtcccagccacaaattatttatgcttaacctaacaatcaacattttttccctttcatttatttccattgatacatattagaagtacatattttcagggtacatgtgataatttgatacattcatataatcaaatcagggtaattaggatatctattaccttaaatatttatctttttgtatatgctaggaacacttgaattatttctctgatctatcaaacatcaggtcttacctcttctaagtgtatatttgtatccgttaatcaaccccacttcatcctcccctcctccctaccctttcctgcctctcatagccacaggtttaccctctatcttcatgagattcagcattttagctcacacatgagggagaatatgtgatatttgtttttctctgcttggcttatttcacttaatatccatgttcagtttcatctgtgttgttacaaatgacaagatttcattctttttgtggctgaataatagtccgttgtgtatatatactacattttcttcattcattcattgatgaacaacttaagtccatattttggccaactggtattttaaggactcctgtgtcttggctgggctacattctaactacctacctatattcatctctaacaaaaaagctcgaaacatttgaaaatattttcagagacttctttctgtcattactgtgaacaagatctccaacactctctcaacgcaggtaatataaacattctgggtaaaatactaaaagcccccttttttttaaatgcaagaaaaggaagtgttaagtggccaaaaacaaagcacaagtccagagtagttagccaggccactgcccttaagggatcaaattgatctttaagatcctagagattgacctggccatgagaggagctgtaaagaacctggaactttctgaaaggtgatgctttgaaagatagggagagggagttgtgtgtgttatgctacataaagtgagggaataaggacacttacttgtctcaaccttggctctagacagagggttctcagaagaatctgtaatcatgagccaggcctcactcaggtttgatgctggaattgacatcacctgtgtggcacaaaaaactccaaggcaaaattttaaagtggttccaggtgagtaatcagcctctggcaaaagcaaaataaattctctgagagaatgaaatttaaatcccaggtttaatatattcccataaagttttaatgaattcgagcacagaaacatgcagagaaatttgccatcaaagagagtctgaagaattaacaatcagaatcagaccttcaaaggttacaaatttcaagatagagaatagaaaattagtatattaaagtttaaagcagtgaaagttactgaaaatgattgaaccacaagaaactattagatggaagggaaatttgaaaataagccagtaaaacatgaaaatataaaaatgtaattggaattagaaactcaatagaatatttatctaccaggttagattaggtgtatggaactagacaatctgaaataattacccggagaagacagtgacgataagagacagagaagatagagtgtagtaaacatccaatttgaagtttagaaagagtatggatattggtagagagagactgtaattcaagagaaagtggctgaggattgatcataattgatatccaaatctttagatttaaaaagcttagtaactccaactatgatacaaaaaataattatatatctagacatgtgctgaaaatgtagcacactaaaagaatggatcccaaaagaatctagaaggaaaaagacacattaccaaaaacggaatgttattgacttctcaacagcagtaagtgaatgtcagaagacagtaggcgatcaaaatactgagaataactcgaagtgtatataagaggaaactattgccccattttttctttcctttacagaaaacatctattaaaagccatctatrctagttatgtcaatttcgtttcctcaattctcatagctgggtgtattaggttaagatgtctgttccacatttaagtggatcagactttctctccactgttccataaatttggtcttgtcacagtcactaatgacctctatgttgctaaattcaaagtaacttcgcaattcccatctttctgggtaagagtttttagcagaattgctcatatgttcttggaaatattttcttcacttgaattccgggaatccattagttattctcctaccctattgtaccctttcttagtcttctatgatgattcttcctcttctccttgacttcatattgttggagtgccccaggctcagccctggacatcttattctctagttgtgctcattctctttgtgacctcatccaggatcaataatttaaacatctaaatctaaaaaactctggattcatccttgattcttctcttggacactgtacatccaatgagtcagaaaatcctgttggcttctgcttcactcacttcacacttttgccatcttgttccaggcaatactaccatcatgtcttgcctgggttaattttaatggtctctgaaattttctcaagctgcttcttctgtcttcctaatgtttgttattaacccagtggccagaatagtactttttaatacgtaaatcaggttatgtcaccctattcaaaccacttcaatggttctccactacatttagatgaaaatcaatgtcattattatctgacataccctcttttctagtcctatatctaacctctgatttgtttatttttttttttatgaaacttacttaatctgctccagtcatcctggcctcccactgtcccctaaacatatatgcatgatcctgcagcaaggattgtttcttcatcaaatgacttccacccagataactacatgattcctttcctcagcttcaagactttgctcagatgtcacctgctcaatgagactttccatgaccatcatatttaaaatgacatcttccatgccattctccctaatctccagacttatctcctttatcctattatttttccatagcatgtatttaccactgaacaatgtattatatttgctgtttgtttcttctcctctcacccaacacacaaacacaaatatatacactcatgaggttctaccaagacagagatatttttctttctgttcattcgttgagatctaaaagagtgcttgccacgtgataatttgatcatcttgttctactgtcttctaacattcgcttactgctgttgagaaatcaagaacattccatttttggtaatatgtttttttccttctagatttttttgagatccattctttgtttttagtgtgctacattttcagcaatgtctagatacaaaattattttttgcatcatagttggagttactgggcttttttctaaagatttggatatcaattgtgatcagtcctcagccactttctcttgaattacagtctcttcccaccattatccatattttttctaagcttcccaggttctttacagctcctctcatggccagttaaatttctaggatcttaaagatcaattcaatctctcaaaggcagtggcctggctaattcctctggatttgtgttcaataactgtcaagtgaaaaactaccctttcaaaacacaggcatagtctaaaatgttagtacattagggggctcgtggtgtgcggaacaattggccttatgtttatccttgttttactttttctgcatttctcaaaatttctataaatacaaaacggttttatatggaggggccaaaacttaaaatatgtcaccattacatttaggaagaaagtgtagaagccatgaaatcaagagatttcacttttccaaatatattcaacatggcgtatttatccatgaacctcatgcctttgttgttttctcaggaaatgctgttcagccaatctgtcttcctgacagcgatgataaagttgaaccaggaattctttgcttatccagtggatggggcaagatttccaaaagtaagagacaccaaaatgacttaatacttcttccagctctctgtatgtccaggggaagcagaaataattttgttgaccatgagtagtacatttatcattttttataactaatttctgacacaacgaagatttctggtagtcctcagcattgaaaggcttatacttttaaaaaggctattcatatcactcctgctgctgccaatttggtatggcagataaaggaagctggatagagctgtgacagatgaggaggaataaggcaaaaggatgatcaggaaatagcarcaatagttaagcttctttgtctttaatattgtgacttttttgaaaagtcagactcrgaaacaaaaagtagaagggtgattacctggaatttgagaatgagagaaacgggaagatgtggttcaaagggtgtaaatgtggaattgtatgacaagtaagttctggaaatccaatatactgcatgggaactatagttaatatattgaatacttgaaatttgccaagagagtaaatgttaagtattctcactacaaaaaagttaactctgtggggtgatgtaatgttaattaccatgattatggtaatcattttgcaatgtatacatrtattaaaacatcactttgtactccttgaataaatacaatttttatttgtcaactatacctaaagcttgacaacaatacattgtgattttttattttataaakaattttaggcagggcgcagtggctcacgcctgtaatcttagcactttgggaggccaaggcaggaagatgggagcccagcagttccagaccagcctggataacataggaagaccttgtctccacaaaaataaataaataaataaataaaaaataaaaaattagcaaatcacggtggcatgcctgtagtcccagctacttgggaaactgaggtgggagaatcacttgctcccaggaggttgaggctacagtgagccttgattgtaccattgcactccagcctgagtgacagagggacaccttgtctyaaaaaaatcatttttataaaacattgccatattgaccaaagttttcctcttttggggaaacatttaagcatttgtttagagcagccayaattgtacaattgcctatgttaccttaaaaatctgctgaattttcaaaaaatgtcctctgccacatatctgatttttagaagtgaatatgattcacacctaaaaacaattacttctacatgtggttaaaaatctgtttgaaatagttccaaacttgtagacttcccattaatttgtttccatgaggatattgtgtgctaacttatctgtcctctctctacagcatcagaatattcaaatgtcctacaagaaatggaacttcccatcatggatgacagagcgtgtaatactgtgctcaagagcatgaacctccctcccctgggaaggaccatgctgtgtgctggcttccctgatkggggaatggacgcctgccaggtacaaaagtrtaaaccagcctagctgttcagtaacatgtgggtgaaagtagattctgcctttccccaaaagaagctcatgtttcttctattactgtgtcaaaattctttttcccttcatcttttcctctgatttctactgaaaaagtgtacttgacctgagcagaaagaattatttcctgtctccacgtccattcctacccctacacttcttttatttcggtgggttggcaaaaggggttagtttcaacgtgtgcaacctaatggaatcaagcaagatgaccactttcacaatcttattaggyctagctatgaattcttcatttcacatattgttaagcattgtggattttttttcctttggtgcagaatatgtttgcacaaagtttgactgaagatacatagctttagtcactgttgtgtaagagatattgggaatracyacaatctcccaagactgacacaacttcacaatgaataccaatcttcacaagatatttagagaggacaaggaraccaatttgtgaaacacatgagttttaagttttagataggtcttycaagtaaattttctcctcttttaaggtggagcagtaaggagtcattattcttggccaaaaaaagcagcttgaaaatgtgagggaagctctcygaaattatctgttggaaggatttttgagtttttcttcgaggmgatgacaggagtttgggagggaggagattgaaacgtacacttatsccrctttctaaattggaaaacagataggctaaaggtgctttttcctatctgcattcattacaggcaatccttttttggatgaagccctctacaccttttgagaagagtttaatctgacacaatgttgtctgaaacatagtcttaaagcagcatagattctggaatgttattgaagatgcaatcctaaaatcttgggttctttattctgtagcataagagccaatgtggtcctttcctttctttttttttttttttttttttttgagatggagtctcactctgttgcccagactggagtgtgcaatggcgcaatcttggctcacggcaacctctgcctcccaggttcaagcaattctcctgcctcagcctcctgagtagttgggattataggcacccaccaccatgcccagctaatttttttgtatttttaatagagacrgggtttcaccatgttggtcaggctggtctcgaactcgtgacctcaggtgatacaccagccccgcctcccaaagtgctgggattacaggtgtgaaccatgtgccctgcccaggctttctgtttttaaagctttgaggccttgaactatcttgagggrtctattcactgatgctccataggwttggaagatgacctagtctttcctagcaattccaggtgacaagctatagtagaaacatctatctgtaactacctcccttccaacgatttttagaatgtacatggtagtttaaaaaaaaaagaggaggaagakaaattgttaacctgacaagattgcagccaatagktataaagagattttatcttcatgaaaagattttgccttgaaactaatgataaggacacaagaaaatggataaacaaaaagctgatggacgatgactagtggacttctttgcctctacctcttttcactttgtgatgagtgctgatgtttacagaaatgatgaaatattttacactgtggctattttcaaattttctctttttttgtaccatgaaagggggactctggaggaccactggtttgtagaagaggtggtggaatctggattcttgctgggataacttcctgggtagctggttgtgctggaggttcagttcccgtaagaaacaaccatgtgaaggcatcacttggcattttctccaaagtgtctgagttgatggattttatcactcaaaacctgttcacaggtaggtgaattctttcttcctcatctcatcctaactcaagggtagttactctgctatgttgcgatattatcagaactaagctttagaacaaagcaagaatgaggctggttttaaattcttagtccagtgtagatacttgtctctgaaaccctgagtacagaaatctgtcaatataacttgaacaaaccaaatccctgtataaaattttcatgagatgcctttttgcatttacgagattttattaatagaccttgagaatagactcatcaggggattctttcttcattttttcagttggcatgatttttctctgtactacttaagaataccaaaaataaatcactcatctcccactttgcctgttcaaccttgttaacttccttggcaacagtgaaaaaatgagggaggccttggagagttaatttggctctgtgacactaaaatctagattaggaaaatgtgggcctggagataccaaacctgtcgtctgcagaatgaaagaagcctgagagaacacagctttcaggaacaagcagttgaatgcagaaaccacacattttttaaaatgacaagacccagagccccagaacatagtgctctctccatcctccatcgctttctcatggcagtccaagggcagccacctgacagggcttttagaagtggtgctgtggatcctaccacaggccagcacttcctcagactgccacagactctcctttggtcttagatgtaaaaggcctcttcactgctccactgcaggggagcagttctcttctggtagcaattgtgttccattttgatcacctggaagggaaagttgacaaggtttaaaagccctgaacaaatgtaaatggtaacaatgagattttacaagagcaatgaaatcagacattaatggttcatttcagtgaaatgaacaccagaacatgataagtgatttatttaaataatgcttccttaggataatcttctaagcttctcatcttctatttgcctattttttctagttcatcttcccctatctctttccagaactggctatgctttggaaatagggttaaattgagttttcttaactcttaaaaatcagagaattgaatatttcacatcttatttttaaaaccacactaaccagcaaatcaaatcaattcctgcttccacgtagtcctttagccttttttaaaagacatagkgggttactgactctgagaaaagattccctctgcattgattttagtagaagttataattcttcatattcttttaacttcacattgttaaaaatgttttatttaaatgattattattgggaaaggcactaactccttataccttttacaggtttggatcggggccaacccctctcaaaagtgggctcaaggtatataacaaaggccctgagttctgtccaagaagtgaatggaagccagagaggaragggtatgtgtggttctaattagagaaggaagctgacttgaagaaagtcatcagaggaaagcaaacaggaggattgtaccatattcacaatctgagttttatttaaatttttgaatgtaaactttaaaagccctgctcatattcatacataggctccaacatttaaaacctgaccctggcatctaaaacttttgagtgaatgagggagactttccatgccattgctaaaagctgtatccatttatttatttatttatttatttatttatttatttattttattttattttattttatttattttgagatggagtctcactctgtcatccaggctggagtgcggtggcaagcagtctctgctcactgcaacctctgcctcctgggttcaagcgattctcctgccttagcctcccaagtagctaggactacaggcaccccccaccacacccagctaattttttttttctttttgagacagagtctcatgctgtgtcccccaggctggagtgcagtggcacaatctcggctcactgcaacctccgccttccgggttaacgccattctcctgcctcagcctcccgagtagctgggtacaggcaggcacatgccaccacgcccggctaattttttgcatttttagtagagacgtgttttcaccgtgttagccaggatggtctcgatctcctgacctcgtaatccgcccgcctcggcctcccaaagtgctggtattacaggagtgagccactgtgcccggcaatttttgtatttttagtagagacaggatttcaccatgttggccaggctggtctcgaactcctgacctcagatgatccacccgcctcggcctcccaaagtgctggtgctgggattacaggcgtgaaccactgcacccagcttatttgacatcytttttttttttttttttttttttaaagactgggtcttgttctccacccaggctggagtgcagtggcatgcactctgcctcctgggttcaagcaattctcctgcctcagtctcctgagtaggactacaggcatggaccaccacacctgactaatgttggccaggcttggtctcaaactcccgacctcaagtgatgcaaccgcctcagcttctcaaattgtacgttagcatctttatacaaaggtatttaaccttacccaagacagcctaraaagagatgggaaagttggataaatgttaaatctgaagaagtgtttttaaaagttttgattttgattcaaattatggtgaattcagaaatgtttttaaagtctgtttgcaaatacaatgtctaaatcatagcttctaaaaatatttgcattcccataaatatcgatgaaatgactaatataaatcgtacagcttcagactggcctctgtatcattttgaaatgttgtctatgggtgaggcaaatgatcggctttttcccatgtttttgaagattgtaaacctcaggggacagtgttatttggagaaagtgggaagatttgttacccccattccaaaggagactactattctcataattggtatgtatactacataggaatgatttctggggcttttcctcccacaaaatggggcagtttaaaacactctacttcagcaatttttttttgagacaaggtctccctaygttgcccaggctgggctcaaactcctgggctcaagggatcttcccaccccagcgtactaagtagtagggattacacgggcatgccaccacaacttggcttattttggcatttttatctggtatctccagttctaatataaaagtatctatttcatctgatattttttgattggtgaatatttactcactcatgtaaatcatcaacctgaatagttattaaactaaagtttacytgaacggatgtrttcaaatacttaatactaacagcgtctggtaatgagattgctgtgggatttagtgattaattctgtcacatttatttctatgatcatggtaatactttgcttagcatcacctasaagatggaaaatagttcatgtcctataagcttyagtctcwttttacgaattttctacataccctgtcctctgaaatatatctaaatgtagctaaaaatatctttaagctttagaaaatctttctgcaagtatctcattttcttaagtgatctaaattcatttttaaaatcgtactgagacttgaatagtgtactacaaagataacagttctacaagtttataatctggtagaaagagctagacaaaartaactatactacaagaggaaataagctttataatccayaccatccaagaaagtgcacactataaaagatagagactaattctctttggtgtggtttttaaggtatgtgtggagtggttagaagtgtggggagagatataaatgttatagtggaaaagatggcattgaaatgaggcgttgaaggatagttatgattttatagctcatgaggtctttggtagctctaatactgaagatttcaacagatggagaggcaggaagaggtcattctatgccaagggaattagrtataagcaatgtcaaggaggtggggaagattggggttttttgggttttgaktatcccactgtgactggacaacaatgtgaatgggaactggggtagcagtggatgatgagaatagaaaggatgatcgggacttaattgcagaggaccttgagttccatgcagagagattagaccttatgctacaaccaatgggtatgctaaaactaaaatgatggaaagattataactttcaaaactaatgtaaaatgaatataaatatttatttcaagtacagatagaaaagatgtggcttaatttcagctcataatttaaaacgcttaatggtctaaactgactttgtctcaggcaaacttgtgatgatagaatgccaataaagcttttgccacctttgcttaagctgttagaaggatatttagaacaagagtttaagaaactcctttattagagtctcagggacctctaggacctctagggtacaatgtttagacagggagattgataagccagaatttgtctgaaggaaaatgaccaagatgggaaaaattcagaacaatgttttgagaggtatggttataggaaccataatattttttgatccaaagaagactgaagaggaggagggaagtgtcttgatttatcttagaggctactaaagaaacagagttagacttgttctgaataattgcagagctgaaaactaagaccactgggtagaagttagaaggcagagttcaattcaatattaagtcatttcttgtttgaatgatttctgaaattaactagcctgcttcaggaagtaatcaatgctcttgataagtggatatttgagcaaagtatttgtatattgggtaagagacatgcagatggcagcctacttaccctcaaacacagtgacccaacttagacagttaagcatttcagagatctctgcaagaaaaagtttcaagagaagaagggttattttagaagtaaaaatcagatcaaatgccatcgcatatagaaactcaaacttcttgaactgagcagaactgtaggatcagaagccacattcatagtgggttaagtgactgttgaaaatttagtatcccaaataatcaacaaatttctattgaaccctcaggatgtgtaagacactgtcttaggtgctagagatacagcagtgaatgaaacacacaaaaatgtttgcctttgtggggcaagttagaaggtggaaatgggataatttttaaagattacatataatagtagaaggtagtaaatgctatatcaaaaaataaggcaagaaaggggggtggagaatgaaagtatacaatatcagagagggtggttagggaagaccacgttataaagatgatacttgaaaaaaaggacttggataaagcaagggagggaattatatgatcattttggaaaggaacattaaggcagaaggaatggtatgtgtgagacaagaatacacttggtatatttggggaatagcaaattgaccagagagccagagttgagtggctggagaggggcaatgtggccaaattctttaggacttgcggggcatgaaaagaactttggattttaccgtaaaggagctagagagccattggaggattttgaatgaggaagatcatgatctgacacatttttaaaagatcacttttattactgggttgcagatagactgtaggcaggcaagaccacaagctggragaccaactactgcaatagtccaggtaaaagatgatgcagtcatccaggtaaaagtctagctttgaccacatttgtagaggtggtgaagagtggtagggccgtaggatttgctgatgagttgacagtttgggttttgagggagaatgagatccccatatgagtaacctaacagtttttaacctgagctattggaagaatagaactgttgtctgagatggaaacattggggtggtggcttttagacagtagggtcaagagaggcactttgttttgataaagtagactcaactgtgcttatggacagagagagagtgagagtcaacagtcataggaaacacatagaaatgtgaagtaagctttctgagaacacaacaaataaagaaggtttggcattgaaaagagggcagaataattccttttctgggaaagcaacaaagaaggtaatctgtaggaaagttgaaggaatttacactggatgtcttagttatcacatgagattttaattgcttcaactttagtagatgaagtagagataaaatagttaagatataaatagtttatagggactaaagtaaggagtcaaccagagattaataasactttcagtagcagtaaaacccaatgastattagcatctatttgtactatatttcaataaatcaagacaaaaaaattcattgtaaaatactgcttcaataggagaaaacaaaattcctaagataggttcatataaggctgagtcaccaaacactgtctttagcgtaaggctaaacaaagtgtaaacccacccacatggaaagttacatgcctcaaccttggcagtagatgtagggagaggtaaaaaattatttgagaatttgaactacaggttaatactcgtgcagatctaccatctaaattcacacctcaagtataggycaaaacatgtcaagcagaaaattcggcactgtgaagttgacagtgagcaacatgactgacagaagtgtatacagattctgccaggaagaactctttcaattcaggtctacagaaatcgtaagattcctttgtaagatgcattctaattttagaatgtgcaaatgtgaaaaaattgtgytttagaaacgagtatagggccaatttgyacagtcagtgacttcttcagcatgctgagtagccttagatagtgaaagggttttgtgaattccaactggagctaactaggaaatyataagggagacagagataatataaagaaggaggagagagttacacagtccctccaagcctctctgtattctggtaggtggtarctggattctcagaaatgacagataccacccaggttgccctccttcctttcatatccatgagagacattgcatttctcagagcctagatcagtgcctggcacataataaatgctccatagattatttgaattaatagatcaatggttagtttggggacccctctctcacttagcttgaccagacttcaaaatcctcttaaaacagcaatcactaataataaatcaaagttggcatagatttgaaacctmtttttcatctttcagctagagattttgaggacgaaaataattagatgatggaacaatttgagaaagtactggcctttgaagtcataaagcctaaactacagttccacttatacaagagatgtgatgaatcttttgttatcaatgccaattttcccatttggaaatgggtaatttctctcctgcctacctcagagagatgtaattaatctcaaaaaggatgatggatgtggagtgcttttttccattgaagtgcttagcaagtgaactttataatattttagacagcttatatttacatctatattcaggatgatggacttgaatagaaaaacactaaagagtttccggctgggcatggtggctcacacctgtaatcccagcactttgggaagctgaggtgggcaggtcatgaggtcaggagttcaagaccagcctggccaatatggtgaaaccctgtctctactaaaaatacataarttagctgggcatggtggtgcatgcctgcagtcccagctacttgggaggctgaggcagaagaatcgcttgaacctgggaggtgtaggttgcagtgagctgagattgcgccactgcactccagcctgggtgacagagtgagactcagtctcaaaaaaaaaaaaaaaaaagaaaaaaaagagttgccaattaagatgtccggttaaaaaaaaaattattagtgtttgctttttggaaactgggcataaaatacttgactaattccgaaagtccttaatatttgtaaagggtagtgaggctgttaataggtctaaggtaaagactgctgaattttggaaagagttaattccaacatgttagattctaggtaagattgctttgcattcaggtgaaggtgagacatggaagaagctaggatttatggcccactaggatttattttcttgaataataaatttatgtatgaaaatgaaggtaagggattatgtgtcaaattacataagactactatctcaagttgagatatgcttttaaaaatgttagcaaaaagtcacagctgaccttactgggagttagagagatgacattttaacccagagactgtgacttaggatgaccttggaatatgtggctgtttaaggttagcataygctgtatggtccattcataattcatgagaaccataattcaacctctgggtgaatagtatgaattttaattaggtgaataactcacatgaatcttaggtttcttcaatttatacatcaaaattctagcattttataactaaatgaaatttaaggggtggtttctggtcattctccaattaatactcatctatttgtcagataaatgttattaatttgagcacgaatttttctcacaatgttctattgccttttatcttctcgtattctataaaattgtatggttgttgagttgtgagctaaagcacaggtattagattttatttagcaaatctgactcttccatttattacattttcttcaccttcccctaccccagcttatatgtttggaaaataatggtaccagaagataaaataatcctgataaaatttacaagtttagacatggaaaagcaagttggatgtgatcatgactatgtatctttacgatcaagcagtggagtgctttttagtaagtatgttacatttgtttttatttgtcattttagagtatctgaaagaccaaagagatgctaaaggatctaaaataaaatttctggctgctctgcctatggagtagccattatttattcctttactttcctaataaacttgctttcactttactcaaaaaaacaaaaataaaaaaataaaatttcttttattctaccaagggcaatgatcttatcttacagacttttcccttctagaagggttaaggggagggagtaagagtggagacagtgatcaacacactgaccattcttttcagtgtttttctaagttaggaaccagatcccacattcctttctcaagttcactaacagtattgaatgcaattgatgtcacagttgtcagaaaacttccttttgaggcagttttttttattatttttatcacaaaagtgggtacatgtttaccaaatttggtaaatacagatgagccaaaggaagaaagtagaaaccattcataaccctgtcacctagagataatctctaccagcacttacaggtgtatctatttacacatacactttgaactttacattgtttgatgtaatttccttctcataacacaattgatcatttcatgtcattcaatttattttattgaatacctcttataagctacataaacataaccaatatatctaattttgttgaaatactctgtgttaaccatgatagaagctctccacagctggtatagacctggatctctagttctctataaggccaatggttaggacaaatgtctcttcacacatatttgacaggaagttatagacaaagtattgtactaggggttataatatttattgtctaaattatttcatgctcaggcctgctatttacacagtaattattctttcaaccaatcatttgttaaaaattaactgtatatatcatagcaggwactggacgttttttgagaaaaagcactctgcccaaataamtttgtagtttgaggtaatcaaaggtgtaaaacaaagtaggaaatgccattagaacagggaagtgctgcgctgattcaaaaaaggtagctcttatttccagtggttgtctggtagagtttatcagagagctgaattttgagttaggccctgaagaataagtagaatttggacatgtgagactggggggttgagaaggagactggaatagcaaagtcactgaagcagggaatgttgaatgatcaaaggaccattaaatagtttagtgtgtttagatcagagatctctcatggaagacgatggaaaacaaaacaaacgtgtaagtttccaccactttttagtaatgttatttcactttccttctcttcttttaaggtaaggtctgtggaaaaatattgccytcaccattgctggcagagaccagtgaggccatggttccatttgtttctgatacagaagacagtggcagtggctttgagcttaccgttactgctgtacagaagtcagaagcaggtgagtgtttcaggtatttaattccttgccattttcccttgatgtgggtggggaagaggagaaaatgtctttggccattcactttgaatttccccaatgcttccacagggtcaggttgtgggagtctggctatattggtagaagaagggacaaatcactctgccaagtatcctgatttgtatcccagtaacayaaggtgtcattggttcatttgtgctccagagaagcacattataaaggtaggcaactgaggaatcgctctacctcataaagaatagagttacgttagttaggcagaacttaattcatctggattgttaaattgccattatgactaggagcttcttttagccatttgccatttttttttactctgaaaagaaatctctgtgagtggttttgaaaactttcagtggtttaaaagtgtatccaatgaaaagtaaggctcctcatcagattcccattctacccctggaggcaaacactgataacttactagtgtccttgggaggtattttgagcatttactaaystgtgtgtgtgtgtgtgtgtgtgtgtgtgtgtgtgtkcgcgcgcgtgtgtacttatgctgcttggcaatgccttggtcactgaaaaatatctcaaagatctttccagatgagcccacagagctcttcttaataactgcataaaatattgtatgatatttcagaacacattaaaccagttccctattagcaggtgtttactgagcttccagtctttggtcatgccagccatggtgccatgaatatctgccagtgcctttggatacatgtggatatgtataattcccagaattagattcgctgggtcaaagggtttgcacatttaaacctggtagtcgttgccaaattgcccttcaaagagactgcaattatttacacttctatgtgaaggcatatgaggatgtgacaaagagcctttaaatacacagaggaaaaccctttaagcttctctcttctcttctttgaccatttccctggttatgtttccatttgcacagttgacatttgaggactttgctgtcaaatttagtccaaactgtatttatgatgctgttgtgatttacggtgattctgaagaaaagcacaagttaggtaggtagacttcaccctttaaatatgaaagtgttagacgaatcagagtagtggcaacatgggctggcttccttgggtaccagaacgtagagtgggaatgtgaatttcttgctttggaaactcagaatgccatacaactttagctttaaaacctatgagccagcaactaattcgccagtaaagtttttaatggaaatgtgcaaaatgtaaagattgtttcagactgcatgtaaggtgaaaaggcagtcgccagagaaactgcaattatttaaggtaaattttacagcttcctgctttctgtattaattccttctgttgctgatattttggtatttgtgtccaggaaaagtaaccaaaagctataatttctacgtgggtctgacaattaattttaagacttttaaaacttcaaatatacttttaatcgtgacctaacaatttactgagtttgaagatttaacttccagccctctaaccactttttcaggacctagtatctgtccctcagctggatgtttttgtgggttagaggctaggattatagattggtttggaatatttatttagacattaagggcaggttagtgagagcacaatgccataattctgcataacagtgcatgtatagtgtgaggttttcatgaaagtgacttcgagtgttacctctcttataaagtatgcttatgtcctctttggaagaaggaatacaccaacttgggtgtttttttttttaaacctacctcttcttattgtctacaaagtaataaccagttgagtttccgggcgtactggaaatcaaatgtccttattttagagctttttctgtgcaattaaaattacagcgcattgttattgtgaaactaacatttaattctcacatgagatgtaagggtgcatacaaatcaaagttggagaaaactaaagtagttgattagaaaattgggtgattattttactgtgtgttctgattttttaaaaatataactataaatcaaactttcctaaaattttttcagctaaactttgtggaatgttgaccatcacttcaatattcagttctagtaacatgacggtgatatactttaaaagtgatggtaaaaatcgtttacaaggcttcaaggcyagatttaccattttgccctcaggtgagtataaacatttgtgtaataaggacttttgtttatgcaaatggttacagggaagataatttagccatgtttacctcaatgtagtatagcaatccccttggtaagcataacaaaaatgcagatttctggatccacccctagaaacctagattctgtagatctgggatggggcccaggaatctgtgctttaggaagcacctcagttaatgctcaagaaatggcatccactggaacataaagattccacacgccacatacagaaacaatagaattaggattaaagaaggtaattcagaaatgagattgactgactctattttaccaagttagggggctttgaagaattaataggtatcctggcactctggaagataaagtacgtgctactcagacaaaaagaatatcatatgcagaaaccctcacaaaagagaatggacaacgtataagaaaactacaaataactytacatgttttgagttttggagggaataatagaaaaggcaggagtgagatcatgttgaacatgaggcattaaattataagtgccagagtgataggatagctagctaacttttgattacttgccctgtagcaggtattcactaagcatttcacatgcattatctcatttattcctccttacatacataggagttatgtgcattgctctcctctcaccagtgagggaagtgaggctttgagaagttaagtaacgttcccaaagatacacagctggcaagaggtggagtcagaacttggcctctctgactccagagtaacctggaagattatgaatgaacttacatgcaagaaaagtactgagaaaatcattgtaaagaatttattctatacgtattgktttattatatatatagtagggatggaatatatgaaggaagacaagtccagtgttgtattagtcagggttctcttagagggacagatatatatatgtgtgtgtgtgtgtgtgtgtgtgtgtgtgtgtatgtgtgtgtgtgtttattaagtattaacttacatgatcacaaggtcccacagtaggctgtctgcaagctgaggagcaaggaaagccagtccgagtcccaaaactgaagaacttggagtccagtgttctagggcaggaagcatccagcatggaagaaagatgtaggctgggaggctaggcccatctctgtttacatgtttttctgcctgctttatgttagctggaagctgattagattgtgcccaccagattaagggtggatctgccttccccagcccactaactcaaatgttaaattcttttggcaacacccacacagacacacccaggattaatactttgtgtccctcaatccaatcaagttgacactcagtattaaccatcacaaatatgattttcaagatcctagcttgaatggcgaggtgagtggtagaagccactagatgatagagaaatgtaagaacaagactgtattgactcttaaaatcatttggttcaatttaagacatgtagatattagcttgtgggaaatccaagtggggatatctaaaagtcttaggtctaggattcaggaaagagatttagattgaagagagaaatttggaagtcatctacatgtagatgaataaaaatagagtaatgaacattaccttggcaatatcttttcaggctaaacaatgagatcctgaaaaaaagactgatattgaaaacagccatcaatgtataaggaaaaccatgagattaatatcaagaaaccaaggaaggaagaagtgcttaaaagagccagatggaacagggatattaacggatatacaagaaatcacatttctgggatctggcatctagtgtatgaatggtagtgttagtgagatctacagtagagtagttttatgatttaccagggtaagcaagtggggtcagttagtgcaacttctctaattactttcaattaatttttttttcttctacagagtctttaaacaaatttgaaccaaagttacctccccaaaacaatcctgtatctaccgtaaaagctattstgcatggtgagttggtgacatgttattactatctgtttratcttgtttcttcattaactagatgtctcttttggaagcccttatcttacattggctataactccacagtgaagaagaatgagtcttatatttaggtccataaaacgtccagagtcatatttggatttatagttagactcataaatagagggaagaacaaatgagctttaggttaggaagaaaagggtataaagcaatgttttgtcctcattcattcctctacaaacttaatatttaaaatgacttctatagtcagtgtggggcaaagagagaaaacaaaggttttttattttaaattcacactggcatcttttaatttccttatgctctaaggcatctgggtaaatactatgatccctcattgttccacatacatgtattgaatatgttcaagttgatggactggaatagaaagttgcacaaggagctattagagaagaaaatatctgcctgttgctggagggttggagaaggcttcctagagattagtgcttgggctatgggtctcatcaattcctgataagagaacagcatttagatgcctgagcaaatttgatatgtttgaggattgatacatggattcatacagtgagaacaagaactaaaacaagaagatataatgaagaaccttatgtactctgctaacaaacttgaaattttcctactagaatgtaagttccatgggggccagtatttttatcatctattctattccaccaataatatatcaccaatgtctggaacagtgcstagcaaatggcaagcactaaataaatatttgctaaatgaataaataaaattctgtaggccagtccctaaaattctggttgcctagcatagtctgggaaggcttcttaaaatcagatttttcagaggtgagttttgggartcaatattattataaagcctatctgatgtttgagaatcactactgttaactatggcaagctattggaggagtatgttctaaattactgcaaccttatgggtcattggtttcatctttactgtagatgtctgtggcatccctccatttagtccccagtggctttccagaagaatcgcaggaggggaagaagcctgcccccactgttggccatggcaggtgggtytgaggtttctaggcgattaccaatgtggaggtgccatcatcaacccagtgtggattctgaccgcagcccactgtgtgcaattgtgagtgaaactggtattttaccaacctatttagcacatgcatttgtaagtaatgcctaggacacaaggctgactactaagatcatccagactaattctagagcaagaatcttcttttagtgtttcttctgcatagccatctagctactatttaaacaatgtcagtgaaggaaaagttaatcaaatcttgactgcttatcccgtttaaatagatctcttattttgttttgcttcccaattgcagaaatccactggtctaaatgtactgtagttccaaaactaagtcaggttcttctttctatatttgaagactcctctcatgttcccctttagtttaatctttaagctaagtgctcatagttccactgttggttgttagtaattccagacgccttaccacacaagccaccttccaccagattggtttaggattgttcctttgcaaatatggatcatgtcagtggagaccacaatagaataacctaccgccttgattattgcactactggggaaataaaattttggttaagttttaaatgttcttaaattgtgaagtcttccattatatgaaataatatacataatatatttgtagtttaaagaatagatattaatgttaaatgagcatttgtattcccagcatccagtttaggaagaatctttatactcacctttcgagaccccttagaatccctcttaagaaatactatgctaaatttacaaggaaaaaaactaacaaccccatcaaaaagtgggcaaaggatatgaacagacacttctcaaaaaagacatttatgtggccaacaaatatatgaaaaaaagctcaatatcactggtcattagagaaatgcaaatcaaaaccacaatgagataccatctcacacccatcagaatggtgattattaaaaagtcaggaaacaacagatgctggagtggatgtagagaaataggaacgcttttacactgttggtgggaatgtaaattagttcaaccattgtggaagacagtgtggcgattcctcaaggacctagaaccagaaataccaattgacctagcaatcacattactgggtatatacccaaaagattataaataattctactataaagacacatgcacacatatgtttattgcagcactattcacaatagcaaagacttggaaccaactcaaacgcccatcaatgatagattggttaaagaaaatgtggcacatatataccatggaatactatgcaatcataaaaaagaatgagatcatctcctttgcagggacatggataaagctggaagccatcattctcagcgaactaacacaggaacagaaaaccaaacaatgcatgttctcactcataagtgggagttgaacaatgagaacacatggacacagggaggggaaaaacacaggggttgggagacaaggggagggagagcattaggacaaatacctaatgcatgtggggcttaaaacctagacgacaggttgataagtgcagcaaaccactgtggcagatgtatacctatataacaaacctgcagattctgcacatgtatcccagaacttaaaatttttaaaaaatcaaaagagaaaaaaatactatgmtaaatttcttaaatgctatattcataccattgcttttgggggattttaacatatatgtatccctaaagcagtatatcatttggtttttcttggttttgatctttatgtaacaattgtagtttatattcttgtgtcttacttcatctccgtaataccttgtgtagagtaagccatgtggctgtgtataactgtaatttgttttcgatccagactaaagcaatcccttgtgagtaggttctggggcattgatatttttgaaaagcttcccaaatgattctaatgtgcagagggtcaagaaccactccctgcctccctgaccccatcttgttttgagaaccagtctctctgtcacagactggaatgcagtggcatgatcatagctcactttagtcttacctgtggggctcaagggatcctcccacctcaaccttctgagcagctgggactacagatacatgccaccatgcccgacttttttttttttaagacacggggtcttgctatgttgcacagactggtcttgaactcttgaactcaagcaatcctcccaccttggcttcccaaagtgctgggattacaggcgtgacccacagtgccccactttcctgaccccttcttgatcatttccctgcttgctcccagcaggccagcctcatgggtctttctgttgctcagatgtgctgagcttgttcctgtctcaaggtcattgtagttgctgcttcagggcagctcattatgtttagttgtcaagtctcctcaggctcttcttggctgtaaacttctaagacttcccttggtcattttgaggagacctcatctgttttttttgtagaacatccctatgtccctcagtttagtttgtctgacatttttgtcaaggttttactgaggttatggatttggggaagaaagaccacagaagtagcatacyattcttattatatatcaagggttcatacagtcaacatgacttatcactgatgttaaccttgaccatctggctgagatagtgtttaccaggtttctctaatgtaaagttacatttttccccctttccatacttacttttgggaaacaagtcagtaaaggtagcccacattcaaattgttccagctttggccattgtgagctctttcagagcttgagaccagtcctttgttttctgtgtctctttgacactccctcatccttttgtaacactgcaagatactctaggtctatcatgtgtatttccttctcagttctagcaccagccatttctccaaggagccctggttcatttttttggagaatggtatgataaatcatgatctgatgctgggtatagtagttgctagtagcacattgttgatcctaggccctctcagctgacagagctagaaaatataggtatgtatactcacccatgtatataaatatatctatctgtatctacatcaagctaaacatgagttcatacaatattttcaatgctaattcagtaccacctggttctgtctaggccttctctcccttacaaaaacctatttttataagaattctatcaaagtgcattgaacgtaccatggaaaagatgcctcaagagtagccgattaatttgtgaaaattaatgtattagaaaagaaaatattagtattgagtacagagacgcagaaaaagctttggtagattcccttttcaaattacatggtctattctgaaatttatgtgatgagccatgacgccttacagcaagatacagaatataacaaacctattcttcccaagatagatattccacttgatgaatcaattgaaattaataaacagctgtaaatgcttgtgagccacttgttagtcacaaaaagaatttgtatttaatttcatttttgacttcttaatttctttaaaaatatgtattataatagtaatgcttttggggaaaaaggcagttagagaaggttatcaagcaagagcttaaactaccctctccatttctctaacacactatttttctctagaagtcatcaatattaagaatgtttcagctgtctgattttccactaatatttaaacgtacatgcatatattttatagtayttgtatatatcactttttttgcacataacattatatcttataattatagtggtatggtaaatgtctatgtgccacattttttaatacttcacagttgcctaagttatttgaccagtgaaatgtctttttaaatctaatccttgaagtgtgtggatctttacaccaggagtgtgctcataygctggtgtaacaaaaaccctatgtcctacacgtgccctgccttttagcttccctggcactggttgactccagtattaattctcaaacttcagcatactccagaatcacctggagagcttctgattctttaagtctggtgtggggcctgagaatttcctgatggtggtgttccacacttaggaaaatmtggtgttctcatcttgttaattccacacaggattttgtgctcattgggacttttatcttacttttggagaccaagctcactttgcaattatatatgtgaatcttttgtctaaaatttaaatcagctactgaaacttcagtgactttctttctgtgataaagtcaggtggctctctcttcttccatagcaataagtgacacatgctccactgttgggttgggtataagatcctaagactacaagaaatgaaattttatatgggagagggggaagaaaaggtgaagaaatccatcaattgataccttgagctatgttcctactattggaaaaatcttaagctttgtggtatcataaagtgcatgtggctttgtcgtgtttgtgcagtgttctccattaaactgaaggatatttgctgactgtacatgtaaaacatcatgagaaactgtggactacattgtcaattctaccatcattcttattacttcattgtattgtatacactctcttctatataaagatgtggagtagatttaagaagtttcttcactactaagtaattatttagagggtgactttgaaaaagtttaatccttccagtagcgtgcatggcagataataagaatgataatggctaccattatggagtcattatcatctaccaggtacttgccaagtgcttcacttgagttagctccgttaataaaggcatattgaaacacatgagtaagtcaaacccattatgcaaggaattgaaatgagcatggttatgactgtggagaaaatgcctacatgcattaagaatcttcacctttaaataaggtataytgaaaaataatttgagtaactttacttttcctgaagaaacagtgtttaaagaaatggaagaattaaatggaagaattagtctccaagtagaagtgacagtgtattggttccagtagagggactctttcctcagacactttttcagctggagatcttgatacgagaaattaatggatattgattcaaacttcttaacatcattttgaggtgtatcagaagtaggcagaacttttcacaaaatgaacacccatgtaaccaacacccagatcaagaaacaaaatactrcattactagtacccagcagccgcccttgtgcctcttccagtcatcactcccctaaaagtaatcagcattctgatttctaacgcaatagttgagttttgccaatttttaaactgataaattcctttgaactttagtttcataactctgatttaacaaaagatgacgatctgagatatgacccagtgagatcataattcggcaatgttgaacagtaaaatatagaccagaagctaccttgtcacagatataattttttaaacatattctttttttcttgcaaagatttttattatttattaaacaaatttaaratattgataaatacagtactgagataaatacagtattaagagaaacgtattttctcttccttatgatttttttgtatatattttttattatactttaagttctagggtacatgtgcamaacgtgcaggtttgttacatatgcatacatgtgccatgttggtgtgctgcacccattaactyatcatttacattaggtatatctcctaatgctatccctcccccctccccccaccccacaacagtccccggtgtgtgatcttccccttcctgtgtctaggtgttctcattattcaattcccacctacgagtgagaacatgcggtgtctggttttttgcccttgcgatagtttgctgagaatgttggtttccagcttcatccgtgtccctacaaaggacatgaactcatccttttttatggctgtgtagtattccatggtgtatgtgtgccacattttcttaatccagtctatcattgatggatgtttgggttggttccaagtcttttttaaacatattcttaacatcactgtgaaattaagctttaattattttcatttttcctcctcgacctaaaaaaagcctttggtgatatttggcaaggtttccaatgatactttatggtcaaaagaaaggggcaggatacatgatcaagagctccttttcacatagatcagaaggcatgatgtggcttccctgggagggagatcgcagaggcaatgggacaggggactgttgcctcgctgaactgagcagtgcatgttagtagagccagawgatggtagggtggtttccctccctacctgttcacctgatagtgagttcttgcaagatctgatggttcamaagtgtgyggcttcctttgctctctctcttctgctttgctrtgataagatgtgcttgcttcccctttgccttcagccatgattgtaagtttcctgaggcctccccagccatgcagaattgtaagtcaattaaacctcttcttcataaacstcttttcctcagaacgtcttcagaaagactttatagtctcagagtcctttakagcagtgtgagaacaaactaatacaaatgtgttttcatgtcaaactttcactgttcttctgtctccaggaagaataatccactctcctggactattattgctggggaccatgacagaaacctgaaggaatcaacagagcaggtgaaaaaatgtttttacaggtcattctgcctgtaatctaaatgttgtcacatgccaaggaatacctttagctaaaatatgtaattagttattaatctcctagggccctttcacacttattatttatacccacatttaaaaatgcaatttgagattacattttcacttgagaattgcaggaagtaggtcagaattgcaaatttaggcccatggacacaggttttcaaagctttatttctccagcaccacctttatccagaaggtggttcatagccccctgcaaattgtaaaccaatattgctcttttaaatttaatagaaagtcttctgcattgtttatgtatrtaagtgcagaaatttaggattattttggaccatcaacaaggaagttgctggattctttgactttcttacgttgtaatttgcttacttgccaccgatacaggtgagaagggccaaacacataatagtgcatgaagactttaacacactaagttatgactctgacattgccctaatacaactaagctytcctctggagtacaactcggtggtgaggccagtatgtctcccacacagcgcagagcctctattttcctcggrgatctgtgctgtgaccggatggggaagcatcagtgcaggtaagcatatttttgttgcataaacattaatgccagttgttatttttgaaaataggtcatgtaaatgatatcaagcagcatccgcttcagcccctcttctttctaaaagatagaaaccatgttttatttagctgtaacagatcagcaagtaaatagagaatgagctatttaaaacttttccttcagggtaacttagattataagtaggctagatgagcagtcaacaaacctttactgtaatgggccagataataatccttttaggctttgcaggtcatctggtctctatcacaactatttaagtctactgttatagcataaagcagccattggcattatgtaacagaatgggttccaacagaacttaatttataaaatttaaatttcatttaatgtgcacgtgtcatgaaatatcattctttggattttcttcaaccacctaaaaatgtacaaaccattcttatttaatggcttgtgcccgtgtttgggggtggcacagaatttatccactggctgtcatgtgctcacccctggctatggtatagaactcttaaaggcttagtaaaacagtgaaagatctgaatgggttgatatttgttttgtgcttcttataccatacaagatcattttctttgtatatttcctttctatatgtcatttatttggaatctgtgagcttgaaggaggagggaatttatatttgactgcttacagtgttgatattgacagcttactgtgctacctgaagccaaattgcactttcgtaaaaatcttcacacccaacacatgaggagcttttatcatccccattttacaaatggagaggttgtaacccaaagatttaagtaacttgctgagatcccataactaataaatatcaaattgaggatttaagatcagtgtggctcagcttataatcttaatggcttctcattacacatacaatcaaatctgaacttcttagcctagcttggaaagctctgtgtgattgggcctccccacttaacctcttccacataatttccctctatttttcttgtggttaaccttcagataccgtggcctttcttctttctcttaaacaccaagcttgctctgctttctgaagttccccattttgtgtcctcctacttggaacactcttattacaatcttgtcacagctgcctgctcattattgcattttcaaccaaaatatcacttcctttcgtggcccacattgctgcagcaggacgggcctcccatcacattccgcactacctggttttatcctctcactgcatgttaatgtagttggcatgattttatgcagtcatcttctacatctaacccactagactgagaacctcttggaggcagatctgtcttgactcctctctccccaaggctagaagcatacatggcattcagtaaatatttcttggcttaccagcttcaaagcccttgaataaatgtgcctgctctctaatacctttgacttttaccaattccatgactaccaggcaactgagaggtagtcttataaaagacgaattcattctttccagctaggagaggaaatgaatcttgatttctgggatatggtcagtaacactaagggagatggtccccaagaagaggagttttagtatattargaagaatgcaagatttagagttgaacttaggcttgatcctagttctgtcccgtaagagctgtgagatcaaattttcagaggtctggctttttcatatgtgagatcagtgtgattaacctgatctcacatatgaaaaatgttgttgtattattaggttggaataaaactctttacaaatattaagatactatataaatgtaaagtacttgttattaatattgccccaaaaggtatagggctataaaatattaaacttaaaaaaattggtcataaatctaaaatgataggatgagtcatgcaaaatacatgttaacacaggcctgcctaaggatcaaatatgaaaataaattattcagtgttatctttaattggagatgcgattaggcttcaatgacagtagatgaaraacaggattatgatttttgtttatattaggaaatcatataagmatattatttgtaagcaattatatatttatgtatataaatatataaccatatatatttataattgtataagttatatgtgacaccaattcatatcatgctgaatttttcttcctgaattcttatgcagaaatatwtgatacactaacatttaaattgaaaataagctagaaaaaaagtgtttctggttttattctcctgccagtgkcctctctttacaaaaatgccaaattggraaatgaagacatgttacatgaaacacttgtattttttaaattcagaattctacatcagctcaggccaaactgaatgacttcagctatgttggtacagagctacatctgaacttaaatacatttctaacaacactttctgcttacttcatcatcgagctctctctgaatgtttcttcattagatggtggcctagcaagtcgcctacagcagattcaagtgcatgtgttagaaagagaggtctgtgaacacacttactattctgcccatccaggagggatcacagagaagatgatctgtgctggctttgcagcatctrgagagaaagatttctgccaggtgagaggattctggttttatacaggaaggtggaaaattgccatctgctgaagagtttctatagacaggagaaaccaytgctgaaatcaccaacttgtcacgtgcttcaatatcatatccctgcatgaagaccagtggggcaacagaagtaataagttaattaatccgaatttgctgagatgtcagagagtggccggaagcagctgtacagcgacaaaggccggtgggttcatagaggagctggtgagaaggcaggaaatggcagagcttctaagcaggcctgagcaagggaagatgtgttcaggtacaaataaggctttgggaaaaggaataacaaagaaaggttctaaacttatgtgtcctacttatgacttaaaagttttattgttttaaattatcattaatctctgtactctcacttaattttccacaagttaaaataatcacaaagatgtctattgtacaagcttgatattggcaagatcataattaaccaagaaaaagacagaatatgaataaacagattgtagaatgccagctttaaccttcacaaagtcaatggaagaatgtgactttagatatacatacaacctaagacttcctaacactccgtgtgcctacctccaatccctggtttggatgtggggctacccaagtaagggaaagtttgggtccataggggagcccaaattctccagacttatcactcctgctggtctggtgtagagaggaaagaaagaatgaatcttgtttctgcagctctttgatagttttccccaccactcagtcaagaaacatgcagcaatagatttcacctccatgagggagacacaactgggcattaatctaggtggacgtccttccatgtgaaaayatgagagaggcaatgaagtcccctttaacactgaatataagtttattgtcattaacgccttccttttataatgtcaagccttgcttaaattctgtttgaattttgcatatctttatttgcattccccagaagcagaccctgagataagsattctggtacaatggtctgttttaggaatcatagatatcaccagtaggaaagggaggagatggtacagggaagggaaggcagccaatctaggatgcattattaagccatctgccatagtgagggcctaatgcttaatcctgcaggaaactcagggcagtgatgctaaatacacgtggtgaatttatccatctgaggagcgagggagctgggatatttatgtactactttcccttgagccatagtttgagggctgctgtgggaaatggctgttaatccctcagcatttccgatactttagggttgcctcctgggtgtagtggagagtggggaagaccccaggcacagagccaggacatgggctggaagatgtgaggaatacggaaagtgcactcctgctgtctgctagagtacataaatgttatctgataaaaatcacaaaagtactctgaattaatgtgttcattcttcccctcagtctattgtaggatttgagggatggcttttctttcttcaacaagaaaatcacaactaattatgttgtcttttacatatttgacagcatctaacattacaaggtgagcttattttgtgcggaaagaaaagaactagagagggtcttagaaagatccatgtcacaggtgacctaaatatcatgatctcagttggcacttatcttttcagttatatacaactgtcactttggctgcagcatgaccaaatgtactgcccatatatgggaggaaaactggaagttgagattttaataaatatggctagctttctattacaaagaacactgagttactagaagggtgactttagaaacttgctttgataaaatagtctctaatacttctatcaggtaattgatttttattctcctgtgtatacttagaggtaatagacctgataatgtgctttctcatccaggaaggtgggaataataatattggaatgcagagacatggggttttcagatacgcaacgtagtatcctgttattctttgctaactggctttcagattttttattctaagttcttttttaatttttaattttgtgggtatatagtaggcatatatatttatgggggacatgagatttygatacagggatacaaggaataatcacatcagggtaaattgggtatacacatcacttcaagcatttataatttgtgttacaaacaatccaatcatatcgttttagtgatttttaaatgcagaattaaattattattgactgtagttaccctgttgtgctatcaaatactatttttttcattctatttttttgtacccattaattattcccacttcccctatactcacccactacacttcccagcctctggtaatcatccttctatactctatccccatgagttatgttgttttgatttttagctcctacaaataaatgagaacaggtgaagtttgtctttctgtgcctggcttatttaacttcacataatgacctccagctccatacacattgttgcaaatggtaggatctcagtcttttgtatggctgagtagtactccattgtgtatatgaaccacattttctttatccattcatctgttgatggatacttaggctgcttccaaatcttggtcattgtgaatagtgttgcaatagacatgggagtgcagataacttttcaatatcttgatttcctttcttttggatgtatacctaggagtgggattgctagatcaatggtatttgtattatttttttgaggaatgtccacactattctgtatagtggttgtactaattgatattctcatcaataatgtacatgggttccctttttctccacctccctataagcatttgttattgcctgtcttttggataaaagccattttaactagggtgagatgatatctcattgtagttttgatttgcatttctctgatcaatgatgttgagcaccttttcatatacctgtttgccatttgtatgtcttcttttgagaaatatctattcagatcttttgtccatttttaaaatcagattattagattttttctatagagttatttgagctccttaaatattctggttattaatctcacatcagatgggtagtttgcagaaatttttcccattctgtgagttgtctcttggctttgtttcctttgcagtgcagaagatttttaacatgatatgatcttatgtgtccatttttgctttggttacctgwgcttgtggggtattactaaagaaatctttgtcsagtccagaatcctggaaagtttcctcaatgttgttttttattaattttatagtttgaggtcttagatttgagtctttaatccattttgatttgacttttgcaaatggtgaggaatagggaactactttcattcttctgtattaaggacatccaattttcccagcaccatttatcaaagtgactgtcctttccccaatgtatttttttttttgcacctttgtcaaaaatgagttcaatgtagatgtatggattttttttctgggttttctattctgttccattgttctatgagtctgtttttatgccagtactgtgctgttttggttactatagctttgtaatataattcgaagtcaggtaatgtgatcattccaattctgttctttttgctcaggattgcttggctgttctgagtcttttgtggttccatatacattttatgattatttttctatttctgtgaaaaatgtcattggtattttttctaacttcttttcatctacaaagtcatagatctctatcttcacagaataatatatgtcctcagccacattgatttgccttctagccttccaactgaccatatcttgccttagagcctaagcccagatatatcttttgcataaaatgttgttcctccaggtttttggaaagctggctccttctcatcctttatgcatcagctcaaatgttattgaaactgtatacacatacatgcacatgtaagcaaacatataactacctttattctttactattcactctgrrtatttcctttatagctactattagcatcttatttgtttatactctgtcttactcggtatgtctggctcacagtaggcattgaataattttttaataaaaaatattcatttgtggccaggtgcagtggctcacrcctgtaatcccagcactttgggaggccaaggcaggcggatcatgaggtcagcagatcgagaccatcctggccaacatggtgaaaccctgtctctactaaaaatacaaaaaattagccgggcttgacggtgcgcgtctgtagtcccagctactygggaggctaaggcaggaaaatcgcttgaaaccaggaggcggggcttgcagtgagccgagatcacaccactgcactccagcctgggagacagagcaagactctgtctcaccaaaaaaaaaaaaaaaaaaaaaaaaaaattcatttgtttgctgaatatttactatggactggaccatatgataggcactggcaaaaagagataaattgaacaggttccctgtatcatggaatgtttgtaattgcctgaaaaatgatgtattggctatgcattggtactgaaaaaaatcaatgatttaaaataaaacacttgactggatacatcagaccattgtccaactggaaacaactggaagagggttttaagtataattgttatgtgaaaaaattaggcccagaggaaaggttaattgttctacattacagactagcaactgtatctcttttttccctacttaaggtttcttctgttaaattcttwatataaagtagatatttcaaatatgtaccagcaatttatgtgctatcaaatatgtacacaatttatcttacaagaagacaaataaaggacttagtttggtcctaaatacatttgtgttcatccacttcctgcaaaagacctgattaaaaattggaaagcctaacctaaaacgatgaaaatcctatgtattaaggcttggtttgatacaactggtttataaaatttcaccgtaaattaggcaaacatttatttagcatgtgttagtgctggatattgtggtaggtttcctagggtacaaagttgaatcagatgcagtgcttaccctcaaatggggcacatgttgtaaatacagacataaacaagggcatgtatttggtgctgccattgattttcacattgaacctcaagagacatgtagaagatgttagtgctaattaatagataaatgtgtgtgatgtacatattttggttcccttaataacaataccactgtttgttttcttcaaaatctctttctgcttataatttgtcaatttaaacaatgcaaatattgagagaaatattcaagagagacgcttccatctacgagagcttcttagtgcttgtgggtagtatttttgccttttgaaatgtgtttcatcatgaccaaattagccatatctaagagagtacaaaaaattaactataagttaaatttccatgtgtctttccttgaattcaataattatgtaagccagatactagagcagtttaaggtagktccattaatgaacatttatcagtttggtggaagggaaagagcactgaactttggcaggtgacatggactcagattttactgctgctactacctatgtgtgtgaaatgggacaggtcacttatttctctaattgtaacttttcacatctaatatcctagtaagttaaattagtttggcccttaaagtctttgaaattgtgcaactttggtatctgcaggtaagccaaaataaaattggaatactagaattagaatgaatacattttaatagatttaagtcagcctttaacttttcttcacctcaccaccaacaccctaatttctctgtgtatgtcataactctactctttgatctgattagattgtgtcaagagtgaccagtgatagggaaaacactacatatagaggttaccacccaatgaccctaacccgatttccttaaaaaaatttaaaaaaagaaaaaaacaggcagcacatttcttgtgatggatccatctgagccactgtgcagttttctgattaaatttttgttttaaaaagatgcttgaaatcttaaatattacagttttactaattgatataatttaaagactatctccctccgatggggctgggaagatttagtaatgtaattgttttctttttatgtgaactaagctttatcttcaccctggaatcaaattaccatctgattgttcataaattttgtttccttttgcaaaacagtgaatagatagtatgtaaagayggaaattgacaaaacaaatytttraggaattaaacacattacaaatacattattggtcattcttgttctaaaaactgaaagcaggagcttcagattaaagcagttttctaawacatgttttcttggtgtttcagggagactctggtgggccactagtatgtagacatgaaaatggtccctttgtcctctatggcattgtcagctggggagctggctgtgtccagccatggaagccgggtgtatttgccagagtgatgatcttcttggactggatccaatcaaaaatcaatggtaaattgttttcaaatgttattaaaacaataacctctttctttagagtgggtttgggaacagtgagtgtggtataaattagcatgaaagagaaaaccatagagtagaatttcatttagttactaaacacactaaaatgcaagattctgcaaaataagttctcccatgtgtagagttaaactgacttttccttaggctgctttaatcctggatttgtttcttttttgtttcttttgatagtggctgctttrgtgcccactatattttgttctcaggctttcatctttatttttaacatgttctccccaaatacaggtcctgcttcacttcagacaaataataaatgcaaaaccttaaaacaacaattgccaccacccacaccttcaccagacagtgcatcttggccaggtaataaatgtttacattatcccattaatactttcagccagaatttggcaagaagcattgtctgtctagctttgctaaattttctatggaacactataacctctgtgttttccttctggttggtagttttagctgaaagtggggagagttgttattaagattgttggagatcattcctaccccaaagctagacctgttgcagatttttwaaaaaatcttgtggttgtgaaccagtgcttgaatattggagaattacatagaattattttaagmtctgaatctgaataaaagtccttctatatgcaagtatcttgcctaggtaaagaccctgggtatgagatgaccaagactagcgccagcattagtatttctcttcattcttccacagttgccactctctgtttgataaaagaggattttgatttttagtcaaaactaacagcaatggaggatttgaaatctctaatagacttgtaggaagatggaagttctattttattatcactcttggtttccaaatggtcagtctttcttttgttgcccacatcttccccaatacattcaaccccagtaaacaactagtaagagtttaaagaaaatgtaagatatagaaggtagaattgcaagagtgatgactttgagtagaagaaagaagatgagatctagtacccaaaaggaggsgatggtcttaggagcaaagtacatatcatctatagttaactgatggaaggcaggatcttgaggcaccggtgcaggtatgaggtgtttgggaatagatggagatcggagcctgtggaatttctcttctgatggcttctttttcttagcagatgaacaaaaagaagcggttgttcaagaaagtttgatttttaagagaaaaaaggatgacatatttctcgagaaaatgacatagtgaactagaaagatatagtaggattgctgggtagcataaaggccccctgagatgaatgatcataaattgagagagcaaaatgcccccagttagcttagttgtatgttttcctctggatgcactgaggtagatgcagagtaggtagagggtagacttaatcaaagtggagtatccccaagtatgtgaagggtataagggaattcagagtgtatgtgaaaaagtggttaaaatgatggatcattggaatttaggatgggtaaggagtgaaataaggatgagagatttgtttgggacaaaaataaggtaggatagataaattatgagtcccaaaaggtggaaggagtattaagggaggctgaaaagatggaaggttgtggttggagaaaatggttcctgaaaccgagattacagaaggcttggagttattgctactgatcaagtgtctaggggctgaccataaggataagtggctgaggtcaggtggaatacaagatcactggaggaaaattgaggagctgggaaacttcagtgctggaatcatcatgtatatagtgattgaattcagaaagaattatgacaggaaaagtgttggagaaaatgaccgctaaaatcttccaggaataaggagtggacccaggaccatttgtctggcaacatgagtcaaagagtcaaagctggggatacatagagttaggttaaaagtaaatctggacttgggattgagacagagagcagacttgggtccaagatcctataaactattgatttcaatggactgagttaaatgaatgaattcagtgagtgcctaaataggttaatccatgtaaggcatttataacaggaagggtctgacctgagataagggtccataaatggtggtgacagtgccatctaatgtattttttgaatgaccttattcagaccattagaaaatgaacattgttaaaatgtaaagaaaatgtttctcttttaaatatgttcagaaatggttatgcacgccaaaaactttgaaagttttatatacggaaaggtgttgctttgtttttattctatgattattttcggagacaaaatgttaggaccatgccatatttaacacccacccactcccgctactaactttttacactagggaattaatgaatcttagcaatggtttctttcaattgttactcccatttataaaaagtcttgacttgttggtaattcatggctgtatgtgatttctggtcagatttttcacagaggattcatatagagagggagaaaaactaaaaagattagaaagacaggctgaggccagactctgaaagatcttgcaagctgaactacttcagttgctttcagcaggaaaacaatttgattttttttgttttatacaccattcccagatggtagggcaaggcgagggaagattatagactgaaaaatcatttagtttactattaaatcaaaatgttaaatatctgattaggttcttgtagctgtacagataaaaaaagaggactaacaaagaaatgacagagaaccaaacaatagaatagaatcctaagtttttgtagcacttcatttcccttattctacttttcacctctactgtgaataaaagcatgtttacgtacctcctcctcaggtacagtattaatttctctagggcagagcatgcataattatgtattcactaacacatacattaaaatatgaatatagaatatttcattttttaattgcttagaaagtttttgtcaaaggaatagacataaaggaagaagagagagttaaggacgaagccctgatgaggacataagagaagctgattgctgagtcagcgggccatggaaaaactggcacccaaactgcaggaggtatcccaaaggtccaaaggtgcccttggacttagcaagctgaagaagtgagacatctcagtatatccagcaagttatctttttcatgacctcagtcacaagctcaaatgaatgtaatcatttgtcccagcaagttcagctaatttagtgaagctttgaggaacaggtcttcagctgcatctcaaaggaggaagaaaatgaaaatctgctgggtatagagaatgcaacctactgtctattttctaagaaactttaaaaattcatttaaaactgattcaaaataattgtgatttaaattctacctctataatatcatttcaagaaaataagacacattaaatagaatggttttctaacagaataatttgtaactgacagtaacraagtcttaattttctccttgcaagcctagatttttcagtcttgtgatagaatctggtttttctttgctttatttatgttggtccctggtgtctgtgtgttctgaattgcaggttgttgctctgaagcagagctagaaaagcctagaggcttttttcccacaccacggtatctactggattatagaggaagactggaatgttcttgggtgctcagagtttcascaagcagtatggcaaaatttaccattgagtatctgtcactcctggggtctcctgtgtgtcaagactcagttctaattatttatgaagaaagacacagtaagagaaagacggcaggtaatccttcctggcatataaacttcgtgctaggagtcttggtccatgtaggcagcttatgatcaggaatgagtctgacttggtaataatgttaccaaaatgttgatccatgtaataggaatgctttttcccttgtaaacacacttaacattttctttattattattattattattatgattatactttaagttctgggttacatgtgcagaacatgcaggtttgttacaaaggtatacacgtgccgtggtggtttgctgcaactataagcctgtcatctacattagttacttctcctagtgctatccctcccctagccccccaccccccaacaggccccagtgtgtgatgttcccctccctgtgtccatgtgttctcgttgttcaactcccacttatgagtgagaacatgcggtgtttggttttctgttcttgtgttagcttgctgagaattatggtttccggcttcatccatgtccctgtaaaggacataaacttatccttttttatggctgtatagtataacatggtgtatatgtgccacattttctttaaccagtctatcattgatgggcatttgggttgattccaagtgtttgctattgtgaagagtgctgcaataaacatacatgtgcatgtgtctttatagcagaatgatttataatcctttgggtatatacccaggaatgggatcgctgggtcaaaaggtatttctggttctagatccttgaggaatcgcgacactgtattctacaatggttgaacgaatttacactcctaccaacagtgtaaaagcatttctatttttccacatcctctccagcatctgttgtttcctgactttttaataatcgccattctaactggagtgagatggtatcttattgtggttttaatttgcatttctctaatgactagcgatgttgagctttttttcaaatgtttgttggccacataaatgtcttcttttgagaaatgtctgttcatatcctttgcccactttttgatgggattatttatttttttcttgtgaatttgtttaagttccttgtagattctggatattagccctttgtcagatgggtagattgcaaaaattttctcccattctgtaggttgcctgttcactctgatgagtttcttttgctgtacggaagctctttagtttaattagatcctatttgtcaattttgacttttgttgccattgcttttggtgtttcagtcatgaagtctttgcccatgcctatgttctgaatggtattgcctaggttttcttctagggtttttagggttttaggtcttacgtttaagtctttaatccatcttgcgttaatttttgtataagatgtaaggaggaaggggtccagtttcagttttctgcatatggctagccagttttcccagcaccatttattaaatagggaatcctttcctcattgcttgtttttgtcaggtttgtcaaagatcagatggttgtagatgtgtggcattatttctgaggcctctgttctcttccattggtctatatatctgttttggtaccagtaccatgctgttttggttactgtagccttgcagtatagtttgaaatcaggtagtgtgatgcctccagctttgttccttttgcttaggattgtcttggctatacaggcttatttttcaaaagcatttctatacaccaatataacagccaaatcatgagtgaactcccattcacaattgctataaagataataaaatacctaggaatacaagttacaagggatgtgaaggacctcttcaaggagaactacaaaccactgctcaaggaaatgagagaggacacaaacaagtggaaaaacattccatggtcatggatagaaagcaacaatattgtgaaaatggccatactgcccaaagtaatttatagattcaatgctatccccatcaagctaccatcggctttcttcacagaattagaaaaaaaaaatccttaacattttcaagtactttgaattgagaaagcgaatatacttaaggttgagtgtgtgtgtgtgtgtgtgtgtgtgtgtgtgtgtgtgtgtgtgkagggaggggggaaaaaaggcaagagggctcaacttcttcaaacatagtggaaccatgccagaatgctggaagaatatatattgtaaaagagcaagtcagaagatggttaaaaatagagcaggggaggaaggtgaatgaaaaaataaagcaaaatacattaaaggcttttaaagtggcaggattgaaaagatttggtgaaaacatgccagccctcatttttaatttcatgtacagagaaacctctttttgttcaacagaacaaacttgcttcctcctgtttsmacaggtgtaatgaaagctttttggcttgcagtaaggagggatgtgggaggtgattgaaataatttggttaatggggaaatctggaaagaaaataaatttgtgtatgtcattgtccatgtgtgtggtatatatttatgcttgattctgaagtgcatagaggtcagagaaactgctctgagggtggggttgtttycttaggataaactctgagagattaaatcactgggttagaaagcaaaaatgtttgcttaaagaatctttctttatgattacaacctaatttagactacagtgacacaattaattagcctaactgcttggcacattttccccctagaatcagatcacctcctccatcccctttgattacaactgctccagggcttcttgcagctagaataaaattcacactccctggaagactgcctctccatcagctcatgggttcccaatacctctcattcttacctcggggccattgtctattcccagcactttgaagagctccttctcatccttgtgcctcatgtccttcaattcttgatggaatgtcaccttcttaatgagaccaaccttgactgatgtaagttgtatcacgcccctgcctccagacttctcagttcccttttcttagagcacttattatcttctaacacatgggtccccaamccccgggccgcagaccactaccaactcatggcctgttaggaactaggccacacagcaggaggtgaacaactggcaagcattaccacctgagctctgcctcttgttagatcagtggcagcattagattctcataggaatgtgaattgcacatgccaaggatctaggatgcctgctccttatgataatctagtgcctgatgatctgagatggaacagttttcatcccaaaaccatccctcccactgtttgtggaaaaattgtctcccacgaagccaggtgccaaaaagtttgaagtccagggttaaaagattagaatctaacacattatgattttttcatgattatggcttatctgtggcttccctattgagtatgagtttcatgagagctggaatttttgcctgtttgtatcaagaagcctcagtgcctagaacagtgcccaacacatagaaggcacttcacaaataaatgaacaagagaatagtcacctcctgaaagagggcctctcagtctaaagcagcatcatccattccttcccacagtcattgtctattacattggctttcatttcattagtagctttgatctctctatgaaaccatcttcatttacctgactaaaatgaaagcagcakcatccattccttcccacagtcattgtctgttacattggctttcatttcatcagtaactttgacctctctatgaaaccatcttcatttacctgactaaaatgaaagcttcatgagagcagagacctttctctctgttcccttctgtatacttccaaatgaggtcaacacctagggactcggaccgttttctttttcrtgaatttttgctgagtttgttttttgcatgaagttaaattactcttcagaaaggctaacttaattttcactgccattagcagtgcctaggatcttctttcaccatgcccagaacctaatatgtcaatttaataggcaattttcctttaaaaataatcattaatggagataatttcttttttgcttttatttttttgtttgtttgttttaagactgtgtctccctattttgcccaggctggtctcaaactcctgggctcaaaagatcctcctagttcagcctcccaaattcctggcatgtgctactgtacccagcttgtttttttaaaactaattgccattatcttttgtccagtttttaaatttgagtattattctttttattgctttatgagctttatatacaaagatattttcctttgtcatgtttattcttaatgcttattcttaatgttgttataagtttattcttaatgctttcctttgtcatttattcctaatgcttattcttagtattgtcatttgcttttgtgttgtttattatgttaatgtaaaaattttttaatttagttgtttaaatgtatccgtacatgtctttgatctttgatttttaattcattgctttcatgcttaaaaatttattccgcattctgaggtcagaatctttaataaaaaaaaaactttaaaaatcatgctgaaatatattttctcatatggcaaagtgactctatacctgcttcctttaaaagaaaaaagtctttttcttcccaattgatagcactatttcaataatatactatattattatacagagagacacattttctggggaaacttgcctttatcattattacctattgaaaaccatgcttaacttcattgtagattacctgaggaatccctataattttccaacctagcatttctttaatttttgaaattgtcagcttgaactttgtggaattgttctgtcccttcagattatatctaggataagagcaagactgtaatagaaatattattctttacttaagttgtatagcattctttactataaaatgctatatttcttcctgttaaaggtagcaattcatttaaaagttacattcacttctatttgctacaaataaatattaggtcattcttcaaatagtatttcaccattgtatactttaaaatgccaacgaatgctttttcttcttttctctttcttggctstaatctcctccttcctttcatccctacaagtatttgtgaagaacctactatggaccacggactgagtcatcttggttctgaggattcagtagtgaaaaaaataaaattttctgcccttaccaagcttatattctagcagggagaaaacacataataagataaaatatatgctatcttaaatggaagaactaaggaagaaaaaatgaaatgggaaaggagaaaagaagtatctgggatgtcagtgccacatagttgtatgtagtacaatcagcaggtatctctctgagcaggtgacatttaaataaatgttaaaaaatgatactgaattattcttagtttagaagagtttgatcctaagaaactcacaggttctttccacacatgcttaatcagccctctgaatcattttagaattatgattataattttcccttctatctttgacttaggttctcaaagcaatcaataaaaaactgactatagggaaataataaattttcaggtaggaaatgttttccatcatagatcttcatggtgaggtatttttaataagtaggttacttttctaggagaaaaaggtcacatcagtcattttaaasataaaataatttgctacctactgtccttcaggaagcactgcaacatagtagataatgatggatattggatacatggacccaagttgaagatcctagcttcccacccggctagtttgtggcattgagtgagtcacttatgttctggagtcctgtttcatcattttacagaatggaatcaattcctacctcgtgggttaaattaattgctcggcctaaaatacagaaactgctgtcaaattttcrttcttattttttactagagttcactttttaacctaggtggattacatggaagaagactttactcaatgactttcatgagtcctggaccgctggtgagggtgacattccatgcccttgtacgaggtgcatttggtataagctatattgtcttgaaagtcctaggtatgtttggttattttataaacttgtaaaggctaaagaaatcaatattactctatttaggaatatttccaaacatatacaacattttgaaagaaattatgtttctgtggggaaatgagtatatgtttgaaaggaaaatctacttaagtcacctaagatttgatcaggtccaaaagggaaactgctcaatggataacttgattgaattgtatatgatttctgaaaatggctaagatatgttcattgcaagataacttttttctgtggttgcaattttataccacaaagaatgttttctgtagctgtaaattcttgtggctcagaagatttgggttctaaatcttagctggctgattagctctggacaatttattatctctgattagaattttcttttagtgatgtaataaaagattagagtaagttttgaaaacaaactacacaaatattagattctagtattataaatgtaaacaatgtaattcagagttgtcagattgaactttagaatatgtaattagtgagatttttttttattcttgatgtagacaactgaaagctagtttccccccttggcacctaaaagcattgctgagaatatgttattctagacctgtgtatactgtatatttggaaaaagttaattaagtaataaagcatttatatcatatgaaagttttctcttggaagaatatattaagaatactgctttcagatggaattaggcagttaacaggtattatctatagctgtgtcctataatcttccatagaccctaggctatgtcagagatcatctgagagatgtgtttgtttcctataccttttgaatatttaagacggagaaaattttcagtgaaaccaaccacctcctaataattacttgttttcccaggacaattagggaagagagctgtttaccttgatctgaaaaggcatataggaagcctgttaaaaattggttttattctcattttctctgcttcctgttcttttaggtccaaaggacagtaaaataaccagactttcccaaagttcaaacagagagcacttggtcccttgtgaggatgttcttctgaccaagccagaagggatcatgcagatcccaagaaattctcacagaactactatggggtaaggaagtcatgattattataatgsaagaagtgtgtggaaaaaattgcttgactgacatcaacacttggtacttgcttaaaacattattcttcaccttttttccaaaaagaatagactcttaggtaacccctaatctatggcttttaatatggaaacaaaacaaaacaatataagaatgtccttgtttatcaattgtactttctcaacaaaatagaccatgtattagcaaagtgaaaagtcaaatctttacaaagaatgttggaggctgatataatgtatgtaaaatatttgggtacayagtagatacttaataaatgatgtgtgggagtttggggcaaattctggcacatataggtccttcagatcttataaattttcaatcagaatttaaaacaatacacacaattggtcagccattcataatgtatgaactttataaattttggcaaattacgtattagataataaagttgatataatttaaagtacaaatctttctctctcacaaccataaggaaacagacacaaaaaataaggctcactgggggtcaataacattgatgcattaatttctgagcaaaataactaacaatatattctgtttagaaataatttctgactttgtttcatctatgccatagttgccaatggagattagtagcccctttaaatcacatcattcagcttaatattattaacttcccgatgaagccaacaacttttgtctgtcatggtcatctgcgtgtttacgaaggatttggaccaggaaaaaaattaataggtaactgatttcccatgaatctctatgctactgatttttctctgatgaaacatgtttagattgtttcatattcagtatgtggcttacatgtgacatacactagtctcttcttataggatgttgaaatagacttactgttaaacttgtgtcagatttaaaattaagatataaaatctcctcaggtttagttaaaaacaaagtccaacaacgtttcttacatggatcatacctagattaaaattgctcagaaatactaaaaataaagaatgaatgaagcagttttagacaaaaacacaagaaaattaagactataaaattaataaggcaaaataatcacagcaaaaggcattacatgagtttatcaattggtaggagttagaagcctggttactttaatttaaactcattattttctttttttttggcacaaatcgttgtttttatttaatttgggaaaaacatctttacaagttgataaatactagaattgtcaatgagaaaaatgctactgaaatacctatttttctctttgatggcagaatttcctaaatatttgcattttaacatattttatctcatactttagctgacattacttagttgtatatggatctattcttaataaaataaagagaaaaacataaagagaggaaaaggattattaaatttggtattacaattgtgtagaagtttccccatcataaaatttcttttttttatttttttttattttattattattatacttcaagttttagggtacaagtgcacaatgtgcagttagttacatatgtatacatgtgccatgctggtgtgctgcacccattaactcgtcatttagcattaggtatatctcctaaagctatccctcccccctccccccaccccacaacagtccacagagtgtgatgttccccttcctgtgtccatgtgttctcattgttcagttcccacctaagagtgagaatatgcggtgtttggttttttgttcttgagatagtttactgagaatgatgatttccaatttcatccatgtccctacaaaggacatgaactcatcattttttatggctgcataatattccatggtgtatatgtgccacattttcttgatccggtctatcattgttggacatttggcttggttccaagtctttgctattgtgaatagtgccgcaataaacatacgtgtgcatgtgtctttgtagcagcatgatttatagtcctttgggtatatacccagtaatgggatggctgggtcaaatggtatttctagttctagatccctgaggaatcgccacactgtcttccacaatggttgaactagtttacagtcccaccaacagtgtaaaagtgttcctatttctccacatcctctccagcacctgttgtttcctgactttttaatgatcgccattctgactggtgtgagatggtatctcattgtggttttgatttgcatttctctgatggccagtgacggtgagcattttttcatgtgttttttggctgcataaatgtcttcttttgagaagtgtctgttcatgtccttygcccattttttgatggggttctttgtttttttcttgtaaatttgtttgagttcattgtatattctggatattagccctttgtcagatgagtaggttgcgaaaattttctcccattttgtaggttgcctgttcaatctgatgttagtttcttttgctgtgcagaagctctttagtttaattagatcccatttgtcaattttggcttttgttgccattgcttttggtgttttagacatgaagtccttgcccatgyctatgtcctgaatggtaatgcctaggttttgttctagggttttttatggttttaggtctaacatgtaagtctttaatccatcttgaattattttttgtataaggtgtaaggaagggatccagtttcagctttctccatatggctagccagttttcccagcaccatttattaaatagggaatcctttccccattgcttgtttttgtcaggtttgtcaaagatcagatagttgtagatatgtggcgttatttctgagggctctgttctgttccattgatctatatctctgttttggtaccagtgccatgctgttttggttactgtagccttgtagtatagtttgaagtcaggtagtgtgatgcctccagctttgttcttttggcttaggattgacttggcaatgcgggttgtcaacccacaaggattttgggtggtcaaccaacatttctggacaccatgggatatatgggactttgggaattatctcaaatctttctaagactcagtttcctcatttgtgagaggaaacaccccaccaccatgcacactatggtctatgaattcccagtttacttaatcaaggataccaatgcgtaatgaagtaaaagcccagagaaagaggatgtatggctttttgctggcctttgccttcctaagaagggcccagatacaagtgtcactctccatgcaggtagggtcctctcagagtgggtaaaaaakccaattgctaaactgctgtcttttttattcttcagatttacaataccatcctagaagtaagtgcattaagaatatttgtgtttctatttaggagaatgttgatgagcactgagctttcttggttcctaagccaattcagcaccaagaagaccacagcttcttgtggggagactgcagtatctatgaaaatgatgtatacttctatctttcttgccctacagaacacctgttaccatgcactgcctcatgaggttgttttgagaattaaataagagaaggcatgttaatcaatactaagaaaccaagcttgcattttatttggattagaaatatctattatgattcctattcttaaaattgtgctgcttggaggagtttagactgtcaccctattgcctcttctatgggtgaaagggcacacaaagattggaaaaacaaagaaataaagaaggggacagagaaggaagagtacattagcaatatcaattattacttataatgttaatcaactgtatatctgttctttacttagaattaattcataaaacmtactgttttctatttccttctccccaaaagttttatgactctatttcaatttctctaaataaggtttacaagctctggggtataggaaaggtaaaaaaatatttctcttctacccatctatccagaggaacaaatcctgtgatcagaagtttagaacttatagcccaacctctgggtaggggagagggactggaaattgacttaatcagcaattgccaatgatgtgattgatcatgtctatgtaatgaagccctcataaaaccccaaaaggagagttcataaagttgggttggtgaacacacggagggtgctgggaggatggtgtacccagaaagaacattgaagctctgtgcccagtctccatatcttgccctatacatctttcattggactgttcctgaattatatcctttgtaataaataggtaaacacaagtaaagtgtttccctgaattttgtgagttgttttagtaaattatcaaacctgaggaggggatcgtgggaacctctgatttattgctgggcagtcagtagcacatgtgacaacctggacttgcaattggcatctgaagtggggagtgagagcagtcttgtgaaaccgagctcttaacctgtgcagtccgtgctaacccaaggtagataatgtcagaatggaattgaattgtaagatacccaattgttgtggagggaaaaaatcccatacatctggtgtgagaggtaaagtaccgagagtagcagtagttgtagtagagatagagatttttcctttagttggtgtagagaagtttgttttttgttttttgctttttgttttttgtttgtttgtttgtttgtttttctcagaccatcttagcttcattcgctggaactctggcaatgatactgacaaaagacatattaaaaagagaaaaactgaattttattaacacatatatcatgcatatatgggaaaattcagtggtgagtaactcaaagaggtgattagaacttgggcttatataacatcttaacaaaaagaacaataaataagagaagtgacaaaataaaggaaaaggactttgagcttctaaaggcaaaggactttgagcttctaggggtggcatattgtaggaaggtgaatatattggggacagttgtagaaaataaaagttactttagaaagatttgttatgtagattcttctggtgccatctctgggctgataagagtcgagatttgtctctaattaagaattgttctgccctcctagtggagatagtgggagggcagagagtttttcttctgtctacattttattttcaattgctttctgctgaaaataacccttgtaccaggatggtatactctcaaccacctcagggttaagtcaatgcttgacctcagcagattatttgatgaacatttgacagaaccaaataggatttatcccaagaacacaaggaaaattgaatattaaaatgtattatatattaagattttctactgtaaatgagaaaaaatagatacaaattatatagcaattgtaatcttaaaaccatagcagtaaaatgtagaagatataatggaaaaattacttcaattacatttagtaataaaagccatacaataactaggaataaccctaaaatttgagatttattattcaaactatgaaactttattaaggtgcctgtgtggcacacaaatacatacaaacacacaaagatttgcatagataaaagtaccatgttccaaaactgaaagatataactcatattaattcaacacaaattaatttaaaaatatattttccaactaaatcccaatggaattttttttttctggagggatgaagaggaaattaactccgaagtttatcttgtaaagtaaatagcactagttgaaaatctcttggggaaagaatggccaaatggttaaggtagaattgctctatcagatattaaagtatactctaaaaccatggtaattaaaactatcagaagaaacatgtgattgaaaatagattagaaggggccctagaaaatttaagaccattktatgtggttaatttggcattaccactcagaaaatgtataaaattattcttcacatcatacagtagctgataaaggagttagtttacctaaggcattaaaagtggaaaatattggtagttaaccatatggagaaggactttctcatataaaagtagtagaagaaaacaaattaataagttcctgtgtaattaaaaactcttctgcatccacagaaacaaaactaaaaagcaaatacatgggattttcaactatgctgagaaaagtctgaagtaattaatataagaagtgtttacagatcaataatagaaaagctaaaatctgtaaaataaatttatagamcctagatacctttgacttagtcttgattaaagttaaaccagaggtcctgtgccttctgttttccacttatttttcaaaagaatgacacactgttgacccaagtgcttttgagaacacaaaacacaggattaaccattagcctcttttgatagataagaaaggttactgaatatttacataccagttactayacaatctaaattaaatctcttgtttcttgtcacaatgaaattgatcctctggccatctctttactaaagagggcagagttttcctgtaatcatggaaagcatactagttcttaggatccttgatttgaaaccttgaaaactatgagtgttacagcaaactacatttactagaatgtttgtttcagaacatattgtgtatgatcagttaaacttagagatagttttgaagcaaattatcacccttatgataattcacccatgactatgaccatcttgatctacctctagttaactcgagtataaaacactgagggattttctttagaattaggggattcataatatgaaaaaattattaagtacaataaataagggtctaaccaattccatattacaattcagaatcactgttgtccatgacataccctacttttaaaaatgacaaattaagaggtgaagccagctgggcttctggattgggtggggacttggagaacttttctgtctagctaaaggattctaaacacaccagttggcgttctgtgtctagctaaaggtttgtaaatgcaccaatcagcacactgtgtctagctaaaggtttgtaaacgcaccaatgagcactctgtaaaaatgcaccaatcagcgctctgtatcgagctaaaggtttgtaaatgcaccaatcagcactctgtaaaaacggaccagtcagcactctgtaaaatggaccaatcagcaggatgtgggcggggccagataagggaataaaagctggccaccggggccagcagcagcaacccgcttgggtccctttccatgctgtggaagctttgttctttcgctcttcacaataaatcttgctgctgctcactctttgggtccgcactacctctatgagctgtaacactcaccacgagggtctgcagcttcactcctgaagtcagtgagaccacaaacccacccggaggaacaaacaactctggatgcgccacttttaagagctgtaacactcaactgtgaaggtctgcggcttcactcctgaagtcagcaagaccatgaacccaccggaaggaagaaactctggacacatctgaaggaacaaactctagacacgccatctttaagagctgtaacactcgccgcaaatgtctgcggcttcattcttgaagtcagcaagaccaagaacccactagaaggaataaattctggacacaaaatgagctgagtgagaaatttatagacaaatacataaaaaatataatatttggcctttttaaaacaaatgagaaaatttaactgctaaattgacaacaattttgaagaatgattatacttgtcaaatgttatataacatgtattttcatctcactgaggtataacttggagtatgttttctagagaaatatttttcaaaactaagttcataaagttgtactgggtgtctcaacttttagctatacttatattattaaaataagctttatgtatgtgcagagatgttaacacactagattcattcagcatttttatagtggccaaaatggaaaatagtctaaatcttagtctaaataattaacaaaaatataatataaattataaatttatgcagccattaaataaaatattgtcacataatttttaaaataaaacacctgtcatattgagtgagaaaatcaggatgaactatataattcaaatttgtttaaaaagtaaatgaaatacagttctaaaaagatcaatatgtttaattggacatctttataagattatgagtaattttttttgaaattctctaaatttttcccagtgaataaataaacatttctaattttaaggctataaatagggaaaagaaggaggaaaaatatgtcttgttctacaagctgaaatggattcatagtggagcagttacagggagcttcatgacagtattcaaaccatttagcagcctgcctcacaagaaagggaaccagatgagattacatcatcttctgaggggtgctttagaaatcttagggtagtgggaggttgaaggaaactgctattaccaataccctttttaagtcacggggcctccggggtgcggtagctcatgcctgtaatcccagcactttgggaggccgaggtgggcggatcacggggtcaggagatcaagaccatcctggctaacacagtgaaaccctgtctctactaaaaatacaaaaaattaggcgggcgcctgtagtcccagctgctcgggaggctgaggcaggagaatggcgtgaacccagaaggaggagcttgtggtgagccgagatcgcgccactgcactccagcctggacgacagagcgagactccgtctcaaaaaaaaagtggtttttaagagacaggttctcgctatgttgtctaggctcaagtgcagtgactattcatagatatgatcgtagtgtattcagccttgaactcctgggctcaagcaatcctgttcctcagcctccccagtagctgggactacaggctcacgccacgggtctggctgttctaagaaatactgtctaaaatgtttcattttgaccaactaatgggtttgacttgtgtggcaattactgcaacttgcctrttataaatttggccactgtggataaatgaaggttatatgtagctaaagctcaaatatacttgctaaaaatattatatttcagtttggtgacagcaataactttttagttccctgaggacccagtcttagaccatgtcaccttttcttacaacatatagtttttaaaagatgtacctaagttattccgacatcataagaactgggcattatgtcctagttgatttagaactactgtcttaaaactgcttagactcaggaatagggaacatccagctctctattctaattggcttttattcagttatttttcccatttttatattgatatagcagaaatttataatttcaaacataagaattttttactttgctcaataatctttgtcttgatgaatagtaaggttttttttttgttgttggggacaaggtaaattatgtgaaagagattcacttttatgaaaatctcttacgattttcacatataatgtcattttggccatgaagagttttctctgagagactctttttgtatttctggtaagtccattttttccctatttgttgtttttgttcaatttcttgtgcttcttttgttccatatgtatgtttttgttcaatttattgtgctttattgggaaaattttgttatcgaataagtaaattaatagattgtaattctttgtttcatttgtcagctttaggaaaggacaaaaatataatatttaaaattctgacttctgtaatctgtggaggcctcatgctaaacctgtatgaagtacaagattgagcagattttttttaacacctaagcatactctttatttttctggatacttggaatattgcgacaatacagtcagaaatttttatccctagcaaagaagtttcaagtagcttttctcttttggaattcacttcctgaatgtactaatatcaagaataatttgtcctttttttctttacttgtttgattagttcatatgtgttagttgtaaccagatttttgaaagatacgctttgtccgtcatcctgtggtttgagcaaaggcactaatagcattatgaaaacgggtaactattgcaaattatagaaatcggatatcatagagaaacatttgccattatatttaattctgaatatttattagaattccctcagtacttaagattaatccattcacactcatttttttttaatcagccagcaggctttgctttactgcccattttaccttttgtttcttttttttttggacatgttaattgaaatacagtttgggaggcatttccattaaaaacattttacttaattttagtatgataatgtaagaagtgttggaaaaagaaaacagaagaaatttgcatcaaatttaagttatgtaagtatatcataagggactaacataaaatagaaaaaaatctcacatttaaaccgagaattattcagaccaccaacaaattgttgtaggaatatgccaggcactattcaaagaaatgaagattgagcaatgaacaagacagtccctgccatagtagcacttacagtctagtaatggagatcgtcaataatcatataaaaatatatagtatattaagttactgtattagtccattttcatactgctatgaagaaatacctgagactgggtaatttataaagaaaaagagggttaatggactcacagttccacacagcttgagaggcctcataatcatggcggaaggtgaaagaggagtaaaggcacgtcttatgtggcagcaggcaagagagcgtgtgctggggaactgccttttataaaaccatcagatcttgtgagacttattcataatcacgagaacaacatgggaaaagcccacccccatgattcaattacctcctaccgggtccctccccagacacatgaggattatggaagctacaattcaaggtgagatttgggtgtggacacagcaaaaccatatcagttataaagaaaaaaatacagtgtgcaacaaaaatatataacagaggaagcttgtttacttcgatggaggacagggaagggaatcaaggaaaacttggatttctcttttttttagcaagactccatggaagttatttatactcmctgtctccccttttgccctctcgtttttcttgaatttatcctcatatggctttatttttttcctaccatttcatggacaytgttcttgctgaagctatcaatgacttccacaagtccagatttggtagtcccttctcagtcatgacacagacgagctctccctcctcaaatctcacttgttttggtctccaaaaaaggagagctcactggtctccttcagagtcttggctggtttttcctcattttctctatcactgtcagttgaggtatcccaggacccagtctttgactctcttcctttctttacctatactccttccttagtgatctcacccattctctagctttaaataccatctatacagtgataacttccaaatttatatatccagtcccagcttctttattgaacactagcactgtatatccaagtgtctccccttccacttggctatctaataagaatctcaaacttaacatgaccaaaattgaacccttgatttcctacccctgcctccaagctcttcctccaccaatctttcccaccttagtagatagcaactccattttgctaattaattactcaggccattaaacttggtccaccttgatttctcacattccacatcaagtatagctcatcagtaggtctttcagtaaaatagagctagaatgctactacttctgaacaattccaccataatattttggtacagccttcctttagccagttttatgtgtaatagccaaagtgatcattttaaaatgagtaaytgagatcatgtttataatccaatgttttcctaactcattcatagtaaaagtccttatagtgcctacaagatgctataggatctggctcttgactatccctttgatgtcttcccctgctacttttcccagtgctcacttcatacccagccatgccaaccttgctgctgttcctcagcaagcatgccctctgctatatccctgaaacctataactatgcgtggtaaatagtactcaagaattgtttatttgaataaaggtaatgacatttcagctaaggcagagtaggagtggaaaataaggaggtagctccttagctgatgaatgggttaacaaayktgtctattttgcttaggcgaatcctcctgcctgagagctaatgtatgagtaggggttaactcmggtaagagactcttattacatatattcattctgtttttcagataaacatagaaaacctttaatgtagacatgtttttcgtgacagaagaattataatagatttatataccccatgtgtgaggtttattcaagatctgactcattttgtgttcttaagattgcagataaaacacgctatgagaaattatgatatgtctatgtgaataagaaatatagagccattataatttatatgaggtagttagtagcatggaaaaatggtcacaataaattaaatagggggaaaatgttgtaatggtataaaatggaatacaattttttaaacatatacagcatagaaagactttgcaagatttacattaaaacatgaatattggttgcttaaaggagggactataggaggattttttttttgagacagggtcttgctctgttcaggctgcagtgcagtggtgtgatcatggttcaccgcagcctcaacctcccaggctcaagtgaacctcccacctcagcctcccaagtagctgggatcacaagtacacaccaccatacctggctagcacttttgttttttttggtagagacgaggtcttgctgttacccaggttggtctcaacctcctgggctcaagcaatcttcctgccatggactcccaaagtgctggaattacaggcgtgaaccaccatacccaacacaactttttatctcctcctttggactctatttttgaaactttctataatgagcatatatgcattgcttttataatcagaataaagaaatatgttataaaagtttaattgggtgtattgaccctgaatgttcttattctatattccatgagaggaaaaattaaatacaatcatagccttgggagattgcttggtgccttagcaaaccgtttctgcctggactcacaggggtactctgggagggcagctagaggtactgggaaaaggccacatggagaaggaactctccaactgaactttgtaacaatttgaactgatcaagaagcctcctggccagaactcaagggagggtgttaatctggtgtgcagactccacaggcaggaatagaaggaaagccatacttgatttcgcagctgggaggtgggtagcctgggacaaattctccagctctgctcacccactgcctggaaacagactcagtgcttttggagagggcatggtggaagtgagacaagccctttggattgtgtggagctgggtgaggtctgtgactgtcagctctcccccagtttccctgaaaacctgcatgacacagcagagacagtcataatcctcctaggaatgtaactccattgacctgggaacctcaccccaatctcccacagcagctgtagcaagacctggccaaggagagtctgagctcagacacacttagccctgcccccacctaatggtccttccctacccaccttggtcactgcagagggcatatactcttgggagttctaggggcccgcctatcacctgttcctccccattcgaccacagctggtgctctctggaaaatgccacctcctggcagggggccaaccagcacaaaaatagtgctaatgctatttcataaatgatattgaagttatgttttatgcagttatgggggaagtgaaatattactatggcatttgcaaatttagagaagtcctaaagatcttaggtcacatctcttgaatatcaagtgtcaattcacacacctctagactgaagataataatacctgtatcttatgattgtgaaacctaaataagatcatgtatgaaataggagtgacaaaaataaattgaaatgtagacgtggtgtgacttaatggatttacagtttgtgatttaaggtcaaataattcaggctgtttgcttttgaagtgggggtccgtttttccaaacagaagtcatttaaacataagtaaggatctgtggataccaagaagcaatgataggaattaataaagtatgctacagtttaggttttaatgacctacttgtagacattccaattagattcaagtaacttctctttttgattattgtatattttttctctttgtctcaaggatgtccagtattggatttgattccagtgacttctgttgagatcacatctcttgattatcctaacagttaactcaacatgctgaattacacttggactttttattccacaacagtaaataaaatgaaggccatgattaaagactttataacagaagaatctttgaactgtgattgggattatataatatttatgatagaccatatcagcaatcaattctactttgtaaatttatctttcttaaatggcctacactaactggcaccaagtatttatataatgaatatacatgtaaaacatgacctacattggccttgggaacaatagcatttgttgtcagtgatttctcatcagatccttcattagaatcctatagcattattgagcacagttggatgagtatgagatcacactcactggatctttattccttcccaatcctggcttgtcttgactttttagtacaaaaattcctatctcatttaaccattagttggcactcttggttttgtccagatgccatatgttttaaaggattttatttcctaaatggcatttktagatggtaacttttttgaaaatgtatttactcagtgttaccagtatcaggttttatactcataatatagatggccctttttagacctcagataaattaaagtggagaaaagttccattagccagaataatctttaccgatgagtggtgctgaggactaagaaattaatggttggaggtgctgggagtcaaactcagggccttgtacatgagaggcacctgtctaccagtgagctacactcacttaccaagcttgaataatctttagaaatgtattggtcacatagtgtctgtcatgcttgagcatttggcagtattccatcatgagactgactcatagagggaaactttttgaaacattttgtaattgagtattgcatcaacttctctagtttcctcttagttctgccacttaggacaccattaaaatccatttattgcacaggtcaagaggaggattttgatgctttctttttccagggaccttgacccctcctatgatagttccagatttataacaccattaagttcagaattttgctttgaagttccaaagttgcctaactttcctatcagtaagtatggctcttattagattataaagcaattggggtatggaggaggggaagatttataagttcaagctattggttttccttaagatgaaccatgggtctccatagcaccatactcttcaaccctaattcctgtcaataccctttcaccaaagaccctagaaatgtacctgtagttgaacaaattgcattttgcactcattgcagagagggagtatacacaccatggaaaaccatggggtatctcagtaagaaggtgttagaaaaacctataatagaggtagagctttgggtaattttggagagggtctaaggaaatggactttgttctgaattggtttctgtcaggaagtagagcaattttacgatggctatctcagtcaaaaggaggcctggctagagtaaggataaaactgtaactggtaaagcagtagcagttcctcattttagccaagagagggaggagagtggtattttggtggttgcacacagccgttttttgtcttaccttatcatagactagcaccgccctgtctgctgttgatgtcctgtgagacagtgtatgtccaacaggaaaataacatggtccagctgcgagcatcagaccaggttctctgtatgtcagggactgcttttctctttctcactctttaatattctccaaactggtaacatcattcctctttaaaagctcagattaatcaaaatttcagaggtgtcaaatgattacaaatgagacaacctgaatttctgtaatgagcctgtgtaattctatataacagtgaagggatttgcatttatttgtgagctcgcacaattttacttcaatgaaccatgcaatttctgtaaagattttggacctaatgaatatagacccctgttgctactctcctggcttccccgttagctaggctatcaccccattcaagctgctataacaaataccatagactgagtggtttccaaacaacaaatatttatttctcacagtatggaggctgagaagtccaggatccaggtgccagcagatttggtgcctgctaagggctcactttctggttcttaggcacagcccattctcactgggtcctcacatggaggaagaggcctctaaccaagcacattctgtctcaagtttcacgtcctcaatcattcaaatgctaccttacctgagacctcctctatcatacaatctaaatagccttccttaaccttttcttctagggattgatcatggcctgatggagtattatctttcattcatttataatttgtctcttctaccagaattaaaatttcctggcaacagaactttgtctcttttgttcttgctgtatcctcaatgtctaaagcactgcttgacagaaaatatttgatttttaaaagaaaaagtggaaaaaatggccctgaatgagggaagagcttggtaacttagggaactgtcagaggtcagagtgactagagagagattgagcaaggacagactagaatgaagtggggtggtggagcagagaggctttctccaattgtgcagctcaggctatgatagtgactttggattttattccagttcaataggaggtcatcataagttttgacaggggagtaatttgaaggctgatctggagtgacaaagtgaattgtgtctatagttatgaggctcttgtctacacctgcactgtccaatccatgttgctatttaaatgtaaattagttaaaatgaagtaaaatgtgacaataccaacatttcaagtgctcagtagctacatgtagcgagtgactaccatattggacagcaaagatatagaaagctccatcattgcagaaagttctattgcactgttttagacaatagatgatgttgctttagaggaggataacaataatggaatgcgagtgaagtagacagatctggagatagaacggagaggatttcctgatggattgaatatggaattcagtatgcaaatcaagaatgactcttaggtttatgatgtgagacactggagaaagcatttatggagatggaaaatatgacagggagaaaaagatttatagagagatatctgtttgggccatgctaaaaacattgctctgatatatccagattgagttgccactagttagctagagatagaactcttgagctagtggaggatttggagctatagatatcaatttgggacttttcagtttctcactaatttagttatcctttctcctacatcgtctatcttctctatcattctcatcagtttcaaacatgttctaatattatctatcatttaaaacaaactaaaactaatgtaagtcagcaattatcccatttctctgcttccttttaaagcaaaatttctcactttttaaagggttgatggatttaggaagtttatgggatcaatggcttagaaggtcatggtgagattaaataattgtagcaaagaaatattaatatacttaggaggtggtgatttagaaagtgggatgtttgaactaattccagaggtgtcaaatgattacaaattcagagcagcgatagtaaagaattaaaagataaagggaatcatagtaccatagtactagctgagtctcacaagttctttacttgttggtgtgcaatctggttactaaatattttgaatatcccccttggtcaaacacaaatttaaggaacgttggcaaactggagtgcatccaaagagcataatgagcaggatgtagaagggtgtggacatcctgggcatgtttaccttggagaagagagaagacagaaggatcataattctttttaaatatacatggaattctcatggagaggttctcaggccatgtacaaaacttgttctgcttaatattatctaataacttattaaatatttaccattatccaggcattgttgagctaagacccaatctcatgaagatgaaaactcttaatcttttaacaatcttatgtaggtaggttacattatcttcattttaaatatgagacaagcaagtcacaaaactgttaaataaattgcctccagtgacatcgctaataagtagaaaacgtgggactcaactgaagcactctgtgttcttggccactattctaaccacgtggtagtcatcacattgatgccttttgacacaaggagaggaagaacagtctagaaattagatcagtttaaaaggagaaaatgctgataagttccaggtcatatcttcaaggcgagcattatatgttttggattattttagagtaaactctgtattaggtgtaatgttcaacttaataatctaggagcctgtatttaaactagccccttttccagccacctatcttcaacctacaggctttataaatgtgttttctgtatttctgtctaagtcatcaatgaaataccgtactcggtggaaccaaagayagaatcatttccataccatttagaccttccctccaggttaacatttcttgtatggttatttaatcacctgtggaacttcctagccacataattatctacgtaccatttgctgtctgttcacagggacatcacaggcactttattaagtgcttcattgaagtcaaggttcattaagttcatcccattccccctagccaccatctaattagctcttttaaaaaatgaaattaggttaatttaatgtggcgtgttaaggatcccatgttgccttctcatgaccactgattcctcctccaagtgttcaaaaaccatctgtctaataatttgctgtaaaaattttgctgaggtttattttcgtttaacaaatatgtataatactttgtaaataccaactgatttaatcctaagaaaatattgtttttatctacattttgcagatgagaatactgaggcacagacagagattgaataacttgccatatagttaatatggcaggttattatggagttattatctccattttgcagatgagattatcgaggcacagagagaggttgagtagcttgccatatagttaataagggatagagttggttcaaaccagcagtttggttttagaatctgtgcctgtaagcactaagctatgtcccttcactgacaggactttggaaacccctacacctctctgtttttctctgtctcctacctaccgccttatgctcccaaacatcctttttgaaaaacagagtaacagtttcctgttgggaacaggccccccaaaatctggccatgaactggccccaaaacaaaatctctgcaacactgtgacatcttcatgatggccatgatgcccatgctggaaggttgtgagtttactggaatgagggcaaggaacacctggcccacccaggatggaaaactgcttaaaggcgttcttaaaccacaaacaatagcataagcgatctgtgccttaaggacacactcctgctgcagatactagccaaacccatccctttatttcggcccatccctttgtttcctacaaggaatacttttagttaatctataatctataraaacaatgcttatcactggcttgctgttaataaatacgtgagtaaatctctgtttgaggctctcagctctgaaggctgtgagacccctgatttcccacgccacacctctatatttctgtgtgtgtgtgtctttaattcctctagcgctgctgggttagggtctccccgaccgagctggtctcggcattttcccatttccattattttaaaacttccaggttatttgttggttctacccagaacccctttacttgacatgaaagcatctccaaggttccccatcacttccattccaccagatagagctgctttgaggataaggacgatgtagagattaactactcccctcctttctttctcggatttctgagataccgttatcatgaagacaaatcaatagtgtttcattgttttattttaggagaacttaaatgtacagcaaatgtcctgttactatcaggaccacctttgtgccaacttctgtgtttctgaattttaaaagaatcattattgtgttttagagcagattgtcccattacttttgtgtctctgtctagttatcttcrcgcaaatgcccttttttcctcccatccttaggataacagattgccatacaagtgtgtaccattttttctatcaggtctttccctttgatcttttaaaagctatactcttccattgtggcactcaaatcatgagttccatcctacaaatcttgatcttgtattcctgacaatcattcttttgttaatatcaacagtttggaatttaatgttacctctttgtcctctttcagttatgtcattgcacagaaaaagtactttaattatcgaatatgtctttcattgcagctcatttacatggctccaagaaagagtttatcttgatatccagtgctgcttacctgactgtgcattttaagactgatgagtctgagagaaagaggttttaagcttattttagaagagatgattcaggagcaatcacagaagagcaatattgagacccaatttcctatcagtggtaagtaattgcattaaaatgtttattaaagcagatactgcataagctttgaagtagaacctgcagcccattggtttaagggtcactagtagtctccctactaaaaaaagaaaaggatatcttcatttcaaaccattccttaaggcataatactggtagttccaaatgaatcatctgaggtaataaagttaatttgtgtatgtgcgtttattatttttaagaaataatgataaacacgaaagtcagtcatttgctatttaaatgacccagtggggacattcaagccaaaacagagttcattgtatttccatgtctctcttaccatatctcttctaccaagtagctacccctcaccctcataaagttcccagargagaatagattagctgaacatgtactaacttctctgaataaaatagaaacaaacttaatgattttctacttatccaatctacttttaagccataatttcatcagttgtgcttaagatttaaaaacctaattaatttgttagtttatgctcccactgatatagtcttcatcttgcaaatgaatgaacatattaggtgaatgaaactttctgtccttcaacaatacacataccatcaattaaaaacctaattaatttgttagtaggaggtcctcttgattagagtgtaattcaggtggaattctaatgaccaaccttcagtgaaatgtccttcttgacatcactttgtcttttttaagacaggggaatgaatgggctctttgaagagtccttgatttgagcctcatcattctgtaggtgagactttgaatagtttaagggatgctcatctaattgacctttctgtctccattgcttttatccttccatatttcatctctaaattgacccttcattctcacagtaaaaatatttctattgcctcatttctttaagtcttccttttttgcaggttggatactaataaaatattgctgttacacatgtgtacaaacagcccaaaggtctaagactgagcatataatgtggattaaaatccacccttaaaccttaatgcagtgaaaacagttttgagtaaacaactttttttcctaagatcttggatagtcttttgaggagtttgcatgattttggcatatatatttaaaaggagaagagaattgatgttttatacatatctgaaaaggaagtagaaatgagttttaacataatattgaataaacaacacaaatccactgtgctagaaactttttgttttaaatacatgtctggtatgaaatagaaatctccagtaaataattatataaataagcacatatcctaattctcaaatttttgtgtatatttaagaaaattcatacttaaaaacatctcttggtttttagttactaaaattatttcctggagaatttctttttaaatttgagaatggaataaacacagtgctggaaattttccttatatgtgttctttatatatatgttgtattttgaatacgtgtagtgtaaagtgttttgataagtctagatatctgttacactggaataacacaaataatgccacagaaagaacaatgaccaataatttcatgattagatgcaatatttttattttaaaaatcagttttatgttttgagtatcctaaagatgcatatattaatattttagttaactttattgatcttcttattttaaaagcagtgcaagaaaaggtaagtctcatctcttgatcagaatcctagttttgaacctaagaaatgcctccattctgaaattttaatagacttttataattacttttatataatgttttgttattacttttctaagggataacaatagaaaacaatacaggaagttggccaacccaagacaaacgtagcattccagctgttgaccaatttcgaatggaaaattcggacagaaatacaaatgtgctgccagccatgcttggagagcctaggttggttggtagctgtgctgcatctgcaatgtcatggccctggctagttagtctgcagcacccagacaacattattatagaggctccctggccacaaaacagtgggtcctggcagcagtgcattctaactttaggtctgtgcctgtgcctgtggtgcagggtctctgagactgcttgttcaagggctcacaatgggtgtacccatctgctctccctatgtcacaagaaacattaaagtttatgctcccgctgatatagtcttcaccttgcaaatcaatgaacatattaggtgaatgaaactttctgtccttcaacaatacacataccactaatagtttttcattttaaaagctgctttttccttccagctctttttaaaataagtgactaacaatgctgccctctctttcctcatctataaaatggagataatgatgtcttaacatgtgtgcatcagcttctgaacatatcacctagagcactggagttgctaaacggtgggtctccttcctccttgctctcctctactgactgatcatcatacctgctcccaaaataaatatagaaagttctgaaaaattttaaagaatgctcttggaaagaaaattttttctttgatttcatctgaatcttgtttccatgtgatattgagacattatctgaaaattccttcctcagtttaaaggttgctcagtactaaaattctgatatttctaatattggtctcccagaagtagtgagatggttgagaacatcacatgatgtcccatagccaaatgattaaatataatgttttcagtgtcttcaaagtagcagttccttctatctgctcaaataacttggtgagcaggacccttcagtgaatcaaaacctcattttctttatcatcccccaactttactcttgaataggtaaatctcaagaagtcatccttataaggcaattttcagactttcatgtgttcaaaactgtttggggagtttgcaatcaaattttagaatcataattttgagttttgatttgatgagttacatcagattctaaatttttaaggcaatgccagacttaatgcatagttcctagacacttctttgaaaaccattttacagggagtaaatataactttcagaatatctttcagaggccattatataagtgtataacatctattattataattgtaataatgcacagaatcattatcttgaggcatcatgcatcttaaaaatcatatttcgttggccaggcgcagtggctcatgcctgtaatcccagcacttcgagaggccaaggcaggtggatcatgaggtcaggagatcgagaccatcctggctaacacggtgaaaccctgtctctactaaaaattaaaaaaaaaaaaattagccgggcatggtggcgggcacctgtagtcccagctactcgggaggctgaggcaggagaatggcatgaacctgggaggcggagcttgcagtgatcccaaattgtgccactgcactccagcctgggtgacagaatgagattccatctcaaaaaaaaaaaatcatactttgtttagtattatggaggaaagaaaatatatacattaaaatttttctcagggattaaagttattaagagaaatccctattttccaagaattcaagacaataaaatttttaatatagattagaaatgtagactgggcatggtggttcacacctgtaatcctagcactttgggaaatgaagacatgaggatcactttgggctgggagtttgagatcagcctgggcaacatagtaagacctccatctctacaaaaaactaaaaaaaattagctgggcatagtggtgtgggcttgtagtcccagcaaatcaggaggctgaagacagaatcacgtgagcccagagtttgaggctgcagtgagctatgattatacctgtgtactccagattggtgatagtgcaataccatatctctaattctaaaaagaacaaagagaaatgtaaaataatatatttttagtaattatgaaaaatgactatgacctcattaaaagaaatgtctatttcctcactcccttatgacaaatactgtcacagacaacctggtaacagaaagaagttacctctggaacatgggaagcagtgatttgataccagtgaaacctctctatactcaccttggcttttcacagttttgtcctcatgatgatctatactgttgcatctggaaaaacgtattgaatttggtctgtatgggtaactcttctatattttgaacctttgccatacagcttaatatctttcatcttgctgagaagtgctacacatacttctgaagttaaataattatttcaaaacttccttatatttatgccactttctctaaaagttgaagtatctgtataaacacatactttcatgggtttttaattgatggaggtctacagaagatttcaaagaaattaatttttaattttgattcttttcctatgaagttactccaaatacttaggaatttgaagcatgagatgttcaattttctatactttcatgacctagtaaaatcctcttcttgcttaatggttactgaaactaaagctaatgtgaaaactgggtgaggaattgttactctggctctgtcatgtagtagtcatgcaatcttgggcaggttatttagctttcctgtgcctcagctttattattaatagaaaggaataacagtaccctgcccacctacttagcacaggtgaacattcagtgagaaaacatactgcgggaactgtaactaagacttctccactctcaagcccatgcctttccatggacacacaggggtctgtaaccagtttctacattctttaactgttcctctgccagtagcttcacctcccttttgctgtcttttcaatgcttccatcctgcaaaccattaatcatagcccatcatttgctttctgttcttttataaccaagtcagcaagaacgtttagaacagtgcttcttaatcttggctgtacagtgtaatctctgggttgcttaaaacacacacagacacagacacacacacacacacacacacacacacamttgtaggccaggttgcattttggacaaattaagtcacaatctcagggatagagagttggcatcagcatttaccccctccttatcttgctttatgcatttgatgttaattaaacttatattgaaataattttagatttacatgcagtttaagaaatagtacaggcacccaatatactctttacctagtttcccccactgataatatcttataggatattgatacaatcaagatatagaacatttctatcaatcaccccaaggattcctagtgttgccttttttttttttttttttttttttgagacggagtgtttctgtcacccaggctggagtgcagtggcacaatcttggctcactgcaacctctacctccagggttcaagcaattctcctgtctcagcctcccgagtagctgagactacaggtgcatgccaccatgcctggctaagtttttgtatttttagtagagatggggtttcaccatattggtcaggtttgtcaggttggtctcgaactcctgacctcaggtgatccacccgccttggcctctcaaagtgttgctcttttatagcaaaacccacttcaccctttcccagatccctggcaaccactaatctattctctatttctagaattttgttatttcaagagtatttaatcaatggagctgcatagtatgtaaccttttgggattgactttttccactcagcacagtcccctggagatttatccaagttgtactgtgcttgttcaatagttctttccttttgatagttcattccttttaatacatgaatagcattccatggtatgaatgtaccacagtttgtttaatggttcttctgtcaaagcatatctaggttgtttccagctctgggctattacaaatacagctcctgtggaaa

SEQ ID NO: 6880 - DNA, 85779 bp, Homo sapiens
  misc_feature (1)...(85779): n = A,T,C or G, or insertion/deletion polymorphism (see Tables 1-2)
atcatattacctatgattttaatgtaatctataatatataattaatacataaataataatttatatagattatatctataaattaatttgagggaactaatatattaataatgagtcttttgacatattaatgtgatatatagttcaattagtcttttaaaatttctaacagtgtgttgtattggatgttttctgatactattatagatggtattgtatttgaattctaatttccagtagttcactgttgatatatagaaacataattcatttatttgtacatgaattttgtatcctgtaaacttactaagctcacttacgtgttccagtaccttattatagattctacaggattttctttgttcacaattataccatttggtaataaagacagatttgctttttcttttctaatatttatgtcttctttttttttcttgtcctattgcactggctaggacctccagtactatgttgaatagaattggtcagactgggcatcattccctggtttccaaacttagaggaaaaacatacagtctctaatcactaattatgacattatctgtagtttttcatagatgcccttcatcaaattgaagaagcttcttcctagtcatttttggagagcctttttttatcattaataggtgttgaaaaatgctcttcagcatctgctgaggtattcatatttttcacctttattttgttaatatggtcaaatacactgactgattttctaatgttaaaccaacttgcattcctggagtaaatctcacttggttatggtacattatcctttttatatagtattaaattttgttttctaaattttgttaagaattttgcatctgtgagagatattagtctgtagttttatacttccttgtaattatgggagtaatgctggcctcttgaaatgaattgggaagtgtttcccattccacaattttctggaagaatttgtgtaaaggtattttcttcttaaatgtctgatagacttcaccagcaaaggccatctaggttttaaatttttgtgaggaggagatttagaattatgaatttaataactttgatagatgtatgattattttaattttcttttacttcttaagtcagttttagtaatgtgtaactttcaaggaatatgcccatttcatataagttgccaaatttatttgtttaatgttacttatagcaattatttaattatcctgttagtgatttaattatcctgttaatctcttcaaagaatcagatttttgttatattgattttctctattgtttgtgttactttctcacggacttttgttcttatctttattgttcccttttccttacttatttttattttaattgactctttttatagattcttaatttggaagcttagaacactggtttttagaaccttcttattttgtaacagaaacatttatttaaggctgtatatgtccttataaatatcactttcactgcatcccaatattttgatgtgtcctctttctattcatttaaaaaaatttaatttcccaaatgtccaacaatgatagactggattaagaaaatgtggcacatgtacaccatggaatactatgcagccataaaaaatgatgagttcatgtcctttgtagggacatggatgaagctggaaaccatcgttctcagcaaactattgcaaggacaaaaaaccaaacaccgcatgttctcactcataggtgggaattgaacaatgagaacacttggacacaggaaggggaacatcacacaccagggcctgttgtggggtggggggaagggggagggatagcattaggagatacacctaatgtaaatgaggagttaatgggtgcagcacaccaacatggcacatgtatacatatgtaacaaacctgcatgttgtgcatgtgtaccctagaacttaaagtataataaaatatatatatatatatataaatttaatttcctttgtgacttctttgattcacgagttatttagaaggctgtcatttattttccaaatatttggagattttctggataactttctggttattggtttcagtttgacttttttgtgctcagataacctactctgatgatttctatccttttatatttattgaaacatgctttatggattatcatatggtctgtcttggtgatgtgccatgtgcaactgaaaagaaagtatattcagctgttattgggtcaaatcaataggccaaattgtttggtaggatttctcaagttttctgtgacttcactgacttttctttctatttattgtatttgatagagaaatattgaagttgtaattgaggatttgttggttgccttttcagttttatctgtttatgctttgtatattttgaagctctgttgtttgttgtgcaaacattaaggactatataacaaaggactatatataaaaataattttttaaataaagtaaccactttatattaatctaagtttgcagttagtatcattttcttcctctggaagaattcccttttacatttctagcgcagatcttccagaaacccatatgcagattactggagcactttttccataactgccccagaactcccagctatctcagtctccataaatgttgatctctatctcctcatctcaggaaagccatgagactgtttaaatttcttcttatgtatatggcccttaatttgtctctaagcagaaggccagagtgatcatagggctcacataatttgtttcccttctttcgggtattacatagtcctatgctgtctgttgcccagtgtctgtatccagtcatttaatatatttatccagttttcttgttgtttatgtgagtaggttaagttcacatttgttactctatcatgcctgaaagaactctcttcaagtatttttcaagaaaacattagaaattttaacataaaataattataaaatgcactatgctgcttgtacaaataatgtgctaatagacatttcacacacatataaagtgggataattatgataatttaataatctttataattatgtaattgttactaaattataaattatattttattaaaattcttaagcattaaaataatttaaactatagaattaattaaactttagcaatgaaccaggcaggaactgtttatatcaggatttatactgaatattataagggtggtatttggatatacagattttataatttggttttgacataaaatgaattctttctttttctaagataaagagtaggggaatttaaaatcataattaatttttcacaaatgcattcacattatttatctttaatatgatttttttattgatctttgttttcttgtaaatttattattttgaaagtactgccttttccttattttataaaacaattattgccagccaaatttattgtgtttattttaataccattccataaaagaaaccatgaaacatgaaattcaaatagaaatttattaaaaattgctgactgttaaataatttgtgtgattacaacatttaaagcaagatttgaaaaatttataagaaaaattcagggagttaatccactctctttcctatgctgctagaccctattccagcggtctccataaaaaaaattcagagaaacagaaagcagtaacagtgatcagattgcatacaaactttctgcacacacatatatttgttataacttatgtaaccgttgattgatttggctttttcctgctggactatgagctcctctgaggaatagatttattttttttctgcatatcagtatcccgtgcttacccagtgtctagtctgtaacagccattctataaatatttatgggtgaagaaaaatgttgttgaatttttaaagtgaaaaaccaacatggcttatcatctctattttaaagattttacaaagggaatggactgtgaaatttccattaataaaaataggtctaatcttccatgattgaactatgatagaaggatcttatgattgagtaagctttttgtattcaccttcatgttattttatcattttcaaaataggaagtgaaggctcatttcttgtgaaaaagaaatctaattcaattagtgtaggagaattttaccgagatgccgtattacagcgttgctcaccaaatttgcaaagacattccaattccttggtaagttaaattgtgcaattgtgattatgttgtgttttgctgctgacattctcttgataactaaaatttatgccaaagctaggaacaattggtagggatttccctgatgtatgaaaactataattttgagatttttatatatgtaatagatatgaaaacatattagatgtaaattatgctcaattcacgtttgtagtcttttgagtatgcagggtatgaattttttggggcacatatatatatatatatatacttacagtacacttcaagatggttttcttctttcttttcagaactccatgtctgaaaagagcccaggctagacctctacctaatggtgtgggttggtcccatgaacactttagctagaaatctgatagtgatttctaagaaaccagacagaagtctgaaggacactgaacaagatggagtagcataatataattcattgttcatctatctatctatcatctatctatctatctatctatctatctatctatcatctatctatcaatcatctatctattttggtgtattgaaagtcatttaattttttagatacctttattattatttcaacctcttgtctgttttggaactatggaaggactatggcatatttgcatgaggagtctgataattctagttgaggaaattgggagccaccttattctcaggttcactttgaaagacctgttctaacctattctccaattttgattatagctgagtactaaaaatatgagggttgttttgtgttaattctagatcttaagatgggtgaaatgaatgactgtagttgaatcggttaaattagctgtcagtctttatatgctctttcgaatttatatataaatttagttataaaaagtagtttggttaatgagaaattatatggatatagctttttcactcaacctttctgtttttcagtttccttatatttaaaacaaaggagaaagagtagatgctttctaaggtcatttgagcactgaactggagttttcttttatcctcataattgggttcttagtttttacttgcctattttttcccataattataaataccattaaccctattaaaatttcatggttccttccttataaaaatgtcctcttctccaataaatgacagcaattttattataaattattttttaataggggcccatttttgatcatgaagatttactgaagcgaaaaagaaaaatattatcttcagatgattcactcagtaagtatttggatgtaatcataagtaaatagatattttgggcagaatgcagtgtttggttgaatttcctccaattattcaaatattcttggtgccagtttcatcttacataatcttcatatatatttacctaatgattccttccataagctatagaaaaatgaaacatacatttaaaaatttacctttcttgaatattatagaacacattagtctttttttttacaagttttctgaaatgtaaataacacctccaccaaggccactcttcatcctctcctccagttttctttctttcttttttttttcacaccacttacaccacctgattaaatgctttttatttactgttcatctctgccactggaatgtaaactccatagtttggttttctactgaatcttcagtgccttgaagaaagcctgattgctaggaggtgctcactaaacttttactacatgaatttaaattatttgcttatatttccattgtttgtttgtttttgacaaaagggtcatcaaaacttcaatcccatatgaggcattcagacagcatttcttctctggcttctgagagagaatatattacatcactagacctttcagcaaatgaactaagagatattgatgccctaagccagaaatgctgtataagtgttcatttggagcatcttgaaaagctggagcttcaccagaatgcactcacgagctttccacaacagctatgtgaagtaaatttaatttatccttgtaactttcaagacatttgaagagcttttgtatttatatctaatttgcataattaagtcgtttaaaagaacattctacttttgtgtcactgggtgataagtcccccgtgcctctggtttttgcacacatatcttagtctgtgtgatgttcaggagcatctttgagggcaggcaatggaaacagatctgattagaaaggaattccaggttctgtacggagtacatgttaaagtctgtcaagtgtatattgattatactttaatcatttaattcaagtaagacaacttcaacaatttaaattagattaggtaaactagaattagacctggtttggtagtactggctctgactcagctaccaactgtgtgacaatatgaacatgtcactccgcctgctctaatccttcattttctcatctgtgaaatagagattcaactaaatgattactgaaagtttttttttcagtttaaaataatgtgtaacttaaagatttttttctttttggtcaaagttcctgycttgtaagaattaaagtataacatagtttgttgataggatagctctctgaaaattgactttgctcaccatttgtatgtrctacagatcaaaatagttttgaaagccaaagaagatatcataaaagttaaaattattttaatgcaaatgtttaaattgttaaattctcaaggctgggcatggtgactcatgcctataatcccagcactttgggaggctgaggcgggtggatctttttgagttcaggagttcaagaccagcttaagcatcagcaaaatcctgtctctaccaaaaatatgaaaaattagccaggtgtggtggggtgcacctgtggtcccagctacttgggatgctgaggtgggaggattgcctgatcctgggaggcagaggttgcagtgagccaagatcgcaccactgtactctagcctgggcaacagagtgagaccctgtctcaaaaaaaaaaaagtcttgttgcaaatgcatttccccctttttaagcctaaaaaattaatcataattttgagatgttttaaaggcaacattacataaattttaagtatatttaagggatgttttttctctaaagtttttatatctggagacagagagaagaaagaaaggtgacccactcctccagccatgccctaatgtctaaaatgtgtctttctctcttctccacttctttgccttgctaaatacttcaagccacccagggctcaatttaactgtcacttcatcactctctgcttctcttcctttttccttctaccctccagccaacctacccacctagcctccatgtccataacacctgatgctttccacctaattctcattcggtcatccaatttgatttaaaatacctttgcccccactagactgtgaactctttgaggacaggacttgtttcaggcttgtttctgtctattcccagtgcctagtgagatctgacatatggtagaagtttagtacttactgaattgatttgtggaggaataaatgtctgaaacttggtaatccttcaattaatatttgttaaatgagcaagcaaaataattttgggatttagtctagttaaaacaaagagaattggaagagactgtgacaaggtgagacatgccggcattcaatgactggacaagctcagaaccttctcttagggaaatttcaaaatgacaccattagatggcactttgtttgtttgtttgttattgtcaaagggtctcatctatgttccttttataggaacatttcctgattaaaccttgggaataattttaaaatctttacttcagaataagttaatgagggtctgaaacaaaagcaggaattttgaaacaacttctggggctaagagtggttaataagcctctataatgatatcaaactctagagtttctcgtgtggataaatatattgataaataaagaagaccatagagaagtgattgattttggtattttagctctttgagagtattacgtacctaagttttaaaaaattgacataatgtgtaagtaggggtttgctattatcattataaaattagaaattgcttaaaaatagaaagtagaaatttgaaacaaaaagtttcgtaaaaaacaggaggttctaaaatgaaacacattataagtaactatttttatagttaaatcttaaatatatcaaaatatgtaaaatttctgacagcatttaaaacatattcccaggattatattgtactttttgttaaatcattaattcaaatatttgttgaggcgtattctgcttccattttgctctttctggaaataatttacaaaaaagctgaaggaagctttcaactctatttttgtgaacctgctttttacaatctacctgttgtaattttcctggttttacccatgctacaagcagagacgattgggccaattagtatactgaaattctgttgtggattgtgttttcaactttttgaaaattcttgatggttctagttaccagaggtgtgtaaggcagaaatattagctagacttaagttcctcagatggttcactttagaattttaaactattgtcttttcagactctgaagagtttgacacatttggacttgcacagtaataaatttacatcatttccttcttatttgttgaaaatgagttgtattgctaatcttgatgtctctcgaaatgacattggaccctcagtggttttagatcctacagtgaaatgtccaactctgaaacagtttaacctgtcatataaccagctgtcttttgtacctgagaacctcactgatgtggtagagaaactggagcagctcattttagaagggtaagaaagagctcattaaaaataaaagggttgcctaaatatgctgatgttaacaaaatatgctgacatttttatagcaatgagttttaacaacatggtgaaactccatctctactaaaaatacaaaaattagcccagcgtggtggtgcgcaccttataatcccagctactcagaggctgaggcatgagaatcgcttgaacccaggaggcggaggtcgcagtgagccgagatcgtgccattgcactccagcctgggtgacagaggcgagactctgtctcaaagaaatatatatatatatatatataatatatgtattataatatataatacatatattatatatatttattatatataatacctatatattatatatatactatatataatacttattatatatatactatatataatacttattatatatataataaaagaccgaggcaatgaatattacaacttttatcaactgacttacatttttacaactaatttttaaattaatgagtcctctttgatgctgttctttgaaagcaaattgtttttgatattttttctttaaagcatatgaatttatgcaatttaatcattatcttgtctcttgtgactagaaataaaatatcagggatatgctcccccttgagactgaaggaactgaagattttaaaccttagtaagaaccacatttcatccctatcagagaactttcttgaggcttgtcctaaagtggagagtttcagtgccagaatgaattttcttggtaagtgttctgtgtgggtctcctccttaccaggccctctaagttgtacaagatgagtcatatatggaccctttagttgtggatttaaaagtggcatttcagtttaaatattatgctggatttaaaaaataaaattagcaggttggcaataaaacaaaatgctataaaactatgaaaagacatgaaagaaacataaatgcatattggtaagtgaaagaagccaatctgaaaaggctacatactattcgttcccaactataagacattctggaagagacaaaattatgaggacattaaaaagatcaatggttgtcaggggttaggggagggagagatgaatagataaaggacagaggatttttagggcagtgaaactgttttgtatactatagagggggatatgtgccatggtacacttgtcaaaacccatagaatgtgcagtataaagaatgaaccctgatgtaaactatggactttgagtgataatggtgtgtcaaatattggctcattgattggaacaactgtgccaaactaatgcaaattgttaataataggggaaaatgtgtgtggggtggtggtggtggtgagggaagaagggatttattgaaagtctctggactgtgtgctcaattttcctgtgtatctaaagctgccctaaaaatagtctataatttaaaaaaattatcacatttttattgtcagaggttaaaatgatagttacttggcctactgtgtagtaccctgtggttccctttagtcttaaactaaacatgcacatggctgcctgagctgggtaaggcatcctgatactgagatattgtttttcatactgaagtttcttcagcaactttttgtatgataaatatgattactctttgctgttgttagaaataaaattaatcatttaatggttttcaaattagtgaagttaatgtatattcattcagctcttgtgctttgcaagacattataataatgcaaattattatcatcacttttattaaaagttgtagaatcccctgccttctcttagcatatgaaataatagaggaaattatgttcatttgtatcctaaatgaacattttaattttaaggaacaaaatacttttatgacaataaacaggaattccccatattttatcttccttcatagagaatactcacatcttgccacccatgtgtttattctatacctgactcagtaaaataatttttaattctatttaatagcagaatatggcttaactacttattaatagtattttaatttgtcagagctttcagaaactaataatgatcaaagccatcttaatttggatagtattttcctccttttccgcgccctcccttcctcctaccctcctgaatattggccactttccaaccatgatcttgaaactggggatagagttgttgactcactcactagtaagcaaagcaaactcggtctctgtccttaaggaacttgtgattaagttcagagcacagacaaacattaagtaatgatggcataaataaatgtaattttatattgtggtgccttctgtggaaaagtttcaggatgctctgtggtacctcaggggaatctgattcagactgtggagtcaggaaagcatttctgtgcctgtgacatttaagttgggtctggaaagaggagcatccaaaaggaccttgaagcttgtgtatggtcagtgtgtcatctcagctgaatctcacaatgatcctaatggtcatacctaggacaggtatgacctctgcccaattgaggaaattgaagccgtgagattttttgtgtgatgcttacaggtgcatacaattaattatcttgttgtgaaagtttgaatggaccccagttcaaaatctgtttgctttgcactacacaatcttaatagtttgagaagtggtcttacatttgagaagatgccccatggaggtgacatctgagcaggaccactaaccattaaaaaataatcccatgtaaatggtgaaaccctgtctctactaaaaatacaaaaattagctgggtgtggtggcrtgtgactataatcccagctactcgggaggctgaggcagaagaatcgcttgaaccagggagtcagaggttgcagtgagtggagatcaggccacagcactccagcctggcgacagagcaagactccgtcaatcaatcaatcaaacaatcaataaatcccatgtaaaataaagttttagttctgtggccttatgagtgttttccatacagcatatgaaactcaagactctgaagtcttaagtggagaatcatttcgattcatttattttgcgaataggtgaggtataatagctatctttctgcttctcaggaagacagcttctaggagtgtcctggaacattttgacccttgaagattgtctagataaagaataacccatatttttaaccttgaaaatgctaataactaattcctcaatccgttttcctagaaacggtagatttgtagatctctcaagtgtcttagtgttcatctgatctagctacactcttttacagataagaaaagagactgtgtgattttctgtttcccaaattgtgtttcacagaattttatttcttggaggtacctcatactgcatttccttcttaacaattcataaagtaggccaggcacggtggctcatgcctgtaatcccagcactttgggaggccggggcgggcagatcacaaggtcaggagatggagaccatcctggctaacatggtgaaaccccatctctactaaaaatacagaaaattagctggacatgatggcacgtgcctgtaatcccagctactcaggaggctgaggcaggagaatctcttgaacctgggaggcggagattgcattgagctgagatcacgctactgcactccagcctgggcaacagagcgagactctgtctcaaataacaataataataataaaataataaaaaataaaaaaatcataaaatataccagagtattgagaactcagatattttactttattttactgaatgtttcccaatctcttaagattatatgatcgaagaatacttttattaaataacacccattattattccatagaacactctttatgagctagtaccataaagaatttttgtccttataatatactgtattttagtaaagtgttcatagttgttttgctatagttatttaagagtaattctagttaatctatatggtatataataacatcacacataatttgaaatgaatattctaggaatttttactttgtacaaatgttgggtagacaaatttatatttaaatagctgtttagcttccaggttaaaaggttctggtaagtatagcatattattttattgtttagtggaagtattaaggctattaccttatttttaaaagtggatttttaaaaattgtcagtgtgagaatggaaatcaaattaagtgacacactattggtagctgttcttatttttgaatttaatggaaatctggttaaaatgattaaaatgtttatctcattttttttcttttagctgctatgcctttcttgcctccttctatgacaatcctaaaattatctcagaacaaattttcctgtattccagaagcaattttaaatcttccacagtaagtttattgttattttaattttaaaagcacattagctggaacagaacctttagaaacatgatttcgatttagtcatatagaggtaattgatttctaaacctactcaacttgatgtttttgtatgtatgaatgattttcactagataaaagacccaactcattacttaaaatggaaacttttatayttatttagtggatcattgtgtaaaaacaacttaagattgtttaattaattgctgtattagtataatgaaatgagattatactggctatcactttaacttttaaaattttaattgtttgtggaacttgatatgttgccaaaatacccttaactttcacattatgcttaagttatgtttgagtgaaattttgggggaagattaggcaagtttatgtagttccaggtttttgagatattttggttaattcatgaaaccagaagcttcctgttaactttaaattcaggcattaattggatcttgagtgtgttgtaatcttaaatgctattctaattatatcatacatgataaaccaaattcataaaaatatatgtgtaaatttatcttttcctttgttttcttgctgtcagctattccttcaaacactatggctttttagaattgacactaaaatgctgcttgcatgatgctgcaatgagctcttctgtgagcttatatttaggcaaataataattagaatttagccatagagagtgttacacaaacctataatagctaaattacgtctagctttagaatgtgtttaactgttctaactactctacagyggttcatctctttaatcttcctaataatgccctacgatagccactgttattatctccacttcataagagatgaagtaacttgcccagagtcatagttcttaaacactggtggttcaacttcaggctctcaaatcacatgcatactcatatgtcaataatgctagttttgacgttacactttattctcaccctggggaaaattatttgtgatgttatttcatgtattttggaaatactcatttggtttatgtcttttctgtgtattgttttagcttgcggtctttagatatgagcagcaatgatattcagtacctaccaggtcccgcacactggaaatctttgaacttaagggaactcttatttagccataatcagatcagcatcttggacttgagtgaaaaagcatatttatggtctagagtagagaaactgcatctttctcacaataaactgaaagaggtaagacgattattgccacttaaaaaatatactttatgatttgcatcattacaaattatcattttaagtgatatttagcttctaaataccaatttcatgaaactagaagcttcctgttaactataaattcctgtcaactataaatccagatttccattaaatttaaaaataagaacagctactaatgatgtgtcacttaatttaatttccattctcacaccgacaatttaaaaaaatctacttttaaaaataaggtagtagccttaatacttccactaaacaataaaacaatatgctatacttatcagaaccttttaatctgaaagctaaacagctagatataaatttgtctacccaacatttgtacaaagtaaaaattattagaatattcatttcaaattatgtgtgatgttatcatataacatattatagattaactcaaattattcttaactgttacttaactatgacaaaacaacttagaacgctttgctaatacacaagatagtataaggataaaaattctttatagtactagctcataaagagtgttctatggaatagtagtggatgtcatttaataactataaattcaaaataagcattgtaaatatcaataccattcaatttttttttgttttttaaacaagttgtaagcctaccctatggtaaatggatatggtaacacagcataatttcctcaaaaaattacttttgtgatatacttttaaaggattatatgaatatatrcataattatagatgaatgtgatgctgtgtgtcattgtatcaccaaatctctgtccaatctgttaacagactcttaaataaaccatttttctcaagttgttactggcctgtatactgtattacttgtttttcagctttccttggtacattcttaaatttctgcattccgccaccatgctatcaccctaatggatcaaccttttttgttttgctccattctctctgttgtaaatctgaaattgataatttgtttgtctcagaaaatattatttttcaagttctagcgtattgcctacaaaaaccaaaagaattaagtgtctgacactgtgaggttcagcaaaactgtgcatatattttgctacctgattttttgccagcaaatgagtgttttctattataaatatagtatatattgcttaaaaatttggaacagaaaagaaattactccaattaggatgccacctaaagtataagcatgtagctgtactttgagaacactaaattgcatgcaggtttgtagtgactaggtcttcttgcctttactgaaggagcagaatgaagtcacagataatggataaccaaatccattttgtggtaagaacttccttactttcaatgtcttgaagagatgaagtatgttaccaaaggagattgggttttttaatattacagatgagtgacatagattgtttgggagtaagtttttatatgtaagtttttatgtttttaaacacatactgacaacttatgacaaacctttggaaagttttaaaactctgttgaaaggttgtgcaagctgctgatggaatctgtgagcctttcttgtttcttatcacgttttttggcagagcacatttcttccttcccaccaacaggttttgcccttttttttyccattaagattcctsctgagattggctgtcttgaaaatctgacatctctggatgtcagttacaacttggaactaagatcctttcccaatgaaatggggaaattaagcaaaatatgggatcttcctttggatgaactgcatcttaactttgattttaaacatataggatgtaaagccaaagacatcataaggttagataatttttttctatttggttttactaaatttatttcagattttctactctctgtgactttgatggacatatattgttactatttagggaaaaataaatagtaatatttggcattaatatgctgtgtgtcatttgcctttcatttaatgaatgtgtttctgtggtgccactgtagagatttctcattcttcttagccagactaatgttgagagcggcttctcctccttctgtttcttttcagtggagtagactctaaaagaaaataagtattgctatttggtctctggttaccaattacacaatctaaagaaatacagcacagtataataacttctcacactgtatttcatatagcaactagttaacatatgcctcttacatcttaaagcattatagctactgacatcatgtgaaattactaacttctattttgcccattaggatgagtaatctactcaccttgatcagttttgaaagcaccaaaacttctcaagtatcactgtttctggtctttacactttaagcactttaaatatctttggtaatggattttatcctcctttttgttccctttcagcacatcggtcttattactttctcataaaatcctttgctcccttttccacagttactgtattaacgttgcagacctcagctctgtcatcacctctcaacttgactgtaatatccaccaaggcagagaccatggctgtgttcactcactattcaaatcttggcacccaacacagtgcctggcatacaattaatagttgtttaattaccagtgatttatacttactcattctcttctgcctaaaatctcttaaatttatatttaacttcatctgtttttatgaggaaggattttgttttctgaactcctgagcttgatttcattttaaaggagtttgttatcttttgtgctaattgtggctacccttcatcctacccaattatttttctctcttgaaactggaaaagatggtcatataaaaattggttcagttcttactaaacatttagtagaactagctttcagtgtattatactgtattatctaactaaatatttttaatatttaatatttaatttaatatataactaaatatttttaaacatgtttaacattttcagaaaagacagaaagacctagagcagattagaaattgtaggcatcatttgctttttgaagaaagacattttttcaaatagtggtgcattcttaagaaataaatcaagaaaggtaatgttgctttttggtcatatcatcaggaatgttggtcagattcttattagttacaggaatgaattgatcactactctgatgtaaaattcacttatgatttagtctttttctctaatttgaaactgtggcaacattttaacatatttcaaaatatatctttctctatccattatatttttgataacactttgactctactattagtttaaaggtggttttttagctacctaaacacttctatttcattcaggttttacattaagatcattaggaatgaaagctaacatctgctgatagtataatagtttatatttatttatgatgttatgtgatctcactatccatatatactattatatgcatatgtgatatacatgaatatatagctatacatcatatataccatatatgaatatatacacacacatatataatgtaactaatatgaccctattatcaagctttaacagtatacatatatctctaccttgtttctatgtcatatggactttgtgaaattttgaactttataatttatagggtttttcttttcttttcttttctttttttttttttttttgagactgagtttcactcttgtcacccaggctggagtgcagtggcctgatcttggctcactgcaacctctgcctcttggcttcaggcgattctcctgcctcaacctcccaagtagctggaattacaggcacctgccactgttcccggctactttttggatttttaatagagacggggtttcactatattggccaggctggtctcaaactcctgacctcatgatccgcccacctcggcctcccaaaatgcagggattacaggtgcgagccaccgcacctggcgtataatttgtagggtttttcatactatttaaagacattagaatatgtatacatgtatgtatatgtgtgtatatatagaggtatatatatattgcatatcgtattctaattagtattgcaaacatattttggccttttgattatttctggtgatagtgtaacatgttttctttggtgattttaccaaacattatcaactaccctaaaatctctagcaaaatatatgcattaacagtactctgaaagacatgtacattattagttatatgagatatgcactcttctggatactatattttagaatagtgtgacatgtaaaagaactcacctaaatctcaagtatacttttaagcagtttattattttatttttatctttcaaatactaggtttcttcaacagcgattaaaaaaggctgtgccttataaccgaatgaaacttatgattgtgggaaatactgggagtggtaaaaccaccttattgcagcaattaatgaaaaccaagaaatcagatcttggaatgcaaagtgccacagttggcatagatgtgaaagactggcctatccaaataagagacaaaagaaagagagatctcgtcctaaatgtgtgggattttgcaggtatttctttctatagaattttaaaattcacttttaccatttgtttggaacagggattcaaaaactgagctttctgttctaatatccagaaacctggtagactgtatggaattattccaaagcccttcatttctcctaattttacccttgcctcyagaatggagaagaacatggagggatatgttaggaacaatttggtgctaggtactttgatcggttgctgacaaatatgctaaaagtggtcaatcctagtaaaaacccagaatagttctctaaacatggtctgttgtttttctcttattagtatgctaaataataaatagtattattctcccagatttttttttwaaaaaggattcttgcctgtcgtttgaaagattaaaaaaatttgtctctaatctttatttaggtcrtgaggaattctatagtactcatccccattttatgacgcagcgagcattgtaccttgctgtctatgacctcagcaagggacaggctgaagttgatgccatgaagccttggctcttcaatataaaggtgatttgttctgatcatttgaaaatagaaaataattcatgtgtctgtgtgcgtgtgtgtgtgtgtgtgtaagttaatttattttgggcaaacaattgcttcagtctctttaaatactttcttaaaagaagcactaaaattttgaattgggaaactttccgagtaatgaagtcataacatgaaaattgtatgttccatgttggtgaatgttattggtaacctgaaactcttttatgctgtaaaacttgaaaatatatatgttcaactgttttttaattatattatttcttaaatgaaatctaaatttttctaatttaaaataagctatattaaagaaaagcaatctatatatatatatctcatcaactttgtactcaggggccatttagtgtgaaattcttcagattgtatcctttaagtggtcccagattattatgctgttacatctggaatctcccttttgttgcttttctatcttttcctttgttgtcttgttgtcagctattccttcaaacactatggctttttagaatggagactaaactgctgcttgcatgatgctgcaatgaactcttctgtgcataaagtccttaaaaagcttgtgtcaggacatttaaccatgtaattggctgcatacatgcttgttttgtaatttgggtattttttaatgtttcttttattaacttttttacagctagccaacgtgagcaaatagtacagtggcagtcatatttgcttgagtggcttttattctttcattgtagactccaaattggttgactttaaaacgaatttagaagattaaattcacagataaggaagagaaaatataaactatatgacgttaatttgatataatttgtgggtttatgaaatgcttattttatttaggagtgaataactcatcttaaggcatgaagatgggaaaggaaaactataccactaccgttatatatgccacctaaaagggtgaagaattgggttaagaaaggccaaaaatgactttttaaaatgtcgtaaggttacatttttttcttaggtttaaggaaaaaaggacagttgttcttttcttcttctgaagtctgctagtttctcttttccattcaagtgaatgtcacggaaagcaaatatcaacaggaatgtgagcaggcccagtttgaaagcaaacacaagagggttttgtgtctttccctccaggctcgcgcttcttcttcccctgtgattctcgttggcacacatttggatgtttctgatgagaagcaacgcaaagcctgcatgagtaaaatcaccaaggaactcctgaataagcgagggttccctgccatacgagattaccactttgtgaatgccaccgaggaatctgatgctttggcaaaacttcggaaaaccatcataaacgagagccttaatttcaaggtaacatggtaggctggtagagaaatgtaatttattgattctcaactgcctagaaatgtcagaaattttgagaagtgagcaactcacttaaaattgtgggttttctttccttgttgctgttagcattattaaagtcctttccattttaaaattatttatgccagacttcatttctaattcatagaaatgggaacaaaaaataattagaggaacctgagagaaactaagagaccgtttctgggatactgagaaaatgtttctgagagagaatctgagaaaatgtttttgatgccttttctgattcaacttcttatagtggtgattcaatcacaagggtaaaggtgaatactgaggtcttgggatcatctttcttctattattctttaactgttatttttccatttcctcttttcttttggaattcctgttttatggacatcttgatcttttgtgccactcattcatgaattttgtcactgtgattcccattccaatttttttccctccgtattgtgaggcagctgttttatttagtcatgaagaccactaacttggttttcagcagtgtctcactaattacttagttcatacaaaatgggctttttattttaggaattatgttttaaatgtttaaagttatcttctcgtaagccaaatttttataaaatgtaaataaatcagttatcagagagaacactttttttttwaaatacttggcagaaaaaagaaatcttcactgggtactacagggagtgtggtgtaaactgtactgaaaaatacccttgatagttccatatgacaaacataatgatgaatttcacttagtctgtcttggcttagctcaatagcactaatgatcaagatactggctgataaatagagtcctatttggcctgggcagtcccagcataattatgtaatagtgtcccactatattctcaaaagcattccaatttggatgataaattatatagtcaccttggttataactccatgctggccagttagcttagttctgttccatttatatagattatgtgtgcttcactccaaaacctaatgagccatttgtaaaagtgatggcttttgcggtgcccagggagagaatttgtatgtttgtatccttcaacacacatttattacagttattaaaaggttttattgatgatagatggtaatgtcatgtaaaaatgacatattatttatttgtagactttcctattctcttgttggacatgtaattagaaastaatatgacttaaagaaaaacaaatacacaaaatttattcatccaattaatctcttaatccaggtgttttttttttctgagactatacccatacttcaataactttgttgttactgagaatattttgagtttccctttttgtcattgttgtcagagaatgtatcatatctttaaaaagacttgttggaggatgagtttgttttgaaaaggcctgaatttagttgatgcaaagtcacagataagatggttcattaagctgtattaatactgcttttgtctaatagatatcattaccaataagtcagactagtttttcttttggcacttataaatcacctttgaagacaactttttacaaggaaataaaacaaatgctttgagaaataccagtattattgaaagaaaagtatatattgctaatggatgcagcattctggcataatggtttgaaaactcatttgattgctttgtagaagaatgactctttcagatgacccagggcctgtgagcctgccagaacttgaaaattctttcttccctgaggtgcttcaacctgaattcaaagagcagcttttaatctattagagatcattttttgtcctctcatttatttttcatatttgcctttgatcttagctcttctctaatctttttctgtctcaaccttattaacakgtgtctgtgcagacacttttaagttttgttttttggctcagcctgtcagttaactgataatcatgctgaaaggagaagcaggacaaaacagagttcaatgctgacaatactccttttaatcttgtccagcccattagcagagcaggcatctctgtgggccttgagacgtagtcccgtaaaactcatcccgtttctacttgatttgctttctttgagaactcttgtttayttttatatggaggtttcctgccttggattaaaacataaacctcaatctgaagttcaatttcatcttaatttatgaacgactaagagagggaacatgaaaagtggaggttagtgaaattatctctaattctctgggttaagagatacatgaaaacagtctcttgagtaaccatttgcaggtaaatatggaagtaatggttatggttgtctctttaagtttttagtcacaagtagaaaaagaccaagttaatttttttctgtgtgtgctgaatttctatttgtagtaagtgtaagaatttaagcagaaattctgattcgtattttcagataaaaagaatatgtaatttccataggtccagaaatagggagagtttgccatctggtggttcttaacggcactctggatattattaagagttgcatttctatttaaaattatattttaaaaaacgtttggaagatacttttattgtagaaactatcctcttagggccattctttaaaaaaatmttattttatatatttctcattttgttgatagtgattagattctaagagcaacagaacaatgatcatcctctcctatcagaatcactgrtgtttagatgatttctcattttcccaagttcaaggttccatgaaaaacatagcttgagtgggattttatgtctctgcgtttcactgttgatatatatgtcctcccaatataacattttacaaataaccaagcacaaaatttaatattttaccttgaatatttaaaatataataatatccaaaagctcttgtaatktgtactgatatcttatactagcgtgtctgtttcacattaagtttaatgtcttaggatataaaaaatcttttttatggttagtgatttatcttgtttttttttccrtggaatttctggatagcgagataaatatttccatactattttatttgatatttccaaatttgcctctgaatcaacaattttcctattttaatttcattgtacttgttccttacaacctaaatagctttttattatattttgattttatttaaaaatgtacttctgaataatatatctgtttctgtaaaaactgttagcactgaatttgccaaccatttgacaaatacacaaataaaatagatttttacggcttgtcatttgtaatttcatagatccgagatcagcttgttgttggacagctgattccagactgctatgtagaacttgaaaaaatcattttatcggagcgtaaaaatgtgccaattgaatttcccgtaattgaccggaaacgattattacaactagtgagagaaaatcagctgcagttagatgaaaatgagcttcctcacgcagttcactttctaaatgaatcaggtttgtgtttttcgttccttattttcaaagctcagctgtagtaacttataaaagtgtttctgaatcttttatagaatttacattcaaagttgagagaatatccatacggttctttaataggccactgatttttttctttttggaagatcatcatgtgtgttcatgacaaatcatgtatcatgtcataagaaaacaaatttagaaatcacctaggagtaaagcagtggaaagagtccctgagtgggagttaaaatatttgggttctagaacttgtctttactattcaggagctgtggaaccctgaatagtcaaatgacattcataatgtcaaatgagtttagtgcatgtgaaagttatttttatattgcaaaggggaattattgttggcatggtctaactgggacgcttggagagtcaatggctccctgagatgatgcagcttctgagtggaagatctagctctcttgcatcaaatattgatctcaaagatgaaaattctcaaagcaacttcagtgctaattgtgtacttgatcatattaccttgctagaaatgtgtgagttgtttgatagtactagagtaagtgactgggaagctgcttttgatccctagattctgttgtataaaaaatagcttcccgtggtttatgatctgttccttttccccatcgttcttaaggtatgctgagatatgctgtgtttcttatctgtatttgaaaataaaacatgtctttgtagtgtgtattcagcaagcgaaacagaaaattatgaatttctacttatgtgtgaaatatgctctgtaatgcatgtcagtgtctcaaatatgcttaaatatgatcattttatgtagtttaaaaatactccattataatwttggaactttagaccataggatgcacagcttctagtcccagctctgycactagctatgctgaaatttcttcacctgyaaaatgaggaagttggactagattttttctaaagccccttgatatttgttctagattccatgtttcactgtttgatgactttttactacaggagtccttcttcattttcaagacccagcactgcagttaagtgacttgtactttgwggaacccaagtggctttgtaaaatcatggcacaggttggtgtcttttatttttgtggcacgggggttatggtcaaagcatagaacagatggcgcccagagcattgagcattttagartttgggtttagttaaggcagaaacttttgtgaatttggaaaactgtggaacatttcacatagaagactacttgaagagcttcatggaagaaggaaagatgtcttgagttcacttccatgacttggttttcaarccacatacaratgtttgtatcactctgccccatgctgctttactagatcctgatgatgtcattggtttggttactgaattagtcaattgaatgawggctttgtggaaatccttggggtaaacacatataagaaaattaggttgctgagcctgtgaaacctctatctagataacatggaggkgagttttgacttaagtgaaatgatctgagctttaaatgcttacgattttgaaaactttggatggccttggttatagctatttttttcttatatttcacatggaaaatgatttttttctccaaatkataatccattaccaatgagtttaattagttataataatccatctctgtagctttgacataaaagaccatttgagcaaaacatactacctcagggcttttcaaccccagcatgatgacattttgggccagataattctttgttgcacattgtaggatgttagcagcatttttggcctttatattcgagacgtaagtagtatcctctagctgtgacaagcaaaaatgtatccagacattgctaaatattgcttggagaatgtgaaaaattaccctagttgagaaacattaagctactgatttgttgatgagtaaaatttatagttttgcatgtggctgcccgagttcctaaaattattatatatttttatgttagaaatatctcttccaattaaaccataaaggtaattaaattcactcaggcagccttgaataattgttcctaaattccatctaaggaaaaaaaggaagctattgtgaagagagaactcagttgaggctaaatcctgtaccatggaactcaagagcatattgaaacattgcaatcagcaattatttgcagtgtgtcagttattactattttggtaggtatttttaaattagattttcagccttctgcacatatgtcatggataatgtgattttactcaattattaaatgataatggagacagtagtgtgacccagagcacttacttgagcatcagcttgacctacgtttcagtctctttaattacttattagctctgtgaaatttcttaatgcattaagcctttgtttacttactttttaaataaggaaaataacaattatcttctatattgcctccctggttcagtgtaagtgaggggtaaatgttagctaattttatattggatctatttggcaatttaaagaatgttaatcaggaaattttaaaaaattcagaactataaagaggtacttacgtagttttggaaagtgtgtcatgtatggggacaaataaaaaagatgtgtaggtagctgcatcctgtacagcaaaggaagttttaaatatatccagcaattttgttgtcctagctggcgcacaatagttatcaggaggtaactcaactccacatagtcaaggaaaagctaaagttgctctctaaagtggtgtgtttccatgtcactatggaacacttgaagttgcacacatgtgaacattaggatgggtatatcttatacagtagaataaggaagaggtttgcatcagaactccccttttaaaaaaatgcagattttcactatgactgcaataaaattcctgaagattctgtggagtaattaagttgaaactccatgaaagttcttctcattagcatagttataaatatgataatttaagtaaaaattaagttaatttgagccactcaaagttacttttaaagacagatttaaaatgtyaataaaakgataatttaaatttcygattaacctaaaaaagaagtgccatcatttttatttatgccaataaattgaaatataatgtcattttatcactaaggtttaaaggaaatgaaatctctaaataatcaagtgaaaccaagagcaacttgtctgacagctattagcaaaaataaataggagtattcaccttcatgaatcaaggcaagggccggaataatttcatggtgcagaagctctaatgagcccacccactctatgcgccccgagctgttaggtcactaaacttattaaaaaaaggtaccattaaggcagggagaagtttacaagactcatttaactgtatgataaaagagatatgaaagagacctattcaattaatcaggtggaacattaaaaagcttacatggcaatttaaccttgataaaaatacatgggagaaatacaaaggaatttggaaaattctctttccttgaataaggcatcagttagctattcaggttatgaggttgaaggaatgttaggagctcttttaaaggtgataaagtcaagataatgttgcagattttattcttatgtaacaaaccccctcgaaacttggaggcttaaaatgtgaacaatttatcatttctcgttcttctgtggcttgactgggctcagctgcgtggttctgctccacatggtattggcaagggttattcacttggcttcattcattaaactgagctggaaagtgcaagaaaggtacatgcatgtttttggagtattggtgcttctccatgtggcctatcatatggctaagttgggcttcctcgtggcacggtgatcacagaataattagacatctttcatggtggctggttaccaagagaaatgaagcagattttttctgtcctcttaaaggctaggccaaggactggcaaaaatattaattctgctacattctagtaamcagagcaaccacaaacctagctcagattaaaggggaaggaaaagagactctatatgaatagcacctatgtatagggatggaaatgatgtgtccatctttggaaacttccactataaatagtggtagcacgctatagatccactaggaaaatcaagcacaaactctttaaaaaataagtgtatcttagtaaaatarattagaataactagataataatggctaacatacatgaggttaatatgtgcttttcaaagattagctcatgtaattctcacagcaacctttccaaatggtactttattagcccctatgatacagatgaagaaattgattgacagagaggttgaataatttatccaacggtacacattcaggaagaggtagagttagaatttcaaaccaagtagtttgactccagggcctatgagtttatacattcatagggctgatattcaaatgagagaagagaagtaataaataaacatataatatgttgagtggtacagagtgctacaaagaaaatatgaagtgcagttggagatgaattgtcaaaaaaggtcttagcacttaaaaaacmctaaaacagcaaacaattctctttaccacctaaactgtaagagcratctggaattgctataaagtacacaacatgggagaagtcttaaacaacagtttttattatttataggcccattgcacactgtcattaaataccaatatgttcaatcaaccatgcattcattgattcaataaatactgtacatacaaaatagaaatacagaaatgggtaagacaagtccttgggcctaaggactttataacctggtatttcactcaactacatgatagcataaataatgtttgcttctgtttaagtattccttaaacattatagatctcccaaagaaaattaaatacaaacctctttttaaagtgaatttgacaaagcaaaataaattggaatatatagataaatatgctaaaatttgtcatatgtactttgcrtactttacatgtgttatttcattctcagggcaatctaagacagtcacttttattatctcattttatagagaagaaagctgtgcagtaaagaaatcaaatacctttcccaaggttacagagctagtagtagagcctggatttgaatctgggttctgactgatttttaactgccatgacaaggatcaaagctcaaagtrtgatctctgtgttagaaacatcggggttgctctttaaaaaagccgattctcaggcctcaacccagacctactgacccagacactgcaagtagaatccatcaaaatgcagtagttactttgagaatcatgaaactctgctacacagtctgtcttcctattcatggaagtcctctcctagtatataaatgtgaagtaatatttctatttcaaacctgtattgataactgtctggaagataattttcctgggaatatattattgatgagactgcaaaacagatgtgaggtattggattgatctttccattgtagctagggaaatactgatgttcattgtttcagtgaagttcaatgatttcckatccgaattaactcccttaatttaacaattttttytttttttttgagagtgaatgcccctctgggcttctaggccacatggttgctagagaaattaggtactgtgttgcacttgaaaacactaaaatctttctgactactttcactgagcaaagagacataaaatgctttaaatttgcaacatttcagaaaataaattytagtgattatttatgactcgaatctttcagattttgacagtgaaagtggaaggttgtccaaaacaccctaagggmattatttcgcgtagagatgtggaaaaatttctttcaaaraaaaggaaatttccaaagaactacaygwcacagtattttaagctcctagaaaaattccagattgctttgccaataggagaagaatatttgctggttccaagcaggtaaagaaaaccttaaaaaattaattgctacrtggaaattcactatctattcttttaattgtcaaactaactgtagtctataatagatgtattaaataaataaatatattttgcttctagtgtaaacctcctactgacatgtatcatttattttggaataaaacattgcatctgacactttaacaatatagtaaatcacttactttatgtrtatagttactagttggcttatcactgttgaaattatttaagaaaggtaaatagtggagattaatgtgtgtgtgtgtcyktgtttgtgtatgtgtgtgttcttaaacaacactgagagagtttattaagcaagttctgagaagatagtgagttttcaacagaattttaaaagcatttatggcatcacaatggatgcctatgttttagyctatactatggaaatttttcctactgctctaagcaactgggaaatttataaagtaatatgatgttgaaatgtgcaaattacattgattgatggatgcagccaattktaaaaataaatatacactttttttctaggacatgtatttttcaggatttatataagattacatttgtctatgcataactaattgtaataatttatgtattagtgcacagggattacygaaaatatttcatgcatctacatctgagcatgcatttgaattggttattgaccactgaatttttggtgtaggaaaaatatgtagtgaaacaatgttacaaaaagattacaattgtttggaatgattaccttcattgactttaagcagtaaaatcatttgctcaacawggttgggtgttttgtgaggctgtataaccatagtgtccttttgcctttagtttgtctgaccacaggcctgtgatagagcttccccattgtgagaactctgaaattatcatccgactatatgaaatgccttattttccaatgggattttggtcaagattaatcaatcgattacttgagatttcaccttacatgctttcagggagaggtaagtatctaatgaagacttawtagatttttagagactattaatttagacttattaatttttagagaaattagggagatggcatatgaaaagtaatatgccattttctcagagtttacttgtttggaaggcagctgaagaattagaaaataagctcataaaaccttggagtaggcaatctaaagacacacaagcacatataacctcatctaatttgtcaggaagaaaattccttaggtgctcactcagatcttgacygtgattacattgtagggactgtaattatctcttttctgttgcacagccactaaracatttacaaaaaaagagcaaatccggtgtttataatgctaactctttcttctaaaataaatagagacattttggtactccaaagggaaaatatcattttggggattaaaattagctttacacaggtgttactggtttccaaaataaaccttaccttgattggaattaatcaacatataggtagttacattgcattaaaaagttcagaaagttttgcgtttagcatgatcaaaaacttctttttaaaaattatgaggatttatttatgattttctttcttcatctgtygagcatattaaactgcttaacagcatcaacctgaaatggatcttaatgtgcaggggatttaactctttttattgtaaagttgtggataaaatatttaatagatatggatgaggactcatatcagtaacaacccaatactttatttcaaaatgaatagatctgtattacaatcacttgtgttgtgtgcagtagattttttccctttaacttaggaagcagttaataattaatggctccattttttagaacgagcacttcgcccaaacagaatgtattggcgacaaggcatttacttaaattggtctcctgaagcttattgtctggtaggatctgaagtcttagacaatcatccagagagtttcttaaaaattacagttccttcttgtagaaaaggtaaggaaatcaatttgaatgttttcaattgyaacactaaagaaatttaaacttaaaaaaaaaaaaaactttaccttaaagctttgcgacagtatgaggtttagacaaggtgttgagctctgttttgaatcatgtaggctgtattcttttgggccaagttgtggaccacattgattctctcatggaagaatggtttcctgggttgctggagattgatatttgtggtgaaggagaaactctgttgaagaaatgggcattatatagttttaatgatggygaagaacatcaaaaaatcttacttgatgacttgatgaagaaagcagaggaaggtatgttttgatacaacttacaaatgcttttaagtgatccttcaatacttatgaagtgacttttaataaatgtaaatattcttatccataagggatgagttgaaaaatagtatattcaattatagggacagttcagaaaactgaattatatttattaccaataaaatcttgtattctagattcagaaaatgttgatttgagggtttgaatgctggcttattgagcaacataacctcatctgtgaaaccggaataccaaccacatctatctcatagaactgttataaagattcaaatagacaatacatggacctaatttaccaacatgtctgccatataataacagctgcagcttcatgaatgtggcaaaagcagagagtagataactttctagtcagatgtctggtagtctgcagcagttcagaattctacaagtgaacgtaggaataagtttttaaaattccaagtagatagatactaagtgaatctttaaaatgttctcaaatttcctagagaaatataggattggttagaaagggagggattagaaattatagaaaatattccattattttttcacatcaaaaccacaaatttatgtatctccttaaatgttgtttttatttaaaaaatgttttattacttctcaggagatctcttagtaaatccagatcaaccaaggctcaccattccaatatctcagattgcccctgacttgattttggctgacctgcctagaaatattatgttgaataatgatgagttggaatttgaacaagctccagagtttctcctaggtaattctttttgttaatttgagaataaaaattaggatgtaattttctccttataatttagaaaatagatttcataattatattgtcatagattttactgtcttcatatatttgttataatttttgtatttggaatgatatattttaaaggaatataatattacagatctggaatttgttttgcacataatcatgtagactaggatcaagatgaggatgagattatcatggaagcagaaatatttatgaaatatatctttgtatttgccttaattgccagggatatgggaggcaaataagacagttttcaggtgagttaagtgaagcagccatattttataaaatgacagaataggtaaaggaagcacacctcagtgtagccatagcaggggttttatgactcagtgtgacaatgctgaattctcatagaaatattcattaaaagccttgaaattaaagtcaaaagtgttacatggtgacatactcaaatacttttttttttttttttgatatgctgaacaatttacatttcttggttccgtgaattcaatcagtgattttcagtagagtatgatggaaatcattgaattcatgtagcatgtttaggtgctcattgagaaaaggtgaagtcatggtaaccatgtttcaatattctcatttgtatcttgacttcctgcacatggatttttgggcmtaaaagatgtttttaaaacatgctcatacacttcagaagatgaaaagtgtatgcattataactactttgggaaagaaacagtcaacatatgttactgtatgtcattctgtagattacatgtgtggtttctcatgtctctcagaataaaagmtaatgtctttacaagacctgcgatgctgtgatctgtctggctcctcggttatcatttttaaaaaaagatatactttgtacaaatttttttaattgacaagtaaaaattgtatatatttatggtgtacaacatgatgttttgatatatgtatatgttgtggaatggagaagtttagctatttaacatatacattatctcaaatatttatgtggtgagaactattaaaatctactctcatagcaatttacaagtatacagtatgttattattaactgtaggctgacatactcaagttttaaacattcctgagagtcattgggacaactatgaaatgcattagattgatttaatataaagcatttgaagacaattttgaccttactttgtttagtttttgttgttgttgtgtgtatacatttaattttaatcaaattaccccagaaataatgcctaagatctgtcagtcaggacataatattattagcaaaaagttgtccaawatttgagacatgatatttaaagctaaataaactcctttatacccctcttattggcattgattgggaagtttaggttgaatttaaatgctttggaactcaggaagttaatgtattagtaatagtgggttaacataaaatgctgaattgtccttgctgaatcctacatcttaaccccagacttcaaggtatacaggaaagtaccagacatggtgcatccttcctctgaagaaatcccaaactgtcagacacagatccctaaaatatttctttttcctgcattaaaatgtgtttcagatgaatggacacgttttgagtagtgtatgtggaaacgtcatttacaaagtctgtttagttggccaggtgtagtagctcactcctgtaatcccagcactttgggaggccgaggtgggtgtatcaygaggtcaggagytgaagaccagcctgaccaagatggtgaaacctcatctctactaaaaatacaaaaaaattaactgggtgtggtggtgggcatctgtaatctcagctactcgggaggctgaggcagagaattgcttgaacctgggaggcggaggttgcagtgagccgaggttgtgccactgcactccagcctaggcgacagagcgtctcaaaacaaaacaaaacaaaaaacaaaaaagcaaagtctgtttagctacccatataggaaaatgtttgtgattactctcccttctctagacccatgtcccataaatccataaatcccatgttcatttacagaaagcagtctagataggagtttctcagtctttgagctgttgccattttggcttggataactaactctttcttatcgagggtcatcctgtgcactgcagaatgtttggcagcatctctgtctatccactagatgtcagtagtatctccccttccctcagatgtgacaatcaaaaatgtctccggatgttgccaaagataaggggtggggttgaataccagtgatttaaacaaattaggtgtatccttctaaaaacattttacaggtagcgactccagcatctttatattagmgtaatctggagaaggttatgcctctctcaattttccctctttccatttttatttgtagggcagcaatgcattcaggcttttggtaactctttttcccaagatagcagtaactattatgcagtgagtaatacgacccaccttaatagatatgaatagacttgttttgtgaatatattttaaaatataaatgtatgggattctgttcatgcgtctgagaagccacagggtacatttcctctttgtggagctatttatttttctggagagccaagacaggtatttccacttcagtggtgtgatttgaggggttaggaaaatttccttgccttcaattttctttccaacctagatgtcacaaatacataatagtagtccttaactttatttttgttttcagtcacctgaaagacatgacaatccatactccatattaatgcagcggcgattctcaaatagagaagggctttaaaaaattagaaatctctgccgggcgcagtggctcaygcctgtaatctcaacactttgggaggccgagatgggcggatcatgaggtcaggagatcgagaccatcctggctaacacggtgaaaccccatctctactaaaaatacaaaaaattagccaggcgtggtggtgtgggcggctgtagtcccagctactcgggaggctgagtcaggaaaatggcatgaacctgggaggcggagcttgcagtgagccgagatcgcgccactgcactccagcccgggcgacagagcgagactctgtctcaaaaaaaaaaagaaaaaaaaaaagaaaaaaaaaacaactagaagtccctactccaacttgaaatttggatgtatctccctagagtatgtttcttctctatgctgcattgcaatttttctttgttgttgatagttgtccagattgaggggaggcagaacaagatgcatctatatgtttccatctctccgaccgattctctcccttccccctctacttgctttctttctcttttccctcttctgtttacccgattctatttctgattccagtatgtaacagttccctctgaagctctctcaataccaacaatcctaactaatggtttttaaaagtcaaatattaagtactggagggatagaatgagagaataccaagactgataagatgcaaataatacttttaacatatttacaatctaatagaaatacaagacatgctcaaataagttaattattttaatatactctctctgagcataaaatataattatatatgctcattatagacatataaaaaataaataggtagaggctttccatagatgtgtaatttcaccacttgaaaattactatatttccttatagactgttttgtgtgtattcacttatatccatcaagtgactacatttcaaggcactatatgagaaccataaatattgtacaaacaggatttgctaaatgtcggtggagagtaacagtccacggggctgatcatggtcagtttgtgaggcaggcctccaaactccttggggattgagatgatggagtagcagagctcttcaagggtatggaggcctgaaggtacaaagcatgctcaggaaattttggctattgcggtttgtctagagcacttgttctcaaccttacctgctcattactaattctactaagtacagaattaaaagaagaaaaaaatctaatgaccatttcctcctgggactaattagatcaaaatctttgaacccagacattagcgttttaaaaagctcctcagatgtactattcagccaggactggggcagggaaagctactgaactccagccttgagaatgagaagtagaacaagaggagaactttaaaaggatttaggggccactatatgactatggagctgaatttagatttgatttagtaggcaacgcggaataatttgtttctgaacaggagagtgacacaatcaaagtggaatgataggaaaattaattttgcaagagagagagaatgagttggaagtaaggaactcagaaggcctcctgggactcagcagaaagctctgaggccaccaaatgggtgtggtggtagtggaaatggagaagaagggaatgtaaatgaggctacacagtggactgccactgttagccgtggggttagaccacagcaagagttaaaataattcttcaattttaactccagaagggcctcaaaaagactttttgtcttgttatcatcagctatatggaaggtagaataaaaactagttaggagaaaaggtaataaatgtggcttttgataggctgtgattgagttggaagggcataccagtgaaatcaccaacacaaagttggaagtgtaggaaagcacttaggaggtggctataagtgaaaatgtgaaaattctctacattaaagggatagatgaagtcacagaagtggatgacataattgagcagggtatgtgtagagggaagacgggaaggttaaggacaaaatctttacatatatctttcttggagtagaaggaagaggaaatgttaaaggagatttgattcaatgaaacaagtaggtcaggtttctattcaaatttacaacagatataattacaacagatataatttatttagtttttttcgcttggacagcttaatttaagtgctttgtattttcttttcaaaaggtgatggcagttttggatcagtttaccgagcagcctatgaaggagaagaagtggctgtgaagatttttaataaacatacatcactcaggctgttaagacaagtaagaaattcaataatataattatattaaattgcacattattaatctactggaactcttattttgcatacagttgtgaaaatgcaaaataatgaccacatttctacttaagtttaattatgcaatcctagtttgtcttttcgttgtggagtagaaagttttgtgttatttctcctgttgagaaacaaarcactrtatctgagaatccttataatcgtgatacatagtgtgttgtaaaactttttgtaagactcacttacactcctctttttactttagaaccttgctgttcaaaatgtgctccatggacaagcagccaggcattacctaggagattgttagaaatgtagaaacttgggacttttcagtgccatattattgttcctgatactccacagtagtcagactcctagctgcctccacctgcttccagaccttgaagcctagcaagctcctgacttcgccttctgttttcttcagagtatttatcttttacttttctggtctagggagagaatgatttttatttttattgaacatgacttctgtgtgttcagggtgaaagaagaagtttaatgcatgatctcacattgctaatttgattgaaggttagaaatcttaaactaaaactctcactgataagcttgcacctctcttttctggatttatccactttaataagaactgctattgattacttgctacaaagatggagaaagttagcatgcttatcctatttcctactccctgtccctgtccacttcctaaaacttaaaattggttgcattaattttcctgatatagtaacaattataacttggaatgattttcaaaacttttgtttttttagtataccaactctagacagcatggactgactccttgctatgtgagatgaggaaaattaacgctattctttctccttttcccatcaccttctcaagttctttaatttattctattatttttatgtagtgaaagtttataacatttatattctggtctgtactcataattaaattgttcacattttgtctatagtttggttctgagaacaaaaccaataaatgccatttatatatttttttatttgtacagaaccaaaatatttctacttctagataaagaaatgcaaccttctgtcactaacttcttttactaatagaatagtaacattccaaatatcaaagtcaaatggattctctattgktatgtatttatcatcaatttataaaaataaaggcatattttaatttggtcacatttttaccctgatttaaaaaaaaatttgtttttagagatggagtctcattaggttgaccaggctggtctggaactcctggcctcaagtgatcctctcaccttaaccttctgagtaccagtggtgatttattttatgtagctttttgaggttttctgattatatacatatatttttaaaaaacgtacttcaggaaaagatatatattttcatcatgacttcaagtgtttctaagttcttaatcatacagtttgtataacagaatctactttcttcttgaagacattcctcattcagcacatgacttactgctctaaacaggagagatggatttctaggctgcttgtgcagtgattaatctatgagttagtttcctcgccctctttgattactctcaatatttcttggattccatccattctcttggttggattgtccttagtttttgttgaagaatatcttcgagtaatttttttaagaaaaggtgtttgtgaggtaaatgttttcagtccttacatgttaaaaatatcttagttttgccctcccatgtggtggatatgtcatcacactttattttttaggaatctaggcttgaaacaattttcttcaaaatttgaagaaaattccattgatttttagtgcccactgttgctaatgaaaagtctgcagtcagtcagatgtttgctcctatctaggatacctttaatttcattttgaaaactgaaaatttgaccttttgaatttcatttgttttcagtgttctgaacctttacaagtatgtgtttgtgtgtaggttgtttttcattccatctaattcattattttgtgaaaaattgtcttctgtgtattctcttctattatttattatttcctccctaacatttattaatcatttttattgacaactactatgtaccaggttaggtgatgggacatatgatatatatatagtagtaagctaaacccagtcaaggctctgcttctctggagcctatatctagttacttatgattcattattgcttatcattgctccaagagtatatgttagatgacaagccttttgggtctatcatccatgtttgagttccctcttcaagttttatctataatttgtgttacttacttgactgtctcttacaggtttctaatattttttagaattgcatcatctattatttagctttctggtgaattttgttttgataatcatattttccatttccagcaattctttccatcccctctggttgttcctttgtagccatgtttttggataaaatgtccataggtgtttctgttcatgtcaattagaatttttttttgtattacttgcattattgcttttttctctgaggttatttgctctgtgggttcatcttgatctttctcttttatcttgtcagttttccaaattgagtagttttgggtgacttcktatgaagtaagtactctattgattgttaaaraaggactgtattgattattaaaggtaactagaatgggcattcttcacattcatgtaggtttgcttgttcaagttaccactttctgaacaagaaggttagaccatagacttttaarggctgcatactgcaaagggatactctgttctttaggttacatgggcagggatcactgctgagaccatacctgccaaaggaaggcaggctttgctctctagatgctggacttgaaattgtttcccctctgcttagtgctgcattattttttttgcttcttaatctgctgcagagtatctagatcagggtgtccaatcttttggcttccctgggccgtattggaagaagaattgccttgggccatatataaaatacactaacactaatgatagctgatgagcttaaaaaaattacaaaaaaaaaatctcataatgttttaagaaagtttatgaatttgggttgggccacattcaaagccatcctgggccacatgcgacctgtgggccacaagttggacaagcttgttctagatacttcagactctgttctacatctcttcatagatcaataacttgcagcaatgagtttatcagataaattatgttcacttttcatccataaaaaaagtcatgggaggtactcaccataggattggtttaatccagtcactctggccaattttctttaaaattcctttaaccttggtatattggtttaattccttcagaatggcttttcccattgtgataaactggttccaggcttcacgagtacttattccaagtacagaagraaagagggtacctcttttgagtacttgtatttcaaaggaatcaaatggcctacataataacccattaaataaatagatgtctctcagccccagtgagtcatctgtgcttttctcaacaagcactatgttcagggcaatgctttgtgctaattggctttaggcctttgttaccaaactgatcactgtggccctgagggtgctgttacttagaatattcccaccttttctgagaggctgatgttggggtcacttccccctgaactaaagtccaggggctgcatgggtgagggttgagtaactcagtactctaaggaggaaaggaaggggaatatacactgttagttaacagtggttattcctgtattctctcttgtttggattctactggggatttctttctttttttgagtctttattgacattaggaatgagagatagaaacagggtgagagaggaagtaaaattaaatgtgaattcttccatcttataccagaactcaactgtatttttggaatctatatatccttacttttcccttgatttattacaaaaaattcttagtggctacactaagtaaattttgtaacctttaaaaaatacatagttataatattttaagtactctgagtaatagaagatttcatgtgagtacaaaatatcctgggggcattttaattattagtaacaacagtcacactgtagttctagaaccaaattgaacattttatatatagaagcttatctgtgaatcaaatctgacataatctcttttaatgtgtaggtaatttcttatataaattgattttttggccttgctgtcagcatgcatttcaaattttacaccatgtgtttggggagctatggtggawattagtacattaaaaatgtctacagagccaattagtgtataagcagggaggcaaactaagggaatggtggaagaaattaaaaaaaaaggggtgtgcataatgtgcttcttctcttaaaaaaaaaaaaagaaaaagacaacaacaaaaagaaagaaaaatgacatttgacggtcattctaccagtagtcatggggcagatctatattatactgtactattacgctgttttttctttgcaattagtgagttgcttttccaggatagaaaatttggattagacctctgtctgtgcctatgaaaacaagcagagctaacttaactccttctcatcagttctaaccaactgacatgggcattaaaaaaaagattttatctactaagcaaatatgatsacagtctgaagctttgttcttggaaaatcccctctcagggtgttcagcctttcttcttcagcttgcagaattctccatgtttcagtttcctgataaatcagtgggcgccgctactccacatctttgaagctggttgttaagaagcagtgcttctgcagcaatcacagtttaaagcatgaatcaatttaacatcacacaagctatacatttcaacagagttacagtttcagagtaaagtgcaatatacagtataaagcgaatctggaattcaagcccaacaatgtcataaaagaggctgtgaagtctcacatgatgtgggccacagagagggttgttgccattggatcttagctcaaatactaccacatcttcggagtggccttccatgggccacccttactaaggcaatccctctgtccaagccaaaatgatatctcggactttttttgaattgcagagagattgttgcagccagggattgccttagtaagggtggcccccatggcgggcctctctgaggatgtggtaatatttgagataagatctgaatggcaagacttyagccatgtgaagggtggagggatttctagggaaaggggtcagcacaggcaaagaccctatgatgggaagaagctgggcacagcttgggattgaatgaatgccaatgtggctgaagggtggtgattgaagaggagggggagacgagaaggtctggaaggcctggggcatgatcagatcaggtgctgaggccgtggaagtagatgggattttcatctaagggaaatgggaagtcattagagagttttcaggaggggatgatatgtatttttttaaaattgagcattatcctcggtaaacttttgtagtcgttaaaccagagattatargcaggttttacctcatatgccagttgcagctgattagtagtggctatagagaatcctgggctgagaaggatactgtggctaaccagaattcagtagatgagtttgacgtggcctgttagtatgactacactgtgtgcactgtttctgcattaaatgtctgataaaaacagagccaaaggaaaaatagaacttaaaaatttaattctgacagtacagttgacccttgaaaaacataaaggttggggtgctgaccccttgtgcagtcamaaatttgcatataacttttgacctccccaaaaaactgaaccactgatagcccactgttgactggaagctttactgataacataaacacttgattaacacatgttttatatgttatctgtattatatactccattcttaccataaagcaagctagagaaaagagtattttatttaaaaaatcataatgaagagaaatatatttaatcttcgttaagtagaagtggatcattataaaggtcttcaccctcatcatcttcacattgagtgggctgaggagggggaggtagaggaaaggttggtcttgctgtctcaagagtggcagaggtggaagaaaatttatgtatatgtggactcatgcacttcaatcccatgttgtccataggtcaactgtagtttcaaaaccagctttttattactgaaaatacgggaaaaaaaactcagagaagaaatggaaagtttgctatgatccagtcatacagagaaatccatgttcagcctgttgatgcactttaaagaaggagatacgtgggtaaaacctgatgttgaattactcttacatgattttggacttttgcaggagcttgtggtgctttgccacctccaccaccccagtttgatatctttgctggcagctgggattcgtccccggatgttggtgatggagttagcctccaagggttccttggatcgcctgcttcagcaggacaaagccagcctcactagaaccctacagcacaggattgcactccacgtagctgatggtttgaggtaagtaggtcatgttgttttctattcagtgcatgacaagtgtgatcyagacttgctctcaggttctgagaacacttcccagtaacactgtgccccagtaacaatttataaacaatttggatgaaaactaccatttccctgatcaaattttgtaatttcagaaaataagagtatggaaaccatgcagaacctcatagcaagtagtaatagactttgaacccacaagttctgctctagaacccatcatcttaaccctgtactgatctgccttctataaaaatgtataagttaggcttcacagtatcaaagtaagtgtcaattacatgattccaatgaggaaagatgagtccatacttctcaaggggactagagtgattcatgttggattcttcggcatgaccatctcacatgtctcagaggcacacctaaccctgcatccagagcaagctttggagagggagcacactggagtggaaaggctgtggtctttgaagacaaaaggcctgggattcatcactattccacacatttagtaactgtgattttatatctctgattcccattttttaaatagtctgtgaaccatgactaatatttaatgcataaaattatgatgacttctgtaataattggagacattccagatgaaactcttgatgtcccctctgccattgctccccaaccccagtcaccctrttacacctgagagtcaccttacattcctttcttcctctctcatttcacagctaatccttcagcaaatcttttcagctctgccaccaaaatatatcttaatgcttctaacaatttctctcactaacgtctaaatctgagccagtatcatctctcattgcctactggtcccctgcttctacctctgtctcatgatagtcccattcctcacccagcctctggagtgatttttctaacatgaaagttggatcaggacttgttcctgttattacccctcccctgccttatttcttgggkacagtgctcagccactcccatccctgaggttccttgcagataccagaggctttatatctgctgttgatttcactcaggaatgtctgactcccagatgtgctctctacttattataaaggattatctgaatctttctgaatcctttcatttaggactctcagcagagaggatgtccgcaacgaccctttgtctctccagcccctataggactattgctgcctaggattctttatgttttcattttttaaaaacttatttattgtctgtcttgccatcagaatctaagtaccatgaaagaagggacttttcgtcttgtttgccattgtatctctagctcctaaaatagtaagccttcagaattactgtgttgacagtaggggaagggggagaaaggaggaaagaaggaaaacagtgcctggggcatagaagccaagcagtgtatgcaactttccttctcttctttctcttctgaaatgctatgaatatgccttttaggtagtatccagaaatgttycttcctgaaagggtccagaaactactgaaaactgtacagattatgaaatgaaacagggtgcagggatttggatttgagttgatgtttctgcttttgaacaccagggggaatcttgggttacattaatctaggtaaagtgcagaatagtctcctgtatttcagtgccctctttccttcatttaactaactctaggttctagtttttccctaattcttccacaaatccccaaagtgtttatttataaagtgaagaattgctattttttaacactgttcgaaacaccttatctctaaaatgacttattctagttctctgaaaccttactttaaataacaaatccagcagtttctgatgaagtaaatgaaatgtcagcatattttaaaataatttgcctaatttgttcttagcataatgccagaaaagctttctggattttgtatcacaaaaggctagtagatttcagtagctatcaatcttctaccagcactaagtatattttaaaaactcagcattaaggtttatttttccaagtatgtttcagcacaggaaataaaatcatgctcctttggagtcccttaaatgctggagctgtttagagtgacatacaagaactttcttcacgttacatgctctctcttcctccatcttgcttttaactgttagcttacttctccaattcaatccacttcgtttgaactctttatcataattctataaamcttatgaaaatacagtcaactgcattttctrtatgtttctgtgtttcaatatcttcaaaatggaatgtactgccttggtacatcacccactatgaatctgttatttctgttatatcccacagttgccaggccaggatacttgtcccatccaggccaaacaccttcccccgaaagcaagtatgcatttgtccaccaggtccttgactctattttacattatctttttagtcaattcatttatttttatgccactcctgctgtcttggttcagtatgtccagggaattatcagaatttcttttctaaaataaaaatctgtttatgcttgcaattccttgacagttctcaattatctgcaaagtgcatccaaacttcttggcatagcatcaaagatctttctgtatgcctcttgcttccctttgcggcccctgccaccccactgcccacactgcattctagccgtgatgacaggcttgaattttcagttatgctcatgtctgtccatcattgtatttgttattcctctctttccaccaagttgtctgcctagagagctcattttccttaagaatttcttcacaaaccatctctactatgaagctcaagtgtgtcatgaagtgttagcttctccaacttgtgtttcttgcagacactctgtgcaagacattgacttaggtgctaaagagggaaagctagatattatattgttcttgaggttgaaagcttacagtctagtaggagagtcaactttgctgtctttacctcagtgtttttctccytctgtgcttccctagcacgtggtacttacatatttctggaatcttgattaaacacctgtttgaggactgtytgagcacaatccttctggattgtgacaccctcaagggagcagagatacaaagatggctttgtatactaaatgactggccctcatagatacytagtacatatttgtcaaataaatgaatgcattctatttttggaataattctattcagaatcagataaagtttactttaagctatgaagaaagaagtctcttagcaactcttacaataatcacaatcaaagaatgactgtttaacttaatataaaccagtttgttttaataaaatatttgacaatagtcatggttacacaatgcataaattatggctaaattattatcaggaaggaaaaatctttacttattatttcaaaagctattttgcyagtctattaaaagctattagaactgcacttcttaagattaaattctataattgaacattttaactaaccaagatattatctctttsccactgacattatttcaaattaagcttaactatttctttttagcctttggaaagtattctgaaagagtctgtgttctataaatatacttaaagaggcatgtcttataaaggatttggatactattcaatgatgtatgacttggctttagcttttttattcttaatctctcagcttttctcttcagcaggggaagagtacctaatggcctttcagtaatcccttggtaaatttttctttcaagcccattasttactgtgaaggtcaacttcattagtgtatttatcttatttttttcagcccaaaataggtatattgaaatgaatgggcctaatgtcaaatgtcccgactacatccyggaagagagagaatcttcagctgtattagttgatgcagttaaataatatgtactctccaggccmtcatacaattgaaagttcagggtatcgttgctgctctgcttctaatccttccagaagtgattggtgctaggtgatggagtaactattaattgatataatgtgagccaaaaccaacagtcacgaataagcaaaggatttaaatttaactccattaagtcttgtgagaaattattttcaacatrggttataacatacctgtgacatcacatgaaatgctgtagtcaatttgacatcatggggcagagaagacagagttggaaatcagaattttatagacatctaatgtgataataacattagtagctgagatgcggtaagctctttgaccatgtttccagaatggataagacctggttgagatgaaaactttacactgtttttttatattaactatcttttactctttgcctgaaatgtccaactctagttgctcgtgattgcgtgggtcagtctccagaaggttggactttaatattacccgtcatcttttccaagacaaaattgtattcattctaactcttagccccaaattttcttttttaaccttaatatctaacatgattaggtttatggtaaattatatactcaaacagaagaagagactaatagcaagcaaaagtcttatattttcatttgttttcatccaaaaagtagaaaatatttkccaaacattgggaaacattttagtcagaaaaataaatatcaatgataaatagaatagagaaaaattttaaagctgagctaaacctctatgtggttttaggaaaatcaaaactattaaataaatggcaagtacaacaaaatcccatcaattcttatttaacatacttacattttgaaatagttaaaatattcatatgatcattgagagaattcagaattgcctttaagtaattgttcacatatacaaaagaaaagtctccaaaaattgggtctttgcctgagatagatttgtcttaaaattgaaatcattcacttatcagatttgacccttttttaaagcataactttgctgtgtaatattagacttatatgttttgatttccttctacaatatctcttaactttaagggacaaagtgagcacagaatttttgatgcttgacatagtggacatttatatttaaggaaattaggacaaaaattattataatgtaatcacatttgaataagatttcctgtgcattttctggcagatacctccactcagccatgattatataccgagacctgaaaccccacaatgtgctgcttttcacactgtatcccaatgctgccatcattgcaaagattgctgactacggcattgctcagtactgctgtagaatggggataaaaacatcagagggcacaccaggtaggtgatcaggtctgtctcataattctatcttcaggatggataaccactgacctcagatgtgagttcagaagagtcaaaaggaaaacagagtctatcacattgtgaacagaggtttattttgtgaaaaaatgcaagcatcacattgtgatttttatcattgtattttgtaggaaaaaaacaattgatgtaatttttcagggcaaaaactgaataaaaagaagagaatgtttgatatcaagttatatgttttaaagttagatttgtagattctttagatactctagaggtcataaaaagtaacagcaaaaactttagtctaggtaytgttggcacttgtgaggcaaatcaaattcaggtccacaaattctttttcataattctgaaacccaaagaactctgaaaatcccaagattttttaaaaaatgactaatttggtgtcaaaacctaagcaagctgacttgttgcttattacaatctttatttctcatgctcagtgtgaatatgcatacattttgctgcagaaatatatacatgtttgagtacagggggctggccgtgaccctactgagggtttctgtacacatcactgtctaccctgtggaatcttacctccctttcttagttcccaatcctgaaaagcagttatggggccagtgmtctgtacagacatgttgtctcagacatcagtttgagcaggaagtaaatcatttaggggttggcatttgtttggagtgtggggaacactctatctttagggaaactttatatagttagttatttgtaagtaaaattacaggtggctatacatcatcttgctgattgcaactcaattaaatcaccgtgcctggcacagaagaaaatatgctacaggatatctcactagggaaaaggttctagttcgtttcctgcscactcaacttttgtacttagataagcaaatggccccagattccaatgcctggttttatttttgctccaaatacatatatactcttttgttttggatagttacattttagaagtagactgtgtattctcataaacacttcaaagtgtatgttctggctgagagtgtctctgtgttgttcaataataataagactaattatcattttttgagtacctgctgtgcgtcaggcccagtgccacgtatattagagacaagatctcttatcctcatgccagggctggaagttagctattagtttctcatttgccaaatgagaaaactgaggctcagggagattatgtaacttgcagaatatcactcagtaattggccaagataagaattcagtctaaatgagaaccagatccagagatatttggctttaaattctatagtctctcctaaaccatatgcaactctaacatgaagaagcttatttaatcttcactattaaaaaagtcaaaacaaaacaacagagccatgaatagcaaatattgtcaatgagaggtttggaaaaacagtcttaaaggatgaaattccatagacctgatatattyccacctggaaaaagtgggcatgggacagtgattttctcttgaaagatctgctcatttttgtcatgggacatgaaggtggactggaccactcagtttcttctttctgcatctcccaacccagtctttctgttcatggggtgaaaatctgttgttgaagccttgtctgcttaattggacagtggatctctcgggtccctgtgggctgtgcgcttgtacttgagctctgcttcttcactctgtggtctrggccagctagcagccagctgagttcaccttggwtcagactcatggcctttcattttcagtatctgacttcctggttttgctgaaaacctgtctaaaatgtaatatccatctgattcttcataccaagccacacaattcttcctgatcccttttaatctccaatattgaatggtggtaacataaatatggagacagatcatgtcagaaacccagggcctaatcttttcttttctgcctaytcttctcacaggctgcttagtactttgtaagctttttttttttttctggctgtaacctagattttctctttatcattactctatttattattgttagagcacttctgattatctcagccctaaactctgcctccaattttaaataacaataactcycactcctgctaatactgctactactactaccatcaccaaactttttcttccccaaagcagttctgtttgggaaggaaacagttccctctcatacaatttcagttatcttcttgtcttttccgtttaatgaatcttcctgttaatgttacatcttttaacatggaaacttctagagaaacaaaagacgatggatttgttaaaccttttgggtgtatttttatactaactcttactgcagcgtgtgcattatgagtgtaggtccattacggctgtattaggagcagaaccttccagagcatgagcgatgtgctgggcttgtgcttagctctatccatgagttaagtatctcaatccttaggaccctctgacatatgtgytattattatttctagtctatagatacagagactaaagtttagagaatataaaaaaacatttacaaggtcctatgggacaaaaactgtaggacaaaatgcaaacccaagcagcctgagagcagagctcctggtccagcactgtgatagctggggacgcagagacagaaacaatgcaattattgacagggaccatggtgctgtgtctgtccacattttgaarataattatggtttggatattttcacctttaaataacttggagagtttcaacattaacncagtcagatggatayatttatatcatatcctgctgggagtgacagttaattctgkgtcctatggcaattgcacttttgactgagatgaatgctgactgatggctttaacatttaactaatgcratagtatttaacacacccatataaatactatagtcttcgggtaaataaaatgttacyggctggacatacatgaatatctgatggagattatggaacatactctactcatacttctctgaaagtaaaaaataaaagatatgtttcagtacacaatgtgatatgtactcagacttaattcataaatttctcttatccttcatccgtggatcttttctttatttacttattgcgtttgttaaaatgcaggcttctctgaaaaattatttttaaaaatagtttttagacaatgaatcatattttctcaagtattttaacattgtaatcattatgataattatccaaggggaaattatacttattttttattcatttattcattcatttggcaacaatacattgaacatttactaagcatcaaactggctctaccacttaatagtggcatgatgttcatcaagaaattgttagtgcaatcaagaacactagaaattcattggatgaatttaaagaagcttttagaagggtattatattataattgaggcactttatgaatatataaataatattatgttttcatgctagagatcatgccaatgaagatatttactttgaaaaggrgaagattagaagtttaaaagcatttccayattgaagtaaatattcatttccatatcttcacagttatctttctctgagttctctgactcattgtgaaaaaaaatyccaaccttcttcacagctctaccatcttcggattgttgcctagaggggtaaaaactattgtaaaaggatgtgtgcactggatgagaatttagaattagacgaaatgacccctagagtcttttcctgctttaagagcctgtgattccaaattctaacagtacatttatcaagaaaaaatatgctgaacatttaaatagtttttgaatagtacctagatataatagatacctaataaatgtgctcaatgaataataaataactggttaagatttaaataagcctccaaaatctcttccacattctaagaagggaagcataaaggttgttaatgaactagtgactgtgtgggtagctcattatttttaagtactcttgactttgctgttcattatctgtgtggccttaggaaaatacacacatttctgaaaggattatgtcgtttgtaaaatagaaagtccttatctgtctaccacagatgattcttatgcaaatcaaatgaaatgttcaataaggtgtctgtaaaatagtagagagagatgaattaggagctattgtgatttgtttacattatgtcacaggtgcactttattagggatatgttttatcttaattacacaattctttaacttagattttgagaattatattatggttatataggaaaatgcccttattctaaggaaatgtataatatatttaggtctgaaacattgtatctgtaacaatatagtatgtaaattatgctaattcacatgataattatatgtaattatattaatatattactatgtatacaatatatttacatgcatatatgtggggaaatgttatcagttagtgtagtaggggttatcatactcaaattcgatgtctccatccttccaactcttcatgcttttccagcatggtgaggactgctgagctccatcttttgctggtagtctctctgtcaaatagaactgtttccaaattcagtcatttgctccttgaaggctatgaattcatacttcgttatatttttctggctgcatatttaaattactttaacaatcatataagttcattgtaaaaattttggaaataaaaaggaagataaaatgcacagataattttagcaaatgaaataataattatattgggatgtatttcttcctagattttaattatgtacattcccatcaactttttattttgaaaatgtttaagcctaaagaacagttgaaagagtagtacaggctgggtgcagtggctcctgcctgtaatcccaacactttgggaggccgaggtgggtggatcacttgaggtcaggagttcaagaccagcctgaccaacatggtgaaaccctgtcactactaaaaatacaaaaatcagctgggcacggtggtgggcacctgtaatcccagctactcgggaggctgaggcaggagaatcgcttgaacccaggaggcagaggttgcagtaagccaagatcacacccctgcactccagcctgggcaagagagtgagactccawctcaaaaaaaaaaaaaaaaaaaaaaagaaagaaagagtagtacaatatacattcatactcatatacccgacgcataaattcattgattatttactttttgccctacttgttctttcttgctctctttgcgtatgaatgaatcattgaaattaagttgtagacatcatgccatatcacctctgaacagtgtgtatatttctttagaataaggatgtttacttacataatcataataccattatcacagctaagaaaattaattcagttgattttttccacatatttgataactttctgtctatccacgattatgtcttacatattcttttaatttatgtcatagcatatcatcttagaaagtgatccctaagttactgcatggtatacattgtttaaccatttccctttgtgattggatgtctttaggttgwttatatttttattattatcacaaatgttgaaatcactctttttttctgaagaatttaaaagtaatttatctgtcttatggaataaaatatttatttccccttaaaagaatttcaggcatgaacccaagagagaaggcttttttttttgttttagttgttgtttttatttttattttttattttttgggtagaaggagcagagagacaagttcaggaaataatgagagtgttagaattttgttcaggttaaagtgagttggagtgaagtttagaaatctcctttctactcatctctcctgtttttaaaacactgtcctggaaatagttaatattaggaacgagaaaaatggtataggttttcctagtacactttatttcttaattatgaaattctacttaataacttaccattgaatgtttatccttattatcattcaaggtaattttattgaagattgaagatatttataataaagattgaaggattttattgtcctgtgtggtcaaccttgkggggtgagatgttatgagacaggacaattaattgacttgatcaaggtaccttgttataaaaataacacagcctggtttagaacatctcttcctgactctcttatttggcatatagcctaagtgtatgcctccttggatgtatgagccctgatgttggtcatatttattattttatctgcttactttcagggtttcgtgcacctgaagttgccagaggaaatgtcatttataaccaacaggctgatgtttattcatttggtttactactctatgacattttgacaactggaggtagaatagtagagggtttgaagtttccaratgagtttgatgaattagaaatacaaggaaaattacctggtaagttctgttttctctacaatgaagattttttttcttaatatcagcagcttcatttttatttaattgtagttgtatgcttaattccttaaacagatgatcattttttktgtttagtgcataaatattcttaaatcttgtgatatattaataaaaatcacctgaaaaaggtagcagttttaggctttttaaaaaatccgcaattaatattggtgtagttartattatatttagaaacatagagaaggaaattgctgttagaactccacatttggtgatttttaattttcataaagaattactgtgtactcattatcctggaatgttttcgttttcttggagtgaaataatttacatgcaggaatggaagactgaatgatctataataataatttttcataagaatcggtaaatgtgtatttaatgttatcaaagctcatttggaatggttgtctcatgctttcaagaaattagaggactttgtaattcattccttaaccattactttagttctcaccacaaaataacattttaagtttatttagctctttctcatattttctgctttccctttcatttaaaaaatacttttgagtgtacacaatgtgccatgtacaggaaatagagctttatcttttttgggtataacttcaagatcatggcaaaagaaaacttattattaattggataaaccttagatataatctaggttatttcccttattttactagttttctagtgaaaatattcaggtctctgctgggtacagtggcttacgcctgtaatcccagcactttgggaggcccaggcaggcagatcacttgaggccaggagctggagaccagcctggccaacatggtgaaaccctgtctctactaaaaatacaaaaagyagctgggcatggtggcatgtgcgtgtagtcccagctaccaaggaggctgaggcacgagaatagcttgaacctgggaggttgcagtgagccgagattgcgccactgcactccagcctaagcaacaaagtgagactccatcttaaaaaaaaaaattcagttctgtgttctgcatcaaccagaataagctacgcctcttataaaaarcaaatgtgcacaaaccatctgtgaggacataaggattaaatgcttgcttactttgagtattaaaataaaaagtagaagctttattatatgagtaaaagtgtttccaaagtctatttgaaatgcaggtacagaatgaaaatctgttattttattaaatcgttatttgggtctctttttattccayaaaaaaaaaatcttttccacatctcttagtggagatcaagttaacaaaattagctttaattttgtgayaagtaaatttacataaatataggattatggagataatatttttctttgcaatgtctggaccttttataaacattgagaggaaatataaccattcttacttatttagtatgctagcatgatgttttttaatgttttagatccagttaaagaatatggttgtgccccatggcctatggttgaraaattaattaaacagtgtttgaaagaaaatcctcaagaaaggcctacttctgcccaggtattcttaaagttttgttaatattttgtacagaacatcatttgcatatatrcatatatatataatcttcaaatatatatacttaaacacataaacacacagagacagaattaaaaatagttataaggcaaacctcctataattttcaccatcccaggcacaaaaaaaggacattgccaaaacctcacatgctcccatatgcctgtctcctcttctcttctttgaaatgcctgcccattattttgcccatttttctgttgactcttttgcctacaaatcaaatcagaaaaaaatttttatatataacatactaatcctttcttggttttatatgttgcaatttctttttcgagctggtggcttgctttttaaatttcytgtagggtgcccgttaatgaatggaatttcttaattttaatatatataaatttaacaattcttctttttccttcttttcctggttattcctatttggtcctgttgtagagcccatctttcttttagagctacaaaaatatttacctgcaatttcttcaaacattttaaaagtttgcttttgacaagwttttaatccattggaattgacatttttatctgtatcccattcctttttttaatgtggaagactaattttttcaggttgatttactaaatggcttctccccttttgtcccatagatctgatgtgtccattttgtaatttattaaagataatgtgcatatccacgtgtacactgtcttccactgatcaactcatttatttttcctccagtattaccctgtcttaattcctgtagctttataatgatctcctctccctatttatttttctcatccaggaatattttaaccagtcttaggcttagcttttctatataaaatttagaatcatgctgtcaaatcttatgaaaaaccacattgtcgtttggattggtcttggattgaatatgttgacaatctggagatgatatccttatgatattaagtctttgtattctttttcttatttatttatttatttagaggcagggtctcactctgtcacccaggctggagtgctggagtgcagtggcaggatcacagctcaatgcagctttgacctcctgggctcaagtgatcctgtcgcctcagtctccatcagccaattgtgtgccaccagacctggttaacttttcctttaatttttttgtagagaaagggtctcactctgttgcccaggctggtcttgaactcctggcctcaagcaatcctcccgcctaggcctcccaaagtgcatgagcaactgcacctggccaagtcttcctattctggaatggcatgaattctctctgtttacttaggtcttctcaagcgtctttcaataaagttttgtaatgctacatacaggtcttgcatatcttttgctggattttcttgctgcaaattgctttaaatgcagttcatggcttgagatttgttttttaactgcccagttaaygtaaatctggtctatgaattgtattgacaacaagcttgtgartagcaatttttcagcaaccttttgctccctctccccgctccctgcacagtcccagaacaactttccttatataccaatgaaggtggaaatgtggacaggttgatttctccttcttgtttatgctgaatatgcagtcctttggggtcccagctttataggtacagtccctttactaagactgtctatcttgggaaggccctagactccaacttctctcccatgggccccacaaagcatccaagagtatacatttatattatctcactttgtcttggcagacaaatgtcttcagggcaagtctggctttaggggtccactgacctctctggtttctgtctctcactgtgatttcggcctgataattccttatggtgtcagatcttcaatgtttttaatacattgtttttaaaaaaatcatttagcattttaaattgtttttagttggaagatttgcccaagtaaccttgtccaccatattatctgaaagagaactcttgtcatgttttacactgatacacattttaataaatgtgggttatctttatgttgtgagctcttgatttggtattataattaattggaaaagttttaactttaagtattctgatcaaaatagtcaagtacaactataatgactttatcaaatattacataatttttcttctacttggtttacttgttttttaatttaggttaccatcaatgttagtcacatgaacttttatatttatgtccacagtaaaaatttttcatagcttgttgtttttctttcttgttttttcattttcaattatacttcacctatacttaacagaatacttaacaaatatgtatatatatgacaatattaaaaagcttagacatacttattttatgtttaaaatataacatatactaggcaagacaggaaaactcatcacttttatgaaatgaggcacagacagmgtaatgggctttcttggtgtctcctgagtggcrggcaggtggccatgtcacagctctaatcccagtttcctgacttctggttctgttttcttacggtgccttcacactgtctctccagatcaaaaacagaatctagagatgacttctaaattttgttaccaaagactgaaattcctgttcctttcaactactagaagctcaactaaattgttggcccaagggtttttctctcactggcggtggctctgcaatatagaattgcatgcagagtacctcctgactccgctaaaatcctgtttaattgacccttgagattttcttttcaagttaaaaaaaatactacacataccaaagagtatcaagcacagtttaaaaatacatatttgtcttttcatgtaattttatytgtagtttagattactaatcttggtgatctagttgggttccagtttaacagttttaggttttgcttgacagagctataacacttcagtctatatttgatttttcaagggaaatgagttaactcgataagtactgttttgttatctttaaactttctcaggtctttgacattttgaattcagctgaattagtctgtctgacgagacgcattttattacctaaaaacgtaattgttgaatgcatggttgctacacatcacaacagcaggaatgcaagcatttggctgggctgtgggcacaccgacagaggacagctctcatttcttgacttaaatactgaaggatacacttctgaggtaaatccaaatgctctttaaatctttcataatttaaagcatataccatttggaaagttacttaggaataaattaaataagagccaatgtaggattattattcaattagccttctgttagaacaagagtattcaagagcaaatgtgttttgctttagaatcacagcatatgtcttagctcagggtccctagaaacagagcctgagatgggttatcttgcacaagtgatttaaggaaagagaatcttagagagaagtagaggaagccagaaagggcagaggaaaaagctcagcagaaatgtggtttctgaagaggtccagcctcagtctctgcccacaaggagctctggaatatgaataggagcacagaattttcccacygccaggcaagggagccagtctttcattctcacatattgttyagtcattggctgcaatctgctgggaggtgggggtagtgtaactttcaaggcatttctgggcaagctgcctcctgtcatctgagggtattctgtgataaatagcacatctctgaactatagtagccaacactcagggtagctggggatggcgtacctgatggataaaggagatctggacatggctcctaaaagtggatcaatacattgtgttggcaaatataagataagtttctagacttcaaagacaacctagtattttgactgctgcctgaagataaatattgtgcctcaacattagttctgaggttaaacaatcttttttttttaattgatcattcttgggtgtttctcgcagagggggatttggcagggtcataggacaataatggagggaaggtcagcagataaacaagtgaacaaaggtctctggttttcctaggcagaggaccctgcggccttccgtagtgtttgtgtccctgggtacttgagattagggagtagtgatgactcttaacgagcatgctgccttcaagcatctgtttaacaaagcacatcttgcaccgcccttaatccatttaaccctgagtggacacagcacatgtttcagagagcaccgggttgggggcaaggtcatagatcaacagcatcccaaggcagaagaatttttcttagtacagaacaaaatggagtctcctatgtctacttctttctacacagacayagcaacaatctgatttctgtatcttttccccacatttcccccttttctactcgacaaaaccgccaacgtcatcatggcctgttctcaatgagctgctgggtacacctcccagacggggtggcagccgggcagaggggctcctcacttcccagaaggggcggccgggcagaggcgccccccacctcccagacggggcggcggccgggcgggggctgccccccacctcccggatggggtggctgcccagcggagacgctcctcacttcccagacggggcggctgcygggcggaggggctcctcacttctccgacggggcggctgctgggcggaggggctcctcacttctcagacggggcagctgccaggcaaaggggctcctcacttctcagacggggcggctgccgggcagagggactcctcacttctcagacagggcggccaggcagagatgctcctcacctcccagacagggttgcggccgggcataggctctcctcacatcccagacggggcggcagggcagaggcgctccccacatctcagacaatgggcggccgggcagagccgctcatcacttcctagacgggatggcggccgggaagaggcgctcctcatttcccagactgggcagccgggcagagggggctcctcacatcccagacgatgggcggccaggcagagacgctcctcacttcccagacggggtggcggccgggcagaggctgcaatctcggcactttgggaggccaaggcaggcrgctgggaggtggaggttgtaggtagccaagatcacgccactgcactccagcctgggcaactttgagcactgagtgaacgagactccgtstgcaatcccsgcacctcgggaggccgaggctggcagatcactcgcggttaggagctggagaccagcccggccaacacagcgaaaccccgtctccaccaaaaaaatatgaaaaccagtcaggcgtggcggcgcacgcctgcaatggcaggcactctgcaggctgaggcaggagaatcaggcagggaggttgcagtgagccgagatggcagcagtacagcccagcttcggctcggcatcagagggagacsgtggaaagagagggagagggagaccatggggagagggagacggagagggagagggagaggaacaatcttcttatatggtttgaaggaatgagaattcacactgaaaaataatttttaattttagtttcagatgtcatcttgataggcaaaacttgtctgccaattaactcatttattgctgaaaattaaataaaattggcattgtttttaaaagtaatgcaagaaagcaaaaagagttatgttgataacagaatcctttattctgtacaagytctagttgcttaagcttaaatcaaatcctgctaagtatattttcttttcttaacaggaagttgctgatagtagaatattgtgcttagccttggtgcatcttcctgttgaaaaggaaagctggattgtgtctgggacacagtctggtactctcctggtcatcaataccgaagatgggaaaaagagacataccctagaaaagatgactgattctgtcacttgtttgtattgcaattccttttccaagcaaaggtatggtagtgaatttgatcaatggggaaattacagatcttttaaacgactgaattgtgtgcataattgttattgcatcagcaaagattgttcatttttarcctattttcattggtttgcatatattaaagggaattgtggaaggtcacagagatatttgttgtttttctgaatacagatctagctgagacatttataaaataagtcaaccatttattcaggcctaccagccctgctcctggtattacctcarctgtggctctatctctttacttctcctcagatcaatgaatctttgtagggcctcttcaaggataaattctcattcattcattctttgaaaaaaaaaawatatatatatatatatatatgaaacccattgtgtgccaggcttaaacataccagttatctaactaccaaattaagaaaaaaattaaataaatgaattaataaattcttaataggtgaaaatgacttagctcttatcaattgcagggttcttgtcccaaagaaatatatctacatagcaaaatttcaggtgtgagttgtaggttggtgactgtaatatttggggcaggatgatttccaggaggcattaagattataccctatatatttctctggtttaagttagtattggaaaaaaagtactagaaaaatgtgaagcctgttttttgtacctgaaatatcaactccactggcagtttcggagttgaaattatttgaatatggtcaaagaaaaatttcratggatggaattgggcaaggacgactttattcaagcctatcacagcaggggagagagatcagactgaactaaactccactgaaacaaaaggtgggagagttttaagcgcaggggtgagctaatggaaacgtactggagcaccttgttggaaggaagtgggagcagttgtcaatgtsattaggccatctgtgtttgctaattgtcccttattgaaggtaggctcctactctcccacagacactggggaattccttccttccttccatccctccctccctccctccctcccttccttccttccttcttcttttttttttttttgaaggagttttgctcttgttgcccaagctggagtgcaatggcatgatcttggctcactgcaacttccacctcctaagttcaagcgattctctagcctcagcctcctgagtagctgggattacaggcgtgcaccaccaaacctggctaattttttacatttttagtagaaacgggatttcaccatgttagccagactgatctcaatctcctgacctcaggtgatctgcccaccgcagcctcccaaagtgctgggattacaagtgtgagccaccacgccaggcctctgtcttgataattacatttcaaaggaatggctcccaggtccttggaaaagacattcttggggtataaaactgggaagagtctgggaaaaggggcagagaaagaatttataattccaagtcttctaaagtaaatactctaagaaaagggaggttaggaatttatagttgagaagtctatctaaagtttaataaagtggaggagaacattaaggccattttagtcaacatacatgttctttttgtaacaatttcaacatttttccttttagcaaacaaaaaaattttcttttggttggaaccgctgatggcaagttagcaatttttgaagataagactgttaaggtaaatgttgaatgcattctacatctaaatttattttaagtcttttgttttatatatatctcacacccctcttatgggattataaactccctgagagcaagaatcataaattatgctgtatttgtattgcttcataaaatcttgaacacagtagatcctctgaaaatacttgctgattgactgtatattttatatgaatgaactamgaataaaatgataaatgacatctgattgataatattgggaatggaaataattcaatttgtacataactgaggcagataattccttataaatatattgtggaaaaaaaacaaaaatatacttaagttttaaatatggcttgccattaactttttcttaagcattgaagaaatcatttaattttcttttcttcagattcctatttagtcattaaagcattcatttctctatccatctattcatctttggttccatctattcactcaacttcctacccgttcattctcctattgccaaaaagcttattatctgatgagagacagggaagtagagtataacccttaggttatttcttttgtaatttttacatgggaaaaagaatagattgaatgtaacaataatatttcgaatatgacctaaatttttttatgtataatatttgtacatatttatggggtacatgtgatatgttgttacatgcatagaatgtgtaatgatcaagtcagggtatttaggatatccatcaccatgagcatttatttctctgtgctgagaacatttcaagtctcctagttattttgaaatgtttttaactgtagtcactttattgtactattgaacattagracttattcctcctatctaactgtatgtttgtacccgttaaccagcctcccttcatcctccccttctcccacacacccatatcctcccaagcctctggtaactatcattctactctctacctccatgagatcaacttttttagctcccacatatgagtgagtacatgtgatatttgtctttctgtgcttggcttatttcacttaacataatgacctccagttccatccatgttgctgtatatgacatgatttcattcctttttatggtcaaatagtattccgttatgtaaatacacacattttctttatgcattcattcattcatgggtgcttaggttgattccacttttttttttagctattgtgaatagtgctgcgataaacatggggatataggaatccctttgatatactgattccctttcctttagattagtatcagtagtaacattgttggattgtatggtagttctatttttaatttttttgagaaatcaccattttgttttccgtagtggctatagcaatttacatacacaccaatagcatatgggcattcgtttttttccgcatccttgccagcatgttattttttgtcttttttataatagccattctaattgggtgaagaagatttcattgtggttttcatttgcatttttactgatgattagttaatgttgagcattttttttcatatatccattggccattactatgtcttcttttgcaaatgtctatttagatcctttgccaactttttgttttgttttaagacagggtcttgctttcttacccaggctggctcacagtggcatgatcatagcttgttgcagccttgaccttctgcactcaagtgatcctccaacatcagcttcacgagtagctgggactacaggcgtgtgctaccatacctggctgtttattttttgtagagatgcggctccactatgttgtccagactgatctcaaactcctgggctcaagcaatcctcctgcctcatcttctcaaagtgctgggattacaggcatgagccaccatacccagccctttgcctacttttaaatggagttcttttttttttttcctgttgaattgctttttcgagtttcttgtgtattctggatgaatagtttgcaaatatttcctcacatttaayggatcctctctatattgttgatagtttcctttgctgtgcagaagctttttagtttattatagtcccatttgtctaattttgtttttgttgcctgtgcttttgggatcttaaccataaactctttgtctagaccaatgttctgaaatgtttcccctgtttccttttaatagtttcatagcttctggtcttacatttaagtctttaatccatcttgagttgaattttgtaaatggtgagagagtggggcctactttcatccttctgcatactgatatccagcttttccagcacaatttattgaaggtggtattctttctcccatgtatgcttttggtgcctttgttgaaaattagttggctttaaatatgtgggtttatttctgggtcctctacattggtctacctacctgtgtttttgccaatactgtgctgttttggttactctagccttgtaatatattttcaagtcaggtagtgtgatgcctccagctttgttctttttgctcaggattgttttggctattttggctctttttcggttccactcaagttttagaaatttttttttctatttctgtgagaaatatcattggagctttcatgggaatttcattgaatctgtagwttgctttgggtagtatggtcattttaacaatattaattcttccagtctgtgagcatgaatatctttccatttgtttgtgtcctcttcaatttctttcatgtttttcaggtttccttatagagatcgttcatcatctttgttaaatttactcctaggtattttattaattttttgtagctacttcaaatgggattgctttcttgatttttcagctactttgttgttgttgttgtatagatatgctactgatttctgtatgttgattttgaatcctttactatactcatttatcagaactaagagttttttttaatggaatctttaggtttttgagttttaattttaatatctctaatcatttaagatggaaagtagttttttgaaagcacagattttatggagttttgttctgtggatactcaatttgctgagtgtgttttcttttttttttggcaaagcttaaaggagctgctcctttgaagatactaaatataggaaatgtcagtactccattgatgtgtttgagtgaatccacaaattcaacggaaagaaatgtaatgtggggaggatgtggcacaaagattttctccttttctaatgatttcaccattcagaaactcattgagacaagaacaagccaactgtaagttattttttatctgtacaagtaatttatcattatacttttgttttttccttrtaatcattaataatactgttgataattcataaggaagatcttttaaaatgcataatttattttctatcataaaattaaactttcattataaaaaattttgaaaattccagaaagcagaagggtatttttaagaagtcactcaacctaatcacttttagggataaaatatgtaaactcattgtaatcttagtagtatttatcaatctaaattttttaacaatttttattatctgtgtttcaaattagacatgaaattggaagacaatcaactttgtatttcaccaaattcacggactatacatatgcaatttgggtaacttccattaagtattgattgtaggaaagatagacagcaagtattcttgcttgtccaaagttgtttctagatttgataattatacagatgtctactcacagccaagttagtgataccagtttcaaacaagaataaaataaaatattaatataaayctctttcaagtttgctttttttcagtggtattttaatcaaatctttgcagttggttcttrtttatcacattcctcagtgataagcagtataggattgtggataagagcataaatcatagttcagatattgctttgccatctattggttttgtgaacttgggcaataacctttcacatcttcagtcatctcttacctgaggattgtaatattctctatctcaaagagatatttggaggagtaaataagaatgttaatatatggatcttaattaacataatgaccagcacctggtaagctgtcaataaacattagctattattattattattagctttgagtcacaaatccctaccttagggaatatcctggtttcccattatccatcaaatttcccaagattggcacttgggagtaatctttgactcctttgttttttgctccctttatccacttgaccctcctaattgtcatttgaatctttgtacttctcactgttctcagtgctggtaccatgggccagactgccatccattatctgtggccacattaacaagagcatccagttctcaccctctgattatactctcttcaacatattttcagcattgcagacagagggacctttctaaaatgtacrtcaatctgatgcaattttcctgcttaaaacccttcagtggtatcccattgtcctttatatgaagtccaaattccttaagacagcctactgggcccttcataattcagtgcttgcttacctgtctagattcatattttgcaagctttttgccatctgtgctttacccaaactgaaattgactcagatctctaagacaacctgttattacctttcacccccaacctttgaatgtggtcttctccttacctggatgactattatgccccctgcctatttcagtccaarcaccacttgctctgagtggcaggttaggtgactttgtgcttccattgcatctaatgttttccttcacagtagctataattgtatktgttaaagtagtttctcaataccactaaatctactggctttcaacattggctgtgcatttagaaaccactaggtagctgaaaataatatgatacctgggccctacctcagaccaattaaatcagaccagttaagcctgggatggggatcagattttttttttcaggttctcaagtgattctaaagtatatttgaggttaagatatactgcggagtgcagtgtattataagttcccatgaatgaggatttttatttctgtctttacatatttatttactagtatgtggttaacatttggatcaactcattctcattctgtaatacccacattttaaaaaatgaatgtaaaaatgtcttttattatttttatttttcaaatttaattttagattccaggaatacatgtgcaggtttgttacaaaagtatagtgcrtgatgctgaggtttggaatacaactgaactcacaacccagaaagtgggcatagtgcttgataggtagtttttcrtctttgctccccttcctgtaatttccacttttaacccaattatacaagcctgaaaacctttaaaaagaaagggcctccagtttatttttttatttcatagcacattttatgggattatggatatcarttaactctttaaagttccatataagatttggagcatagatgctttactagagagcatccwtaaagatcaagctctcaaagatgctcatctcccaaaagagattgggacctagatgcataaacacttaaatataaatatttgctctcttctgaacaagtatctcctgtggccttggtctctaccccacaaaacagacatcacatcactaatcaggggttgcctcatcatcagtaccctcatcatcatcagtacacaccgactgagaggcatgttgggtaatgaaagatgactgcctttgaagccggaagactccataggacttttgragttctaggtctgcaacatgtttttagtcctaggtcggcaagcatgatgttagtcataggaccttgagcaaattatttagcatttgtacatgtttctttctactattaaaaacattgagatttatcatattttatgtttttttattaaggatcaagcaagataacacacaaaagtattttataaaatacggaaattccatgcaaaactttgtcctaattggaactattttctattaaatacagcaaatatccaagaaggaattacctaaagcgtagtggctctctgacaacacatcatatttttacctccttttccagaatagaaagaaaagggggaggaaaaaaaatcttcctactctaggatatactaatgattgttaaatctttatggtattttcatgttatctatctgatttaaatgcaattttgactatttttacatattcctcgttgttcattcatactgtagtgccttcttctattcccccacttaacagactgcttgrttatatcagaggtgcttatctgtgcaactgtttactggacgaggggtatgtagaaaatacattgtcctcatccttatgaaattacactcataatctagtgtgagggatgcactaataaagacaattttatatttaataaggtctataatatgacagtgacaccagtggggaaaagggactggttggtctattttgataggtcagggaagaaatccagaggagcmgacatttaagttcatcctcaaaggccaagtaggagtttgccatgctgatgtggcccaaggtagccaatctgtttgtgaaatatgtacaatgccagatgtcttaggttgaaagggaaatattttaaggtgttcgtaatttttctttatgtttaaaaggggaaaatggcaaatattttactttctgtttatgtttggatgatgtggatttttgtttyctataatttgactggcttaactgcaaagatatcccttgctttaaaatttgaagacactgcaactaaattttatttcagcattttatattttataactctaggtataaaaggctaacacttaattttctgagcattcatgaaacaaagttttgcaagaacattcaaaagttacagatataatatttccttcagaaatttagatatagtacaaaattctacaaagagccacatagaattgaaactaaaagtaagaccaaagtaaacattggacataatctttattttattatcacaagaaattaatataaagtaaccaaaagtaagtaaagtaccaaagcatgttatatattcaattcagaatggttagggaagaatatgaaataattgcaatagtctagcttgtttagttttcaaaatagtgtttttanattaagaactaatataaggttgtattacacgtagaaattttaagaagaaaacaaatagtgatgactttctatttttttttctctgtaggttttcttatgcagctttcagtgattccaacatcataacagtggtggtagacactgctctctatattgctaagcaaaatagccctgttgtggaagtgtgggataagaaaactgaaaaactctgtggrctaatagactgcgtgcactttttaaggtaaattctgtggtttttaattttattcccaaaagaattatctttgcacttcatgtgtcacagaggaaggatttttcttcctttctgcctctgaatagagaatttttttaaaatgcagaaaaaaatttgtaatgcttctcagcaccatcttttcagatcaagaaaattttgtcttcrgaacataaaagaataggcacataatgtgcatagttttctcatggtattacaaagaatgttctcgaatgaaaatactacattattgaaaatgagcatattggagtctctgctagctttgacatagttctgtcacagtgtcaaatatactatttataattaaattatgggccccaggattatctgctctaaagaaaaagagtcacaaaataatagacaaatatggggggaaatgcaatggactgaccgaggcgctaaggagtggggatcaagaccccagaatgagagcatagtgcttagtctgatgcagcctgtgagtgacaaatccatagcaagcacattctttctgtgctggtgctgagaaacaggaccattttcaagcttatttgctagccactttatatttttattttgttttgattttaccatatagatctatgatactcttgagaacattttagattacacactatatctgtaaaaggatacttcaaagtttcctgtcttagattcakctgacagtttttctatggattgtgagaagggctcacagtttatgttcagaagggccaacaggtctccttgataaagggttccttacttcctgaagtaccaaaacgattaggattcttttatttctggacacttcatttttgtcatgaattagactattcactggttctgggaaaaaattcagtggtttgtatcgatatcttttacatgtgaatgactataattttatgttcctttgtaacattgagacttcatgtaaaacttttgactctaacttttttttttctttatcctgggcacatgtatgctatttttactgaattagatagctttggtatttataaaaattgtatccctcttattcataatttcctgaaaatgaagggctattgttatctttgataatttatgcttcaagtaaagaagtgtggctctttggcatctgtatttagcaaaatttgctttgtataattttaatgatgcataatggtggtggtgtcatgttttaataatttaaaatgttgtttatgttatcatatgtaaatagcatttatctcttaattggtggtaaaattattaatgtatactttatggttctagggaggtaayggtaaaagaaaacaaggaatcaaaacacaaaatgtcttattctgggagagtgaaaaccctctgccttcagaagaacactgctctttggataggaactggaggaggccatattttactcctggatctttcaactcgtcgacttatacgtgtaatttacaacttttgtaattcggtcagagtcatgatgacagcacagctaggcaagtttctttcctttagatatttttcatattctctaagtcttataaaatatgcctttattttacgtttacattttctctgaactttccagtgtcatatggatggtcttggagggtcacacagtgaaacataagactggtataaattgtgaatagggtcattacagaagtggagggagtaaatgctctcagtcccacaagagaagcagattactgcagctgaacactcagtttgggtcttacttgcttttttcctttttacytaaggcaaaaatgggaaatacatggtattgaatatattttactttttgagcaaagaaaataaagaaaatgtttgttttaatcatagtctagcctcccagcttgttaaagaatctcatttggtttttcattctataacaaatcttttttcttgcagcaatacatgctgaactgcacaacctacaaatattgacaaatcatattttactcaaactttgtctttttttgcttctatttttatatttaaatatgataaaattgtgatagcacataaaatatattttctgcataaatatatttgcgtcttcctttgataataatttgttttagaaaataacaataatagcatatatacaaaagtttacaaaaacgacactatggggtttaattctgaaaaaaactagaatttatgtaactttagcaaataatgaatgttttgaacatggtgaagaaaatatattcattgcaagtatatgtgaaaraggaacatgtgtttttctagcaccttcacctatttttcatttatagactttagagttgcacaggagttacaattagatgctcttaatgactgtaaactattaagatacatgtccacacaagcagagcagtaggtctctcaataggttgtctcagtagtcttattctaccaaagttgttgcattctctagttgaattgtatgtactttgggacccaaatagcttgcttataactgaagttatagtggaatgtcwatgggttatagtttgattttaaaataaagatcaattggaggatagcctacaaggtgctgcatgagctggcttcactgtacctctcctgcctccatcatctaccacattcctaccagatcttgcttgtctagrtgaacatccagttcttctcaattactatgctatattttgcctcagggatttgcacatgctgtttatttctttgcttagttaacatagctttttttcatgcttatttaactcatatgctttgaaatgttagctcctgtgtcaaaacctctgagaagccaacactgattaggtcaaagttcccgctttgggttcccataacagctttcttgcatagttttgatcatggtcatatttttttttcattaatgctagtctcttcactagaatataaactccaagacggttgggttagtgtgtttttgtttaccccttttttcccaggatctagcctagggcctacatagaagacttttgatgcaaatttgttgaataaattagtgaatgatttgaaaagaaaatatgatattttgacatagtatcagtatatccatccatctaagtgtccatctaaatactcatatttgtactaaatactcatatttgtaccttaccatatccaaagaacttttcacacacattacctcgtttaacattgtaactttgggaagggtaatgtataaatactgagcctattttatagaaaggttaagctgttttctcagactcacataattaagaattgcagcaaggagtggatcacagattttgttattttttaaaaaaatgctggtctttattcaatataattgaagggtcacctagaaaatagaattgtgaattcagttccaaggtatttgtgtcttaaactatgaacaactttacttttttttcaggccagtttaayatatagttttaacagaaaacttacatattttgtttttgtaaaggaagccttaaaaatgtcatgctggtattgggctacaaccggaaaaatactgaaggtacacaaaagcagaaaggtaacatttagaaggatactgttttccaaacagggcaatgatgtgaatgatggtaacatattatgtgtttcataaatttgtagaaaatattacatatggtataatcaggaattttaattggtagtttrtagtgtaaagaacttagacataaattttcaaaattacaagtgatatgaagtgttaaatatttatattttcagctgaagtagaggtgtcaatcactagctcaaccttaaacgaaatgtgaatattttttacaacttatctatatctacataatgtctaattttgaacagtgtttgaaaaagcttttatttcttttagaatatgaaatgttaatttattaaatgttgatactctatttgaaatttaatagtttctataatgtattataaaacttttccaagtatagttttttataaataataatttagtwcattagttatagctgtgtttatatttacatttatctaagtcarctaaaaatacatgagccaaactgaaataaaataagaatgttttatgatggatctttgaaacatgatttcatttttttctttttctagagatacaatcttgcttgaccgtttgggacatcaatcttccacatgaagtgcaaaatttagaaaaacacattgaagtgagaaaagaattagctgaaaaaatgagacgaacatctgttgagtaagagagaaataggaattgtctttggataggaaaattattctctcctcttgtaaatatttattttaaaaatgttcacatggaaagggtactcacattttttgaaatagctcgtgtgtatgaaggaatgttattatttttaatttaaatatatgtaaaaatacttaccagtaaatgtgtattttaaaraactatttaaaacacaatgttatatttcttataaataccagttactttcgttcattaattaatgaaaataaatctgtgaagtacctaatttaagtactcatactaaaatttataaggccgataattttttgttttcttgtctgtaatggaggtaaactttattttaaattctgtgcttmagacaggactattgcttgtygatttttctagaaatctgcacggtataatgaaaatattaagacagtttcccatgtaatgtattccttcttagattgcatcgaaatgcactatcatatatgcttgtaaatattcaaatgaatttgcactaataaagtcctttgttggtatgtgaattctctttgttgctgttgcaaacagtgcatcttacacaacttcactcaattcaaaagaaaactccattaaaagtactaatgaaaaaacatgacatactgtcaaagtcctcatatctaggaaagacacagaaactctctttgtcacagaaactctctgtgtctttcctagacataatagagttgtttttcaactctatstttgaatgtggataccctgaattttgtataattagtgtaaatacagtgttcagtccttcaagtgatatttttatttttttattcataccactagctacttgttttctaatctgcttcattctaatgcttatattcatcttttccctaaatttgtgatgctgcagatcctacatcattcagatagaaacctttttttttttcagaattatagaattccacagctcctaccaagaccatgaggataaatatctaacacttttcagttgctgaaggagaaaggagctttagttatgatggataaaaatatctgccaccctaggcttccaaattatacttaaattgtttacatagcttaccacaataggagtatcagggccaaatacctatgtaataatttgaggtcatttctgctttaggaaaagtactttcggtaaattctttggccctgaccagtattcattatttcagataattccctgtgataggacaactagtacatttaatattctcagaacttatggcattttactatgtgaaaactttaaatttatttatattaagggtaatcaaattcttaaagatgaaagattttctgtattttaaaggaagctatgctttaacttgttatgtaattaacaaaaaaatcatatataatagagctctttgttccagtgttatctctttcattgttactttgtatttgcaatttwttttaccaaagacaaattaaaaaaatgaataccatatttaaatggaataataaaggttttttaaaaactttaaatgcttttaagcatgtttatgaatttttaaactttgtgatagtgttttgcttttcacatataggtctgttatccatctcataggaaactttgtattaatttgtatatgggacattccacaataagaaagtgcaactaaagttttttccttgataacttatggaatatttaaatttaattttctataatacatatagttgccaggatcccaggacaaaatctgatgggcatgatacattctattttcaagttctcttaaaaagtttttgtaagtaaacttgtttgctcttgagtactgaaacaaaatataagactttagagcaaatgacatatacaaaaaaaaggcacagtcacttcaactgttttctgattagaagcctaaaataacttgctaattatgatcaaaatacaagcatattatcgtaacaaaatattcttttgggaaaattttgaattaagaaaagggagcctctttgactctaattctggtaggtactctatcgattatgtgtgaactatttcaactaaaacgcaacttatttttcatcaaggcagtgaaatatattgatgaaacatagcagaattaccaaaaaaagattgtcaattttcctaagttaaatgtaaggatgcaaatgttctaatattgaggggagataaaattcaaaaccattgggactttgcttctttatccatcactttgggtagctgaacacctaacctggtaaattgaatgtttttcatggaggcttatcagcaattcagtaaaatagtaaactatgtcaactcgggagaaactgacatcctcattctccatgctagccagtttctcatccagggtgtcattgtttctaataacaattcagaatctggctgcttaaaggcacctaggtacgtggttctttctaatttgtcaaggcatttggagtgatcctatcaccctgatttcaagcaaaagacagggaggcacctgacccaaaggcctgctgtctgaacacactctgaatgggtgagcagagatgtgctttaagatagaacctaaggtggttctctctatgtgctgccctcacactgctcttgatttctacccttacctgggaagtctctacttgatgtctgtcttaggctaagaaaaagagaagagaaagggaatgagtattagcatctggattctggggctgcttcttggcctctgtgagaatccactgtttcacagcaatcacagcctagaaaactagactttatggagtaaacaataggtatcattctgacctgggcttcaccacaatcacccactgaacactcccaagagaaggttgttaccatttatttatgaaaataccaaactatgtgatacatactctattagaagtattatggaaaaatagagaatatgtctacctggccagagaatagaggatctggatcacaaaaaaagtacaaatatttaagcagagacttaggacaaatgggcattcaacaatttaggacacatgggcattctacaatttccagagtgaagtaaacattctaggcagataaatcacacatgtgctgtcttaggaatgtgagcttattttgaaagcatccctatcaaatacgtgctaaaacttgtgacaagttcccattcctagagtacttacaggatacacttaagtgactgaagatgcaagagaaatatatatttgtgtatggatatagcattttatcattaattgagagattataaagctaatgagcttttctttgcagagggagtatttgttaggatgaaatggggagagatgtttcaaacaccaagtttatcttataggttaagaaatcctagaaggaatccatgactttatgtatatatacaatatatgacaagagatttccccatctcattacaaaatgagcacaaagtaactaactcaaagcttttgctattatgataaaagtttaaaaggctagtacatagcagaaatgtgatttactataacgggggtccaggggataaaatatttgcaagctgattgtctcatgttggcaatgttttcatttcctactacgttaggtaacacagatgagattgtacatcagagtaagaaggcaaccactaatagaagctgcatgcgggcaaaagactattctctgaccataagcttagtttagatggatccttgctgcaatcactaaattcataaatctgtgctagtattggatcaggaaatctctgcacaagcagataaataaaaactttctgctttggctgaaataactgcttttaggaaaagaaagagtatatgcttattaatatagcttgggatgtggacctctttgacgagactatacaattcaaggtagacaaagtatgcctaaaaataaatctaaaataaacttgtatattcaaatggaacatattctttaataatgtcatttttaagggctctgcatttattccataaatgctgccattattgttcagtttttcttaattacctgcattcactttagaaaacagaaaaaaaaaaaaacaaaaaacagaaacagttgcaaaagaaagcagccagaaagaacatacatttagaattgaaaaagaccttggtctaaattctagatttggcatttacttagtaatctgaactggagcaagttgcacaaatgaccagagaatcatcttttttttctgtaaaatggcaagagtagtatacccaccttctagaaggatgagtgtaaattaaggaattgtgcaattaattcccaggcaagtcacacacaagcaccaccttatgagggaattcatattagaaatcagtgtcactaaaaatacttttctctaataaagcacacattactatacattttggatctttggaagttgctcctggaaactactaataataagttcaaggtgccaaggggtttaatctaatttaccaaacaattaaagtgtgaaaagaaactactatcaagatattgactcattacattatgtttttatgcttttagtgaaagccacggccagatacagctagaaaaatgatctctgccctcatgatgtccttatgattgccttctcatctgtttccattgtcacttactgatctacatttctatactacatgggtctaaatttcatttcagcctgtaacatcaagaggattttgtagtaggaaacctaagtggtagttgcaaagatttatcaggggttttcagtctgcaattactaaaataaacacattaagttcatctctattaacagtattaattacagatgtgcttcatttgctagtatgaagagcagtgcaatggataacatctatgattttttctttaaacaattcactccaatgaattgcctgaagctcttgatttctggatagtacacatcatccattctgagtgggataatgttttgtgcaataagaaggagagtgagtttgctctttttgttgattttgatggatggggtgggagaaaagagcaatactgaggttgaagatcactgggtgacaactcttctgctacagccagaattatttttttgatgtaacttacacacattgcaaacaacctctattttcctttgtgctcctcccttccccacctacaatatagaattttactatttatccatttcatgtccactctgtctaacattactaactagtacaatgcatgtaagacataattatatgtgagaataaaatttcacattaaaaaccatctacacatttctgataattttggacagttctttattcttagagtggaaaattataaaataattgagaacattttagttttgtgtgtcattgtccttaggtaaagctggcagtatctttggctctcaataaactgcgtgtttagcaagaaggattttattttaaagataaatgtttttgccacatacgatagaatatcttcattgttatgtacttatttcaaaagtaaacataagtggtaccaatatgttgtaataccataagttaaatattgtgttaagcttttaggtaaattcagtcacctcttctctaaatgctctcagtgattttatacactttggtcttccataaagataattagtatgtgtcaattactgagaaataagctgtccttcatccacgggctgctgacattttgctttttacttcttccttttgtgttactgactttctttaaagaaaatggttttccaggtgttattttctaaatgtcatcacataaactgaggcataaattatttaatttctctctcaaataacttttatgctttcaaggtaatgtaaacaggaagaaggaaaacacataatttgaaacactgactgaagaagatttttatagcacaactataaattatggaaaatgagaagaaacagtcaacctaaatctttaatcactaattggaatcttgtgtatcaaaaactgatgcaaaaaatctcccttgcaaatctacacaagcagaagaattaatcctttttttttttcttttttcatcttgtgagtcagaatcaaacacatcatagaggttagggacatgggccctgggctgttgggcctggccccctctcttatgccactttgttgctcaatctttctttgtacaaatgtcctcatatacaaaaagatataaaaatactaccacagacagctgttgtgaggagcatgttgttctcagattctccttatacccaagcctaaaaggacttttaggtgctttctatttgttgataagaaaaaggagagttttaaagtttgaagctggtaggtggaaccaatattctggtgattattcactgaactgatttacttgagtgagtgaaagattaaggtccctggattataaagcagtgaccaggaaagctggtaatttggcatcctatcaaactcatactttgtgtttagcatttgtttagtgggagctgggagaaactgactttgtgttaataaaaataatatgaaaacaaattggcttttgtttcatttccagtaacaagttaatgatttggagaagtccacctcctgaaaactaaaaaggttagcttaaaaggaaaggaagaacattaaaatgaacatctaaaattaccaaagatctgatgagatggtatggaactatatggccaaaatcaaagtgaaggtgggaacacaaagatataagcagaacaccaaagctgtgttttcttgtgagcatttgcttaacctggtaaatctgacctttagtttccccagccttgaaaggatcagatcacatctcaaggtcaggagtcaaatacatgggtatttccattaggctggggcaccaaagggatacaagtcagtgtgacaatcagaagcaaaaccgtccaccttctactcactgacaagacccagagaaggctcataagcaattcctcctggagttgctcaaattcacatcatgtatgttatttttttaaaaaaaattactgaagcttttaattaaatgaaaattttagacagagaagacctcaagcaaggaagtttatcagggaaaagaagggtgttgtgtaatgatagaagtgtctttatacccacgtagaccagttgttagatgggggatgcctgaagaaggcagagtgagcttgggcatggtcacattttcagcagaggtatttctaggagagggctgtaaggtaagttgacaaccttcccagtggctggggaaaatgagttccttcaggtgtgggtggcactgaacagtatttatgaaagaaaactcaataaataaattaataaatgcatgtgtaaataattgccttggtgaaggcatttattgattctagtgaaattgagatgaggtttcaaaggacttaaggtatatgtggaatagaagacataaaacgtggagatactaattacagattgactcttcagtaaaagctgaaacccaaaataactacagtcgtgtgctgcataacgtgttggtcaatgatggactgcatatacaatggtggtaccataagattataatgaagatgaaaaattcctgccccctagtgaca

SEQ ID NO: 6881 - DNA, 62822 bp, Homo sapiens
ataacttggataaaatggatcaattccataaagaaacaatcttctaagtctcacacaagaagaaatagataatttgaataggcctttatttattaaagtaataaaataaaaaataaataacctccaaaagagaaaacaccagacccatataggtccactggtaaattctaccaaacatttatagaagaattatacccgttctctacaatctcttctagaagtagtaccagaggaaattcttctattcttaactcattttatggggccagcattactctaatactcaaatcagacaaggacattgtaagaaagcaaaactatatatcagtatatctaatgaaaataggtgcaaacctcaataaaagattagcaaattgcatccaatcgtgtagaaaaactgtatacaccataactaagtgggatttattttagaaatgcaagagttactcaacatatgaaaatcaaatattttacttcatcacattagttactaaagaagaaaagtctcatcatcatatccacaggtgcagaaaaaaaatttgcctaaatccagcacacattcatgataaaaactctcagcgaactaagaatagaggaggaactttctcaatttaataaagaatatgtgcaaaaaacctaccgctaacatcattattggtgagaaacttgaaattttctggctaataacaagaataaagtgagatgttccatgaaactactcctattcaacatcgtactagaaaccctttttaatgagataacaagaaaaagaaataaaagtgataccaatcaggaataaagaaataaaactattgtgtttagatcgcatgattgtttatgtagaaaatctcaaagaatcaaaaaacctccaaaaataaaaaaaacaaaacaaaacaaaaagaaaacaacaataatgaaaaaactcctaaaagtaataagctattgtagtaaggttgcaggatacaaggaaatcaaattcttttctctatattaacaataaataattagaatttggaattaaaaacatagtatcatttatattagcaccaaaaatatgaaatccctaggtggaagtctgtcaaaatacatatatcacttgaagaaaactacaaaactctgatgaaagaaaacaaagatataaataaatacacaaatatttcatgttcatggatatgaagaccgttgttagtctttttgatttgatctatagatcaacacaataagaatcaaactccaggaaagttttattatttttattattttttatctttagatgctaacaatctgattgtaaagtttatgtggagaggccaaaaaacccagaatagccaacgttaaggagaacaaagtcaaatgactgaccttacccaattcaacttcaagacttactatgaagctaatcaagacagtgtgcaattggtgaaaaaagtcaaatagattaatgcaagtgagtaaagagtctgaagtagatcatcagaaatatagtcaactgatctttgaaaaaaaaggaaagacaattcaatgggggaaaaatggtcttttcaacgaagactaatggagtaactggaggttcacatacggaaaaatgaatctggaaatagaccttacacctttaatgaaagttaactaaaaatatattatagatctaagccgggtgcagtggcttatgccagtattcccagtactttgggaggctgaggtaggcagatcacaggtcaggagatcgagaccatcctggctaacatggtgaaacccccatctctactaaaaatacaaaaaattagctgggcatggtggcacgcacctgtagtcccaggttgtcaagaggctgaggcaggagaatcgcttgaactcaggaggcagaggttgaagtgagccgagttgagagccactgcactccagcctaggtgacagagtgagactcagtctcaggaaaaaaaaaaaaaaaaatatatatatatatatatatatatatatgtgtatatatatatatatatgtgtatatatatatatatatacgtgtgtgtatatatatatatacatatatatattagatccaaatataaaatgcaaaactatgaatctctgatagtataagataggagaaaataaagatgaccttgatcagcaatggtttttaaaatactacaatgaaggtataatccatgaaataaagaatgactaagctggaccttattaaaatttaaacttctactctgcaaaagacactatcaagggaatgagatgaaaagacagagactgggagaaatactttcaaaagatatatctgataaacgacttctctccaaaaatttttaaaactccacaattagaaatcagacaccttgatttaaaaaatgggcaacagatctgaacagacacctcacccaagaagaaatacagatggcaaataaatatatgaaaaatgctcatcattaaacgtcactacggacctgcaaactaaaaccccaatgagatacaactacacacttatacaatggctaaaatccaaaacactgataaaaccaaatgttgacaaggatgtgcagcaatgagaactaagtcattgctggtggaaatgcaaaatgataaagacacttcaggagacagatgggcagtgcctaaaaaaactaaaatatgtttaccacattatctggtagttgtgctctttggtatttgccaaataagttgaaaatacatttccacacaaaaatctgcacatggatatttatagcagctttattcatcattgtcaaaaattagaaatcaccaagatgttcttcaatagataaatgaatagacaacgtgataaacctatacaatgaatgttatttagtgttaacaaggaatgaactatcaagccatgaaaagacatgcagaaactttatacatatgagtaagttaaatcttaaaaggctacatactgtatgattccaaccgtattacattttggaaaaggcaaaactatgcctacactgcaaagattatttgttgctagggcttgcaaggaagggagagagaacacgtaaagcacagaggttcttagggcagtaaagctattttatgtgatattacaatggcacatgtcattatgcattagtcaaatcccatagaatgtacaacacaaagaatgaaccctacataaactatgagctttggttgatgatgatgcgtcaatgttggttcattgattgtaactaatgagagttcttgattgtgagagagactgtgtgtgggtgcagggaaagaggcatgtggtaattatatactttccacttagtgttgccagaaaccccaaactgtttcaaaagcctactctaatccaccattctagtcaagctgaggtttgtattactcagtgactgtggagggcttaatgttgatactcccctgatcatttggactgagatgtgaattctatgagatgggatgtgacatgtcactgaattgggagttgaaaaactgggattctaagaaaagtcttggctgggcgttgtggctcatgcctgtaatcccagcactttgggagacctaggtgggtggatcacaaggtcgggagatcaagatcatcctgcccaacatggtgaaaccctgtctgtactaaaaatacaaaaaaattagctgggcgtggtggtgggcacctgtagtcccagctacttgggaggctgaggcaggagaatggcatgaacccaggagctggaaattgcagtgagccgagatcgcaccactgcactccagcctgggtgacagagcgagactctgtctaaaaaaaaaaaaaagaaaagaaaaagtcttatactgaggcattgtgattgtgatactttgtctcactgagtcaataattgctcatttcttaaaaaaaaaaaaagcaaagtttagagtagttgatctcagatatcccttctatctacacattatctataattctttctttctgtaaactgaaaggtctaggaaggagccgcagctcagcaggagagaggaggagctgagctgggacccctacctcctgaggaatgaaatgattattataaagacagcaaccgagcttattttacccaaaataaggtagtatatttctgttagagtttagagtttcatgagtcagggaccaagttattgcttttctttgccctgtataaaggcttctccaaggcctttgacttacctaagtactaaatgttataaaaccaaactcttctgacctctcaatctagtcaactggggctgtaattattaatgaaattaatgtttattttgaaaataatttactagactgaattacgaaatcctgaatcattgtacactatcagtaaatattggtggacccaactgaactgaatgttttgcttgaaatgaaacctttgagatgcagggcttatgggttctagtcccagctctagcactagcagacagcatgttcttggctaagatactgaatcttcaaggctcagcttcctcattccggaaatgggtcaattttattgtaagcagaggtaattgagagattcaaaagggacatgaggtgtaacaattctctgtaaattgttagaatccctgttaaaaatgaccagtaaagctttgtgcaactgtgtcttgacataactttatttttcttaataaaagaaatggaaataacctcactagggaatttagaacaaatatgatgatatctttaaagaaaatggctttgcacaagtattgacattaatgatctagtaaagtgtatctttctagttgtatttagatcctcaactcagtatgtcagctcctgttaaggtctatacattgtggtggttctgtgctgtgggtccatttagtgatttccctacctcccatcttttattgcatccacaactgtggttctgtccataatttcctttgctttctgtgcattattacatcatatctgaaaatgagaaaccaaaaacaatagaaagcagccatgtctggaggtgactggggggtcgagaagccctagtttctcaaacccttagcaccaaatttttccctcagttacactgagcgtttcacttctgcagtgatggagaagggagatcccttatttcttctcatgagcatctctggtgctgtttcccttagagacaaataaggggttctatttaatgtgaagcctgttttatgaacagaataaatgtggtgtatattcagaataactaatgtttggaagtttgttttattttgctaaaattgttctcaaggcagctctggtgtaagagataatacaccacgatgggcatcagaagacctcagctcaaatcccagttctgccagctatgagctgtgtggcaccaacaggtgtcctgttctcccagggtctcccttttcccatttgaaaaataaaaaataacaattcctgccttcaggaattttttttagggggtttaatggtaaaggtgtttatatctgctaaggtaatttacttgatatatgtttggttatttaagatatatgagttatgttagctatttcatgtttaggctgctgtatttttagtaggctatattaaatatttgaaaggatttcattataaagaacaaagtctcctaatctttgatatagcattgacatactttttaaatatacaaggcatagaatatggccatttctgttaaatcatatattcccaactggttattaatctaagaattcagaattttgagtaattgcttttgcatcagattatttacttcagtgctctcaattatgatggtgcattagaaccatctgggttaacatttgttttttattaccaatacctaggctccaaccaagtacagtgaaactggaatgtacagagtggacaatggaacgaaggagaacaagaccaaaggacattttatttttatctgtatcagtgggtcaaagtcctttcagaaggagcatatagtggacctaggtgattggtcaatttatccatcaaagaggcacacaccgaattagcatggagtgttataaaaggcttggagtgcaagctcatggttgtcttaacaagaagagaaggcttcaatggattctcttgtggtccttgtgctctgtctctcatgtttgcttctcctttcactctggagacagagctctgggagaggaaaactccctcctggccccactcctctcccagtgattggaaatatcctacagataggtattaaggacatcagcaaatccttaaccaatgtaagtatgctccttcagtggcttgcaaaaggtaagtaaattcacctgtattttttaaataaagtgtatccctagaggtacaygttacaagaggtaatggtaaagtaaaatactttgaaaggcttttgttgccttttccagtctgtcagtgtcagaaatagtggaatgaaaccatgtattttgtgagtagagaaagatttgggtctttgcatgttagattcaaaataacaagtgtcaatagtttgaaaagctgtgttccttcttcatttcataaccatttgctataatttttggctgaaggtaaatggtaaggtattctgggatctggtcagcagcccacaaagcaactgggctctctcttttttcccaggtggatcggcaggttgagaaataatagacacacaagatagtgaaagctgggtccaggggggtcaccgccttctggtcccatggtgccaagaatgcactggatataccagcatttattattaagtttagtgagggcaggggtaggttagtgagggatttagggtcatttgattatgaggtgagatggtcacatggggatgaagtaattctttaacatarcatttgtatgtagaagtacagtacatttgtatgtagaagtacagtatacggagataagaatttacaatatagtgtgtgcgtcagtaatttctaacagagccttaaaacagaaacacaatctttccataacctatgattagcaagatattaatcagcagtaacaattgcaacaaaagctggttacaaacaatccatggaaataggatgtgaagctagacaaccagttagaccagaaattctcagaagggmgtatgccttaaccctaaagaggcctagaagagccatggcaagatgagggcatttatagccctatcttatccatatggacaggtgccccccatgcgtccatttataggttctccacaaaggtcgcattccattcccagagctatgaacatctgcttttctgggataggaatcttggtgatgtgaaacctctctgactgcacgtccattcataggctctctgcagggggaagcacatcacrcgctgttggctcattctggcagtccagcctggcactgtccttacacaatcctgcatgcaattttgtatttacaataatcgggagcatttcatcttttattccgtagcaatagtttcagggggggtctccctacagtaaggaacatgtttgttattagagattttattaaataagtcctctactatattagccatgtgttttattcagaatagccatgaaaattaaacttctctgaagaattaatttatgcctgttgtaaaggaaataactgtgggttcaggaccagcaaaagcagataagtggtagaaaagaagttatagacttccatttttagatccacaaagtactgttttaattatactatagctacaatatataaaccccaaaatgaccttagcatttagtaatggtaggaagaaggtcagaagatgtataagtattagggttttttctcaagtgaaagatggtttagcagtgttaatatgatatgtgaacacccctcgttgtgtaataattaccatatacagagagtaaagggctgcaattagtatattaagtcttataagcatgatggtatgattagatcaagagaatgacgctgtagttatgaagactactcctactagattgatggtagggggcagggcaaggttggcaagactagctaggagtcatcacatggctatcagggagagaagtgtttgaaggccttgtgttastagtatggtttggctgtgaactcgtttgtagtttgagtttgcaaggcagaataatagggatgaggttagtctgtgggcagttattagggaagttgcactggtaaaacttcagggggtttgaatgagaaaagctaygataacaagtgccatgtggcttatggaaaagtaatgagtgattttagatcagtttggcacagacaaaaggagcttgttatgattatttctcawaaggatagtaagaaggaggaataagctataaactctgttagggggttaagaattaaggtgatttgtataatcctatagccatctaattttaggagtactgctgtgaggactattgacctggcaattgcggcctctatgtgggcttttgggagtcctaggtggagtccatagagagatatttttagtataaatgctatgatgcatgctaatcataaaaggctattaaaccaggaaattgttagttcttgaagctgggtattggtcttaaggtagactcgaaagtgctgataaatttctcaagcatcagtgtttgaataagcggagtttcaaattttggtctgctgtacattagctgtgagacactgaaaatgaatttgtcattctctgagctcagttttttttttttttttttttttttttgagacagagtcttactctgtagctcakgctggagtgcagtggtacaatcttggctcactgcaacctccatctcccaggtccccattcaagaaattctcctgcctcagtcccccaagtagctagcattacaggcatgcaccaccatgctcagctaatttttgtatttttagtagagacgtggtatcaccttgttggccaggctggtcttgaactcctgaccttgtgatccacctgccttggcctcccaaagtgttgggattacaggcaggagccaccacacctggccgtttgtttaaaatagagtaaatagacctgctgaatatgttgatgtgagtattaattgtaatctgcatagcaattgtctgaccattgccttgaacatcacaggccatctgagtggcaagtataatcatcatcatgtttctatttaaaattcagaaatatttgaagcctgtgtggctgaataaaagcatacaaatacaatgaaaatatcatgctaaatcaggcttagcaaatggacaaaatagtaacttcgtttgctgttatctctgtctactttcctagctctcaaaggtctatggccctgtgttcactctgtattttggcctgaaacccatagtggtgctgcatggatatgaagcagtgaaggaagccctgattgatcttggagaggagttttctggaagaggcattttcccactggctgaaagagctaacagaggatttggtaggtgtgcatgtgcctgtttcagcatctgtcttggggatggggaggatggaaaacagagacttacagagcycctcgggcagagcttggcccatccacatggctgcccagtgtcagcttcctctttcttgcctgggatctccctcctagtttcgtttctcwtcctgttaggaattgttttcagcaatggaaagaaatggaaggagatccrgcgtttctccctcatgacgctgcggaattttgggatggggaagaggagcattgaggacygtgttcaagaggaagcccrctgccttgtggaggagttgagaaaaaccaagggtgggtgaccctactccatatcactgaccttactggactactatcttctctactgacattcttggaaacatttcaggggtggccatatctttcattatgagtcctggttgttagctcatgtgaagcgggggtttgaagctgagagccaagggaatttgcacatatttgtgctgtgtgtgtacaggcatgattgtgcrtacagtgtgggtataaaaggttcatttaatcccatgttctcytgaactttgcttttttgctttcaaataagaaatgatgaatatagattttgagttcattttttgaaagagttaaagagcagtgtttttcccattacctattccagaacatgtcaccagagaatacttgacaagtcaacatggtgggaatggccctatcatacccatatggagcatgaaccaaatggcatgtgcttttatttaattggactgtgtttgtatggtcagcctcactgacttctctggggtttcttttaggcccgtgcttgccattctggccagtaatgacattctacagtttttattgcttaggcatatcttagtgcagttctcatcaattattatttctctgtaaacacagcattattttaaaaatagtattaattatttcttgttactgtattgatttatatattttcagtaaatacatcctgtagcataattctgtgaaatacccaaatgtcaatttataaaatgatttatttaacaagattttacttattagtaataactctgtaatctgcattccctatgtatgatttggctctgtttcagttttgcttatctctttccaaccatatttatgaaattttggcttagaaatttatgttaattattttttttccatggccaactctactcatctatgaagttttacaatgaatctgtttatcagcttggataccaaattaccttgtttttaaattctgttttcccaatgaagttaaagactgaaaatcagatttatctgtgaatgacacacacaaactaacagatttccaactgttcaatgcctggccattcattcagagtacttttgattaaagtcactatttagggcctatagatatcaggggaaattcagcccctgatatttcaatgtgartccttttctattctccctaagtgttggctggtctgagaaataaagggaaagagtacaaaagagagaaattttaaagctgggtgtccaggggagacatcacatgtcggcaggttccgtgatgccccctaaaccacaaaaccagcaagttttcattagtgattttcaaaagcggaaggaatgtgtgaatagggtgtgagtcacagagatcacatgcttcacaaggtaataaaatatcacaaggcaaatggaggcagggtgagatcacaggacmggagtgaaattaaaattgctaatgaagtttcaggcactcattgtcattgataacatctcatcaggagacagggtttgagagaagacaaccagtctgaccaaaatttattaggcaggaatttcctcttcctaataagcctgggagcactatgggagaccaggccttatttcatcccttatctacaactgtaaaagacagacgttctcaaaacagccattttagagaccaccccttgggaatgcattcttctcagggatgttccttgctgagaaaaagaattcagtgatatttctcctacttgcttttgaaagaagtgaaatatggctctgttctgctcagcccacaggcagccagacttcaaggttatctcacttgttccctgaacatcgctgttatcctgttttttttttcaaggtgcagatttcatattgtttaaacaatttgtgcagttaacacaatcatcacagggtcctgaggtgacattcgtcctcagcttaggaagatgatggtattaagagattaaagtaaagacaggcataggaaatcacaagagtattgattggggaagtggtaagtgtccatgaaattttcacaatttatgttcagagattgcagtaaagacaggtgtaagaaattataaaagaatgaatttggggaactaataaatgtctgtgaaatcttcacaatttatcttcttctgccatggcttcagctggtccctccgttcggggtccctgacttcctgaaacatatagatgtgaatttgggagctctttaactataaagtttaatatctcaaaataataagagctatttatgacaaacccatagccaatatcatattgaatgggcaaaagctggaagcattccctttgaaaaccagcacaagacaaggatgccctctctcaccactcttattcaacatagtattggaagtcctggccagagcaatcagtcaagggggtattcaaatgggaagagaagaagtcaaattgtctctgtttgcaggtgacatgactgtatacttagaaaccccatcatctcagccccaaaactgtttaagctgataagcaatttcagcaagrcctcaggatacaaaatcaatgtgcaaaaataacaagcattcctataaaccaataatagacaagcagagagccaaatcatgagtggactcccattcacaattgctacaaagggaataaaatgcctacttacacaacttacaagcgatgtgaaggacctcttcaaggagaactacaaaccacttctcaaggaaataagaggtgacacaaatggaaaaaaattccgtgctcatgaatagaaagaatcaatactgtgaaaatagccatactgcccaaagtaattcatagattcaatgctatacccgtcaaactatcattgactttcttcacagaactagaaaagaataatttaaatttcatatgaagcaaaaaaagagcctgtatagccaagacaatcctaagcaaaaacaaagctggaggcatcattctacctgacttcaaacaatactacaaggctacagtaaccaaacagcatggtactgggaaaactggctagccatatgcagaaaacagaaactggaccctttccttacaccttatacaaaaattaactcaagatggattaaacacttaaacataaaaccaaaaaccataaaaaccccagaagaaaacctaggcaataccattcaggacataggcatgggccaagwgtttgtgactaaaacacaaaaagcaatggcaacaaaagccaaaattgacaaatgggatctaattaaactacagtgcttctgcacagccaaagaaactgcatcagagtcaacaggcaacctacagaatgggagaaattttttgcaatctatccatctgacaaagggctaatatccagaatccacaaagaacttaaatttacaagaaaaaaagaaatatccccatcaaaaatggacaaaggatatgaacagatgcttctcaaaagaagacatttatgcagccaacaaacatatggaaaaaagcttatcaacactggtcattagagaatgcaaatcaaaactacaatgagataccatctcatgtcagttagaatggtgatccttactaagtcaggaaacaacaggtgttggtgagaatgttgagaaatatgaaccctcttacactgttggtaggagtgtaaattagttcaaccattgtggaagacagtgtggtgattccttaaggatctagaactagaaattccacttgactcagcaatcccattactgggtatatgcccaaaggattataaaccattctactataatgacacacgcccatgtatgtttatgtggcaccgttcacaatagcaaagacttggaaccaacccaaatgcccatcaatgatgtactggataaagaaaatgtggcacatatacaccatggaatactacrcagccataaaaaaggatgagttcatgtcctttgcaggaacatggatgaagctggaaatcatcatcctcagcaactaacacaggaacagaaaaccaaactccacatgtttgcactcataaatgggagttgaacaatgagaacacatggacacagggaggggaacatcacacatgggacctgttggggcacggggggccagcagggggacagcattaggacaaatacctaatgcgtgtggggcttaaaacctagatgacaggttcataggtgcagcaaaccaccatggcacatgtatacctctgtaacaaacctgcacgctctgcacatgtatcctggaacttaaagtaaaataaaagaaaatttaaaaaatataaagtttatcgatcacttgattataacaacttcatttcagagatcctccaccaaacaagaaaacttttcctataatttaattcatttagctattaaatgatasgctgggcctaatcaatatcaaattaaataggttaaatttgcaggatgattagagatgagggcatttagttcctaaagaagaaaattcattttaaaaaaggtacagaagaaaaaaactccacttatcaatttacactttcttgtttgccttacctgggatttatatttaaaataaaagtttttggccaggcgcggtggctcatgcctgtaatcccacaactttgggaggccaaggctggtggatcatctgaggttgggagttcgagaccagcctgaccaacatggaggaacctgtctctactaaatatacaaaattagctggatgtggtggcacatgcctgtaatcccagctacctgggaagctcaggtggagaatcacttgaacctaggaagcagaggttgtggtgagctgagatcgtgccattacactccagcccaggcaacaagagtgaaactccatctcaaaacaaacaaataaacaaaaaacaacaacaacaaaaaacaacaacaaagttttcatttaattttttaacaaactaatctatgttaatttgatattagtttgttaacataacaaactaataatatgttaggcatattattcatttatatttgttttccttctcataaaacacattctgctcttacatttattttcttaaatacatgaattcaccaacagtctctttggttcctctctactggttcaacacatgactctttcagctattcattatatataaaaagctttgaaatctccaactattcttgccctttccatctcagtgccttgytgtctactgactttgcagactgatgtgattccctctgaaacatgaattattaggtttttagaaaatgcctttttgttctttccaaagtaaaagacaaataggctgggaatgtaaatttagcatttgaacaaccattatttaaccagctaggttgtaatggtcaactcaggattaatgtaaaagtgaagtgttgattttaygcatgccgaactcttttttgctgttaagggaatttgtaggtaagataatttctaaactactattatctsttaacaaatacagtgttttatatctaaagtttaatagtattttaaattgtttctaattatttagcctcaccctgtgatcccactttcatcctgggctgtgctccctgcaatgtgatctgctccattattttccataaacgttttgattataaagatcagcaatttcttaacttaatggaaaagttgaatgaaaacatcaagattktgagcagcccctggatccaggtaaggccaagatttttgcttcctgagaaaccacttattctcttttttttctgacaaatccaaaattctacatggatcaagctctgaagtgcatttttgaatactacagtcttgcccagacagccttggggtgaatatctgggaaagacggccaagccctttattttatgcatgggaaataaatgcctcaatataggcctgatttctaagcccattagctccctcatcaatgttttttctgctaaactccaaagccctgtttctgtaaagtactttgttgacagccctaaagcgtgctcatagcactccatggatatccaggcactttggaggctcccattactcacaagacttgtccttcaattaacactttgtcgtattatgtggcagaaatatcctaatttaaaagacattatctccttctagtagggagaatatttgggaccatagaagctgccaagaaacactgaatagggcaggggtgtttgatatctcagttgggatcctagctgatgagatagctgggttargaatgacaaaattattggttttatggtgtatgaaccataaacagacatcacacttataccctgtgctgagctggcatgttttattctctgcctaaataataattgtgtgattttatagaagtcatttaactgctctggtgcacagttggaatttgaagtatctttgagcccctcccacttctaaaatactaattccatttcagaggctgcttgatagaaatcaatatagtagggactagctttgtactatcaatcaggttgtccaaattcttttaacctatgctgtcatctacaaaacgtgaatgtagtaattcatgccatcttatatttcaagattatagagaagaattgtaaaaagtaacagaattaacataaagatgcttttatactataaaaaggaggtctgagtctaggaaatgattatcatctggttagaattgatcctctggtcagaattttctttctcaaatcttttataatcagagaattactacatatgtacaataaaaatttccccatcaagatatacaatatattttatttatatttatagctgtaatttacaaccagagcttggtatatggtatgtatgcttttattaaaatcttttaatttaataaattattgttttctcttagatctgcaataatttttctcctatcattgattacttcccgggaactcacaacaaattacttaaaaacgttgcttttatgaaaagttatattttggaaaaagtaaaagaacrccaagaatcaatggacatgaacaaccctcaggactttattgattgcttcctgatgaaaatggagaaggtaaaatgtaaacaaaagcttagttatgtgactgcttgtgaatttgtgatttgttgactagttctgtgtttactaaggatgtttaactggtcaatcagtaatgcttgagaagcactttaagtttttattgtatgaatgaataacaaaatagaccactagctagactaataaagaagaaaaaagagaagaatcaaatagacacaataaaaatgataaaggggagatcaccactgagcccacagaaatataaactaccatcagagaatagtataaacacctctatgctaataaactagaaaatctagaagaaatggataaattcatggacacatacactctcccaagactaaacaaggaagaagtcaaatccctgaatagaccaataacaagttctgaagttgaggcggtagttaatagcctaacaaccaaaaaaagtccaggaccagatggattcacagccaaattctaccaggggcacaaagaggagctgacactattccttctgaaactattccaaataatagaaaaagagggactcctccttaactcattttatgaggctagcatcatcctgatacccaaaccgggcagagacataacagaaaaagaacatttcaggccaatatccctgatgaacaccaatgcaaaaatccacaacaaaatactgccaaaccaaatccagcagcacatcaaaaagcttatccaccatgatcaagtagccttcatccctgagatgcaaggctgtttcaatatttgcaaatcaataaatgtaatccatcacataaaaagaaccaatgacaaaaaccacatgattgtctcaatagatgcagaaaaggcctttgataaagttcaatacccttcatgctaagaattctcaataaactaagtaatgatggaacatatctcaaaatagtaagagctgtttatgacaaacccacagccaatatcatactgaatgggcagaagctggaaggattccctttgaaaaccagcacaagacaaggatgccctctctcaccactcctattcaacatagtattggaagctctggccagggcagtcaggcaagagaaagaaatgaagtattgaaataggaagagagaaagtcaaactgtctctattcgcagatgacatgattgtatatttagaaaacccctttgtctcagcccaaaatctcaagttgataagcaacttcagtatagtctcaggttataaaatcaatgtgcaaaaatcacaaccatttctatacaccaataatagacagacagccaaataatgagtgaactcccactcacaattgctacaaagagaatataatacctaggacacaaacaaatggaaaaacattccatgctcatggataggaagaatcaatatcatgaaaatggccactgcccaaagtaatttatagattcaattctatccccatcaagctatcattgcctttcttcacagaactagaaaaatctactttacattttatatggaacgaaagaagagcccacatagccaagaaaatctaagcaaaaagaacaaaaagttcataatcactgggacattggagaaatgcaaatcaaagtcccaatgaggtaccatctcatgccagttagaatggtgatcattaaaaagtcaggaaacaacagatgctggagaagatgtggagaaataggaatgcttttacachgttagtgggagtgtaaattagttcaaccattatggaagacagtgtgctgattcctcaaggatctggaacaagaaataccatttgacccagtaatcctgttactgggtatatacccaaaggattataaatcattctactataaagacacatgtgcacgtatgtttattgcagtactattcacaatagcaaagacttgggaccaacccaaatgctgatgaatgacagtctggataaagaaaatgtggcacatatacaccatggaatacagtgctgccataaaaaaggatgagttcatgtcctctgcagggatatgggtgaagctggaaaccatcatcctcagcaaactaacacaggaacagaaaaccaaacattgtatgttctaactcattaatgggagttgaacaatgagaacacatggacacatggaggggaacatcaacaccggggcctgtcagggggtgggggacttggggagggatagcattagaagaaatacctaatgtggatgacaggttgatgggtgcagcaaaccaccatggcgcgtgtatacctacgtaaaaaacctgcatgttctgcacatgtatcccagaacttaaagtataaatatataaatctacccaaggagaaacagaatgcacattccaggtgaaatggaatcaattactgacaaatatgaaaacataaaatatgccctgtgatgaagatgggtgtcattattgcacacagtttatttgagaatgggaaagaatgacttaacctaggtgggtttcctgcattcctgcaaattgaaataggccataaaatatttgcagtgagagtcagaggaggggtttcagataggttggaatgctctacatggaggtgcagaggtgggtgatgggaaagagtaggtggatggaagagggaaaggaagcctttattgagtgagaacaaaaatgatttgtacagataacagttggaatttagtgtctatcagataaggcgtaaacatcaatgccgttgtcatcgcaccattgttgaaaacgctattttttcccctattgaattgccttggcaaccttgtcaaaatccaattgactataaatgtgtgaaaggtttttttctgtgtgctctcaattgtactccattgatctatatgtctgtcgtaatccctatagtacaccatcttaattactgtagtattgtattaatatcaagttattatatcaaatcaaggagtgtgagtctttgttgttctttttcaatacgttttcactattctgggtcccttgaatcttcatatgaaatttagaatacacttgtcaattttctcaaaggagccaatggggattttgacacgattgcattaaatcagtagatcagggaattatgccatttttaaaattgaagtgaaattcacacaatatacaattaaccaytttaaagtgtagacttgagtggtatttagtgtattcacaatgttgtacaaccaccagctttctctggtttcaaaatgtttttattacttcacaaaaacatatcatattcattaaataatcactccattcctccaacccatcatgtaattacctctaatcttctttctgtttctatggatttgcctgttatggatatataaaggactcacagcatatgtaacctgttatgtctgagtcctttcacttataatgttttrgaggctcatctaagttgcaacatgtatcagtacttcattcttttttgtcgctgaaatatattttatttttccatgcacatatatcacaatttgttattcatctgtttatggacatttgcattgtttccaacctttggctcttatagatdatcttgctttgatcatttgtgtatgtttctttatgggcatattttcatcattcttgggtatattctcaggagttgaattgctgggtcaaatggtaattttatgcttatcttcttgtatataagagccaatcttttctacagtgaatgtggcattttatattccttccagcaatgtagaaggatttctattttccacatagttgctaatacttgtaactttctgtatttattgaagccatcctagtgaatatagagtgttatctcattgtggttttatttatttattcatttatttagagacagagtcttactctgtcacccaggctggagtgcagtggcatgatctcagytccctgcaacttccacctcctgggtttacacaatcctcctgcctcagcccccagagtagctgggattacaggcatgtgtcaccatacctggttaattgttatatttttggtagagacgggttttctccactttggccaggctggtctcgaactcttgacctcaggtgatctgcccatcttggcctccctaagtgctgggattacaggtgtgagccactgcgcccagctctcattgtggttttaacttgtgtttaatggccaatgattttgaacttcttttaatatattattacccatttgtatatcttctttggataaatgccattcaagtacattttctgtttaaattaagttgactttatttttctttttaagctgttagaatgatttatgtattcaaaacattaaactcctacatatacataatatgaagatatttcctcccattctgttggttgtcatttcacattctcaattatattcttgctgcacaaagtttaattttgatgaagtttggtttatctatctttccttttgccactctggtatcaaatttataaatctattgccaaatatgaagtcatgaagatttacccctacattttattctaagagttttatcgttttagctcttatatttaagtttttccatccattttcagttatatttttcatttggagygaagtaagggagatctcagcttcattcttctgcatttcgctgtcctgttgtctcatcaccatttgttgaagagactctttcctcagattgaatggtctaggcacccttgatgaaagtaaatttgccatagatctttaggtttatttcgtgatttcagttttattccatttgtcttgatrtctatctttatgctagtaccacactgttttgattattacagtttgtagtaagtttgaagttggaaactgagtactcactgatacagaaattaagtagaaattacttaggcaaatagtaagcatttgggagtcctcagtaaggtttttctttatactggaaagcagccccaaatcattttctaacaaagagcagcttgtaaaatcgagctgcagacatacacaaggaagctggaaacttgcacgagtgaaagctggtagtaaagaactacctgtgaccaggcaagttcaaaatggcggctccttccccacccactatgtaaatgtcacacctgattaaaccaatctctgggccatacgtaaatcagacactgcttcctccagcctccctatgcaatctgctgtggtccacctccttcccccttttccgatgtccctctctttcacaagaagctgcttttttctctcctttcttctattaaactttctgctacataacccactcagatgtgtccgtgtcctaaatttttctggggcatgatgacaaacctgagggtgtatatcccagacaacgtagctgcttcatcaccatgtagttgcatattaattgaacaatcaactttcccatttctggaaaaaagaccattggtattgtggtagggattgcctgagtttttagatcactttgaggagtactgccatcttaacgatattaagtcttccaatccctgaacatgagatagttttcaatttatgtaggtattagatattcttttttcttctgttgcaagggtctggtttagtttaaaaggcaagtttatcttaaatttttttatttagttatgaccattgaggattttaaaatgataccatatgaaatgccttcttttaaaaaaaatttcaacttttatttatttatttatttatttatttttattatactttaagttttagggtacatgtgcactatgtgcaggtctgttacatatgtatacatgtgtcatgttggtgtgctgcatccatgaactcgtcatttacattaggtatatctcctaatgctatccctccccactctgccaccccacaacaggccccagtgtgatgttccccttcctgtgaccatgtgttctcattgttcaattcccacctatgagtgagaacatgcggtgtttggttttttgtccttgagatagtttgctgagagtgatggtttccagcttcatccatgtccctacaaaggacatgaactcatcattttttatggctgcatagtattccatggtgtatatgtgccacattttcttaatccagtctatcattgttggacatttggcttggttccaagtcgttgctattgtgaatagtgccacaataaacatatgtgtgcatgtgtctttacagcagcatggtttataatcctttgggtatatacccagtaatgggatggctgggtcaaatgrtatttctagttctagatccctgaggaatcaccacaccgacttccacaatggttgaactagtttacagtcccaccaacagtgtaaaagtgttcctatttctccacatcctctccagcaccttttgtttcctgactttttaatgatcgccattctaactggtgtgagatggtatctcattgtggttttgatttgcatttctctgatggccagtgatgatgagcattttttcatgtgttttttggctgcataaatgtcttcttttgagcagtgtctgttcatatcttttgcccactttttgatggggttgtttgttttttatcttgtaaatttgtttgagttctctgtagatcctggatattagccctttgtcagacaagagggttgcaaaaattttctcccattctgtaggttgcttgttcactctgatggtagtttcttttgctgtgcagaagcyctttagtttaactagatcccatttgtcattttggcttttgttgccattgcttttggtgtatgagacaagaagtccttgcccatgcctatgtcctgaatagtattgcctaggttttcttctagggtttttatggttttaagtctaacatgtaagtcttgaatccatcttgaattaatttttgtataaggtgtaaggaagggatccagtttcagctttctacatatggctagccagttttcccagcaccacttattaaatagtgaatcctttccccatttcttgtttttgtcaggtttgtcaaagatcagatagttgtagatatgtggccttatttctgagggctctgttctgttccattggtctacatctctgttttggtaccagtaccatgctgttttggttactgtagccttctagtatagtttgaagtcaggtagctttgttcttttggcttaggattgacttgacaatgcgggctcttttttggttccatatgaactttaaagtagttttttccaaatctgtgaagaaagtcattggtagcttgatggggatggtattgaatctataaattaccttgggcagtatggccattttcacgatattgattcttcctacccatgagcatggaatgttcttccatttgtttgtatcctcttttatttcattgaacagtggtctctagttgtccttgaagaggtccttcacatcccttgtaagttggrttcctaggtattttattctctttgaagcaattatgaatgggagttcactcatgatttggctctctgtttgtctgttattggtgtataagaatgcttgtgatttttgcacattgattttgtatcctgagactttgctgaagttgcttatcagcttaaggagattttgggctgagatgatggggttttctagatatacaatcatgtcatctgcaaacagggacaatttgacttcctcttttccttattgaataccctttatttctttctcttgcctgactgccctggccagaacttccaacactgtgttgaataggagtggtgagagagggcatccctgacttgtgccagttttcaaagggattacttccagtttttgtccattcagtatgatattggctgtgggtttgtcataaatagatcttattattttgagatacgtcccatcaatacctaatttattgagagtttttagcatgaagagctgttgaattttctcaaaggccttttctgtatctattgagataatcatgtggttcttgtcattgattctgtttatatgctggattacatttattgatttgcctatgttgtaccagccttgcatcccagggatgaagcccacttgatcatggtggataagctttttgatgtgctgctggattcggtttgccagtattttattgaggatttttgcattgatgttcatcagggatattggtctaaaattctctttttttgttgtgtctctgccyggctttggtatcaggatgatgctggcctcataaaatgagttagggaggattccctttttctattgattggaatagtttcagaaggaatggtaccagctcctccttgtacctctggtagaattcggctgtgaatccgtgtggttctggactttttttggttggtaagctattaattattgcctcaatttcagagcctgttattggtctattcagagattcaacttcttccttgtttaatcttgggagagtgtatttgtcgaggaatttatccatttcttccagattttctagtttatttttgtacaggtgtttatagtattctctgatggyagtttgtatttctgtgggatcggtgatgatatccccttcatcattttttattgcgtgtgttggattcttctctcttttattctttattagtcttgctaacagtctaccaattttgttgatcttttaaaaaacctgctcctaaattcattgattttttgaagggttttttgtttccatgtaattgagtttccattgtttccatggaatgcaaaaattccatgttttgagtgagtttcttaatcctgagttctagtttgattgtgctatggtctgagagacagcttgttataatttctgttcttttacatttgctgaggtgtgctttacttccaactatgtggtcaattttggaataggtgtggtgtggcgaaaagaatgtatattctgttgatttggggtggagacttctgcagatgtctattaggtctgcttggtgcagaactgagttcaattcctggatatccttgttaactttctctctcgttgatctgtctaatgttgacagtggggtgttaatgtctcccattattattgtgtgggagtctaagtctctttgtaggtctctaagcacttgctttattaatctgggtgctccgttattgggtgcatatatatttaggatagttagctgttcttgttgaattgatccctttacctttatgtaatggccttctttgtcccttttgttctttgttggtttaaagtctgttttatcatagagtaggattgcaacctctgcctttttttgttttccatttgcttggtagatctttctccatccctttattgtgagcctatgtgagtctctgcatgtgagatgggttttctgtgtacagcacaccgatgggtcttgactctttatccaatttgccactctgtgtcttttaattggagcatttaacccatttacatttaacattaatattgttatgtgtgaatttggtcctgtcattattatgttagctggttattttgctcattagttgatgcagtttcttcctagccttgatgatcttacaatttggcatgcttttgccatgggtggtaccagttgttcctttccatgtttaatgcttccttcaggagctcttttagggcaggtctggtggtgacaaaatctctcagcatttgcttgtgggtaaaggattttgtttctccttcacttatgaagcttagtttggctggatatgaaattctgggttgaaaattcttttctttaagaatgttgaatattggcccccactctcttctggcttgtagagtttctgccgagagatcagctgttaatctgatcggcttccctttgtgggtaaccyggcctttctctctggctgcccttaacattttttccttcatttcaactttggtgaatctgacaattatgtgtcttggagctgctcttctcgaggagtatctttgtggtgttctctgtatttcctgaatttgaatgttggcctgccttgctagattggggaagttctcctggatagtatcctgcagagtgttttccaacttggttccattctcctcgtcactttcaggtacaccaatcagatgtagatttggtcttttcacataggcccatatttcttggaggctgtgttcgtttctttttattcttttttctctaaacttctcttctcacttcatttcattcatttcatcttccatcacttataccctttcttccagttgatcaaatcggctatggaggcttatgcattcatcacgtagttcttgtgccatgattttcagctccatcaggtcctttaaggacttctctgcattggttattctagttagccattcatataatcttttttcaaggttttttacttctttgccataggttcaaacttcctcctttagctcagactagtttgattgtctgaagacttctctcaactcatcaaagtcattctccatccaactctgttccattgctggtgaggagctgtgttcctttggaggaggagaggcactctgatttttagaatgttcagtttttctgctgttttttccctgtctttgtggtttcatctgcctttggtctttgatgatggtgacatacagatgggattttggtgtggatgtcctttctgtttgttagctttccttctaacagtcaggaccctcagctgcagtctgttggagtttgccagaggtccactgcagaccttgtttgcctgggtatcagcagcggaggctgcagaacagcggatattggtgaacagcaaatgttgctgcctgatcgttcctctggaagttttgtctcagaagagtacccagccttgtgaggtgtcagtctgcccctaatggggggtgcctcccagttaggctacaaggggrtcagggacccacttgaggaggcagtctgtccattctcaggtctcaagctttgtgctgggagaaccactattctctccaaagctgtcagactgggacaattaagtctgcagaattttctgctgccttttgtttggctataccctgaccccagaggtggagtctacagaggcaggcaggcctccttgagctgcggtgggctccaccyggttcgagcttcccagccrctttgtttacctactcaagctttggcaatggggggcacccctcacccagcctcgctgctgccttgctgtttgatctcagactgctgtgttaggaatgagtgagcctcagtgggcataagrccctctgagccaggcacgggatataatctcctggtttgccatttgctaagaccatcagaaaagcacagtattagggtggaagtgaccttattttccagatgccttctgtccttggctaagaaagggaattctctgaccccttgcacttcccaggtgaggtgattcctcaccctgcttcagctcaggctccatgcactgcacccactgtcctgtacccactgtctcacaatccccagtgagatgaacccagtacctcagttggaaatgcaaaaatcattcatcttctgcatcrctcatgctgggagctgtagactggagctgttcctattcagccatcttggctccaaatgttctcaacttttattttgaagtgcacgttcatgtgtcttacataggtatattgtgtgatgctgaagtttagggtacaaataatgccatcacacaggtagtgagactagtacccaataggtagtttttcagcccttgcctttatatctctctaccctctatagtaattccttgtgtattttttccatctttgtgtcccacttttatatgagaacatgtggtatttggatttctgttgctgcattaattccctcaagataatggcttccagctacatctatgttgctgcaaagacatgattttttttaatggctgcatagcatttcatggtgtatatacaccacattttgtttatgtgacacatgattggttggttctatgtctttactattgtgaatagtgcaggaatggacatactagcacgtgtcgttttggtagaacaatttgttttcctctgggtamatactcagtagtggaattgctgcatcgaatggtagttctgcttttagttctttgagaaatctcaaaactggtttccatagtggctgaactaacttacattcccaccagtagtatataagtgttctcttttctctgcagtctcaccaacatctgttatttttkggctttttaatcatatccattttgattggcatgagatgatatctcattgtggttttgatttgcatttctctgatgattagtgatgttgagtgttttctcatatgcttgttggccatgtgtgtgtcttctttggaaggacatatgtcctttgcccactttttaatggggttacttgttttttaacttgttgaattgtctaacttccttatagattctcgctattgaaacattgttggattcacagtttgcaaatattttgtcccattctgtaggttgtctgtttattctgttgatagtttctcttgctgtgcagaagctctttaattaggtcccacttgtcaatattcattttggttacaattgcttttgaggagttattcataagttctttgctaaagcctgtatccagaatgttattttatagatatttttccatcagattcttatagtttgaggtcttaaayttagatcattaatccatttcgagttaattattgtatatggttcaaggaagtgtttcagtttcattctgcatatggctagtcagttatcctcattcaatttactaaatagagaattctttcctcattgattattttttgtcaactttgttgaagatcagatggctataggtgtgtggctttatttctggcttctctacttctgttcaatttgtgttttgtaccagttacatgctctcttggttactgtagcttacagtatagtttgaagtcaatgtgaagcttcccactgttctttttgtttaggattgctttggatttgggctcttctttggttccatatgaattttagaataaaataatattggtagtttgataggaatagcattgaatctgtagatagctttgggcagtctagccattttaatgatattgattgtttcaatccataagcmtgaactgtttttccatttgtttgtgtcatctatgattttgttcatcagtattttgtagctctccttgtagagacctttttgccccctttgttagttgtattcctaggttttttcttgtggctattgtaaatgggattgagttcttgattggctttcaggatgaacatttttggtgtttaaaaatgctacagatttttgcatatttattttgtgtactgaaatctcactgaagttgtatgtcagttccaggagtttttggaaagttctttagggttttctaggtctgaattgggtcttctaggtctgagatgggtcttctacttctactagtaggagatgggccttgcaatcttgaagacagtagaaggatgggtcttatttttaatccaacttcctactctttgccttttatgtggagcatttagactttatcttcaatgttaacactgatatatgaggttttgattctattgtgaagttgttagctggttgttttgtagtttctattgtgtgattgctttatagagtctgtgggctatatacttaagtgtgttttgtggtagcaggtattgttctttcacttccatatttagaactcccttaatgatctcttataaggctggtctaatggtaacagattttcctggtagttacttgtttggacaagattgtatttcttccttgattttgaagcatagtttggcaaaatataaaattcttttttgtaatttttattaaaatgaatgttgaaaataggctgagcatccttttagcttgacaaggttctctttgtatgtgatctgatttttttctctagctgcctttaaaattattttttagccttgactttggacagcctggtgagtaaatgccttggtgatgttaattttgtatagtgtctcacatatattccctgggtttattgtatttggatgtctacctttctagcaagtttgggaaaattttctcaacttattagcccaaatgtattttctagattgtttactttttcttctctctcaggaatgccaataattcctaggtttactccttttaaataatcagatatttcttgaagactgttcatttattaaaattattttttctttatttttgtctgacttggttagttcaaaagactggtgttcaagctctgaaattggtccagtctattgataaacgcttcaattgaattctgaaattccttaagtgactctttcaattccagaagctttgattgatttctttttaagatgtttacttctcgctccatttcctggactgctttagtagtttgtttgcattaattttcaaccctgccttggatcactgagcttacttgcagtccatattttgaatagtttrtctgtcatttctgagttgccagtttggttagggttcattgctggggagttcatgtgatcctttggaggttttacgacattcagacatttcatggtgccagaagtcttatgctggtttcttcttatttggagaggctgccgcttctgatttttgaaattatttttgtgcagatagaattgtttttctctccctatttttgttctttcctttttctcttccccttcctatgggatgtgactataaagtatgttgggtagggcctttgacttggattctatagctgtgttcacttctgtgggtagttttatattggcctgtgcagtttgacatacatgtcagtagatggcacttatgagcaaaagccagctgtgactaggacaacttgatatagcacagcttgatccttgttttytgggggaacttctctgtttcctcagataatctgttcatctgtggaattcagagtagtctgggctccctgctgagccccagggggataaagatcggtgtcactggactgggcagtcctgtctacaggtcccctaatggcaggcactagcaccagcactgagagacaactgatttttgcattgatcttgtaccctgaaattatgctgaaatcatttattagctctayttattttctatctgtattgcatgagatttttctatatagagagaatcatgtttcagtcaaatacacatgatttgaatttttcctttcctatttgaatgtgttttatttyatttcttgcctaattgctctggctagaacttccaatactatgtttaatagtagtaaaaatggacatccttgttttttttcttttctttctgattttaagttacaagttttagtctttcacaatttagtatgctttagctttgcagttttcataaatatgctttattatgataaaggagttttatttcatttatagttttctgagtgtttttgttatgatgggtattaaaagttgtcaatttttttttctgcatctaatgagatgaacatgattttctcttttattctgatatggtgtagtgcactgattgactttcttgttgaaccacttttgaatttctgggataaatctcacttgcttattgtgagatttatttttataatgtttattattataattttttaattttgtaaaaaattgttgcaaaatacacataacataaaagtttctgtattaatcattttaagtgcatagtattttggtattaattacattcacattgttgtgcaaatgtcactgccatacatctgtagaattcttttcatcttgcaaaacagaaactttatacccatttaataataactcttggccgggcattgtagatcatgtctgtaatcccagcactttgggaggttgaggtgggcagattggatgagctcaggagttcgagactagcctgggtaacatggcaaaaccctgtctctaccaacaaagcaatcaacaaacaaaatgaaagtaacataatttcctcaactgtgcaaactaattcatattaataattccatgaaatgtgtccatagtaacacaagagcagaagatgggccttgtaaaggtggcccaccacrttatttgaggtctttgtcagtcttatctgccagatactgtgtggactaactgcagttaaaattcccattcccttatcacttgccctgaaatttatctgaaatcaaagggaatgggttgcccaaagagaagtgtccagagacgtggatgatgcgacaagaaatgttgtagaaccacacccccacctcaaatgataactctacatttctcccttccaccaccccatggcaaccaacattctactttgtgtctctataaaatcgagtatgctgggtacctcataaaagtggaatcattacatatttgccttttgtgactggtttatttcacttagcctaatgttatgttctcagggttcattcatgtttttgcatgtgtcagatttttcttcctttctaagggtgaataatattccgttgtatgtataaaccaagtttgcttacccatttatctgttgatgggcacttggattactttcaccttttgactttttgagtaatgctattatgaatatgggtaaaaaaatatctctttgatgtgctgctttcaattcttttgggtataaataacccaaaagaataacccaccacgcctggttaattttttgtatctttagtagaaactgagtttcaccatgttggccaggctggtctcaaactcctgaccctgtgatccacccacctcagcctcccaaagtgctggaattataggtgtgagccacgtcgcccggcctacatttattgatttgcatatgttgaaccaggcttgcatcccagggatgaagccaacttgatcgtrgtggataagctttttgatgtgctgctggattcagtttaccagtattttgttgaggattttcgcatggatgttcatcagggatattggcctgaaattttcttttttttgttttatgtctgccaagttttggtatcaggatgattcttcccttataaaatgagttaggaaagagtgcgtctttttctactgtttggagtagtttcagaaggaatggtaccagctcctctttgtacctctggtagaattcggctgtgaatccttcaggtcctgggctttttttttgcttggtgrgctattccttgctgcctcaatttcagaacttgttattggtctcttcacggattsgacttcttcctggtttggtcttgggagggtgtgtctaggaatttatccatttcttctagattttctagtttatttgcatagaggtgtttatagtattctctgatggtagtttgtattcctgtaggatcagtggtgatatcccctttatcatttttttgttctctctatttgattcttctttcttttcttctttattagtctggctagcagcctattttgttaatcttttcagaaaattagctcctgtattctttgatattttgaagggattttcctgtctctatctccttcaattctgctctgatcttagttattttttgtcttctgctaggttttgaatttgtttgctcttggttttctagttcttttaaatgtgttgttagggtgttgattttagatctttcctgctttctcctctggacatttagtgctataattttccctctaaacactgctttagctgtgtcttagagattctggtacactgtgtccttgttctcattggtttcaaagaacatctttattttgccttcattttgtcatttacccagtagtcattcagagcaggttgttcagtttccatgtagttgtgcagttttgagtgagtttcttaatcctgagttttaatttgatggcactgtggtctaataggttgtttgctttaatttctgttcttttgtatttgctgatgggtgttttacttccaattatgtggtcaattttagaataagtgtgaagtggtgctgagaagaatgcatattctgttgatttagggtggagagttctttagatgtctattatgcccgcttggtccagagcttagttcaagtcctggagatcctagttaaccttctgtctcattgatctgtctaatattgacagtggggtgttaaagcctccatctattattgtgtgggagcctaagcctctttgtaggtctttaagaacttsctttatgaatctgggtgctcctgtattgggtgtgtatctatttaggatagttggctgttctcgttgcattgatccctttaacattatatgataccacccctttttttaatctttgttggtttaaagtgcgttttatcagagactaggattgcaacccctgctttgttttgctttccatttgcttggtaaatattcctccatccctttattttgagcctatgtgtgtcttttcacgtgagatgggtctcctgaatacagcacattgatgggtcttgactctatccaatttgccagtctgtgtcttttaattggggcatttagcctgtttacatttaaggttaatattgtgtgtggatttaatcctgccattatgatgctagctgattattttgccttttagttgatgcagttttttttatagtgttgacggtctttacaaaatttggtatgtttttgcagtggctgttcccagttgatcctttccatatttagtgtttccttcaggagctcttgtaaggcaggcttggtgatgacaaaatccccttgtggtgatgggcttccctttgtggtaacccgacctttctttctggcttcccttaacatttttcctttcttttaaccttggtgaatctgacaattatgtgtcttggggttgcccttcttgaggagtatcattgtgggtgttttctgtatttcctgaatttgaatgttggtctgtcttgctagattgtggaagttctcctggataatatcctgaagaatgttttacaacttggttccattctccccatcactttcaggtacaccaatcaaacgtagatttggtcttttcacatagcgccacatttcttggaggctatgttcatttctttttattcttattttttaacttttttcttcacattttatttcattaagttgaccttgaatctctgatatcctttcttctgctttatcaatttggctattgatatttatttatgcttcacaaagttctcattctgtgttcttcagctccatcaggtcactcatgttcttctctagttagcaattcgtctaacattttttcaaggttcttagcttctttgcaatgggttagaacatgctcctttagctcagtggagtttgttattacacaccttctgaagcctacttctgtcaattcatcaaattctttctctgtccagttttgtccccttgctggcaaggagttgtgatcctttggaggagaagagatgttctggtttttgaaattttcagcctttttgtgctgttttttttttctcatatttgtggatttatctacctcttgtctttgatgttggtgacctttgaatgggttttttgcgtggacatcctttttgttgatgttgatgctattcctttctgtttgctagtttttttcctaacagtcaggcccttctgctgcaggtctgctggagtttgcttgaggtccactccaaaccttgtttgactgggtatcaccagaggaggccacagaacagcaaagattgctgtgtgtttattcctctggaagcttcgtcctagagggacacttgccagatgccagccaaagctcttttgtatgaggtgtctgttgacccctgctgggaggtctgctgttctctttagagccagcaggcaggaacatttaagtctgccgaagctgcacccactgccaccccttcttccaggttctcagtacagtgagatgggagttttatctataagcccctgactgggactgttgcctgtctttcacagatgcaactgctcagagagtaggaatctagaggggcagtatggctacagtggctttgcggagctgaagtggactccacctagtcctagcttcctggaggctttgtttacactgtgaggggaaaaccacctactcaagcctcaacaatggcagactcccctcaacaccccccccaagctcgaacatccccagtcaacttcagactgctgtgctggcaaacagaagttcaagccagtggatcttagcttgctgggctccatgggggtgagatcccctgagctagatctcttggctccctggcttcagtcctctttccaggggactgaatggttctgacttgctggtgttacagcaccactggggcataaaaaaaacccctccagctatcttggtgtctgcccagatgaccacccagttttgtgcttgaaacccagggccctggtggtgtaggctctgaagggaatcttctggtctgtgggttgtgaagaccatggaaaaactgcagtatttgggccagagtgcaccgttcttcacagcacattccctcaaggctttccttggctatgggagggagttcaccaatcccttgggcttccaaggtgagacaacattcctccctgcttcagtttagcctccatgcactgcacctactgtctaaacattcccagtgagatgagccaggtacctcagttggaaatgtagaaatcacctaccttcttcattgatctcgctgggagctgctgactggagcttttcttattcagtcatcttgccagccaccctcctgattgagtttctttaaggtaattattttgaattccttttttgaatatttgtggattttttttcattgaggtctgttatttgagagttattatgtccctttggtggtgccatatttctttatttttcatgttgtgtctctgaatttatgtctatgcatgtgatggaacaattgctattccaaaatctctagagtgaatttcatagagaaagacttttatctgaagttgagtgtttgtgtgcaggtgacgaagagtgggtaactcagtttttgatagatgcattgtgatagtatctgtgtagtttctctagctatggccaatatcagcaataattttgggtgcctcagtggcctaggctgtagaagtttgcagcagtatcaggagcagtgtaggttgttaatgtccttagtgtcaaagtatttgggcgtcctcctatttttattttcctaaaattggggtgacttagcctaagggattccttttggtgtcatctctgacatggcattaactcagcggcattggtgctgggttacaagtacagatccttgaagttgtcatagaagcatcattctagactcagggtcttttaatcatgtattgtgacacctgggtcttgcggtgcaggttcactctctgtggcagtgttgaatgcagattacccacagaaccaaggtctatgactctagcacaccttagcagctgaagcccacagactgagttgtggctgtgaatctgtttctgagggtgaggtgcaggaaaatgccrtggcctgcctctgatgtagaaggggtgctctttagatttgagcccagcaagtagaatatggctactatcattaataagataggatatactaccttattaatgctaagtaaccaagctcaagtcaagagatggaaatgttaatactggtttgtgactgcactgttcttcttacttaagagtaattttcaacatggcaagcttagaaaactgtgtgaagctgatgttaccaagggagaggactgtctttgtctacacatgttgagagaatctagtctatttcagtggtgttgattacacaatattcaacatgacacacatcacttggagactctaaaagcatcattaatttattgctgctggccttggggctggttaaaaagtaatacgttttttatattgatgatctctttcaactaagtattccttatccattgctttctttctcccaacttccaaattatgagaactccagtctctaagccttggcatatgcagtatccttactctctcctttatcccctgtggcaattaatccctttattctccatcttcatcattgttctttctcttcactttgtatatttttgtttattcctgcactactgcaccctagaacaagttgtctgttgcctcccatctagattataatagtgtgggcccatcttgtcattgtaaacccattctcttcctctatratttatcttargttttgctgtcatattgcttttttaatatttgtttttacaaaatttcaactttataatgaatctgggggcaatattgagtccaygtacctttctgacagaaaaatataattgcagactcttgattcaggctcacagtgtctaatgatatggccccaatttaygttttctattaatttagattgtggttgtctacaggtaataatggctttaacacataatgtctttatttatctcaaatacagggattctcttggtggggcaatctaggataatacagcagccccaaagcagcagagagtcaagtgccttcctttttcccactaaatttagtatacagaccttcattttgatgattaaatcccaggatggggtctactctacctcctacttcacatttgtgttttgagtatgaaagaggaaatagaggaaatggacctagagaccttctgcttatatattttagcaaaaaaaaatatgctgtgtgactcagctagctgcaaagagcctgatgaatggaatttttaggcaagcatggaataagggagtaggaaataaagtttgggcaagttggtctacagcctctgctatacaagcagtattttttttctagtactgtactttccagtttctatgttggtaactatataactatgtgartaattttgaattcactgtaatcaaatatgctggtaaataatttgtcagataattgcatcaaatcattcctaggaaaagcacaaccaaccatctgaatttactattgaaagcttggaaaacactgcagttgacttgtttggagctgggacagagacgacaagcacaaccctgagatatgctctccttctcctgctgaagcacccagaggtcacaggtatgatcagagatgataagttaattaattttcagaaaagattttgggaaggtgttgctagtgtcctccttcctgtttctcttagagaagcttcrttatttaaacttttgtgcttccagctgtaatctgtttcaaactaatggtgattacaatgggatatcttggcctggcatggtggctcacacctgtaatcccagcactttgggaggctgaggtgggtggatcacttgaggctaggagttcaagaccagcctggccaacatggccaaatcccatctgtagtaaaaatacaaaacttagccaggcatggtggcacatggctgtaatcccagctactcgaggggctgaggcactggaatcaattgaacccaggtggtggaggttgtagtgagccaagattttgccactatactccagtctgggcaacagagtgagactctgtctcagaaagaaaaaaaaagaaaaaaagaaaaagaaaagataaaaggggcatctttgcacagtagaggaagataactgagagaaatgaagacagcatggcagtagcaaaagcagtagaactctggtccaatgtgtctggatttatggcaggaagagacaagataaattggcctgggattgcatgttggttttattatgagaaggccattttaaatagcaagtatattcttcaagataacttttctcattctcaaaatttcaggttcgaatgctggagtagggaaactkgaaactctccttattgaaggataaatggtaatcctaaaaatgtagtgatctgcctgagaaaattcctagtccaataagtactctaaaaagttagattcataagaaaggtgattctgtttactagaagaggtatataaagaatgttccatttaggcagaatatgtacctgagacagtttccatgaaactgttgttgggcaaaataagatttttttgaggaagtcaataattttatcttttatgaacaactttactttagaaatttacttttaaggacttttggttatgctgcagataagaaatattctttttttctcctatgtcagtatcccccattgaaatgacaataacctaattataaataagaattaggcttttttttgaacagttactagcctatagagttctagaagattttttgtcaaattttattatagattaaagggtacaaatacaggtttgttacataggtaagttgtgtaacactgaggcttggggtcccagctattccatcacactgacagtaaacatattacccaacagatggttcttcagcccacatctcttctctccctcccccatctagtgatcctcagtgtctattgttcccatctttatgttcttgtgtattcaatgcttacctcccacttataagcaagaacatgtggtatttggttttctgttcttgtattagattgcttaggataatggcctcctgcttcatctataatgctgcaaaagacataacttttgttctttcttatggctgcataacattccattatgtatgtactagtctgttctcaygctgctaataaagacatacctgagacagggtaactcataaaggaaagaggtttaatggactgtcaattccacacggctggaaaggcctcacaataagtctctgatagagacttattcactatcacaagaatggcatgggaaagtcaggcctccatgattaaattacctcacattgagtacctcccgtgacgtgtgggaattatgggagctacaattcaagatgagattttggtggggacacagcctaaccatatcagtgtatatttggtacattttccttatacaatccactgtcgatgggcacataagttgattccatttctttgctatcgtgaatagcactacatattggggtgaacatattggggtgtgtgtcttattgatagaatgaatattttgggggcatatactccatagtgggattgctgggtcaactggtagttctattttaagttctttcagaaatatccaaactggtttccacagtggctgaactagtttgcatacccaccaacagtgtaaaagcatttccatttctctgcaacctcaccagcatctgttgtttttggactttttaatattaataattgctattctgactggtgtgagatggtacctcattgtgattttgatttgcatttctctgatgattagtgatgttgagcattttttcataagtttgttggctgcttgtatgtcatctattgagaagtggctgttcatgtcttttgcccaattttaattgattttttttgttttttttttttttttgcttgttgatttgtttaagttttttatagattttgtctgttgatacatatttagattttggatattagacatttaggtcctttaaggtaggaagagtacaggaaatagtcaagaagactttaacaaatttctaaaaacagagagcatatagaggaatgatatatctgtacagagagggtaaacttataaccaaaaggtcagaagagaaaaatttatcaaggatgaaaagttaatcagtgtcccttaaatcctcccaatattggtatttggaagtaccgagggtcaaagatggtggagaatgaggctgaaaaaggaggctytccctgcctacgtttcctccacaactcttttcatcaggtaactgatttcctyccacaagaagaaggaggctcactctctagagaaactgagcttaagaagccctgtactcagagacacacagcagtgccagaaaaggcatgaggtgtaggctagaaagacagattaggtacacatccactccttgaattcagagactcttagctcttttattcatcttccttcctaaaattcagcagctagctctatcctacagaaagggaactgatctagagaaatggcatttttcttttgccatcttaacagacaattctcttcaatgtccaacagagtgaatgaaatgaaaacatatactgctagatacagggttatggaatttcaggacatgagaattaaagggaaaatcacaaaaactttcagagctgtaccaggttatattgaaagaattagaattcagaattctcaagaagaactattaatattatcttgtatattaataaaaatagtgttttcagatgtgcatgtttgccaaaaatttttaccattttccctttctcagaaaaatactgaagaatgttcttcattcaaatgcctgaaaccttgttagagaaagtcctgagctccagcaatcaggaaacctcgtgtaggagaatgagagtgtcagggaggctgcctagcaccagacctagaaaacaactacttcagaacagacctgggggataattcagaagtgagatgagacagcaagaacaaaagagatgtgacagattttatgagagtttccaataactaaaaaggagtttcaaacatctgctggaacatttgtaaataattctaacttgggaaatggaaaattacaaattgaaataaagagacattgttaagcccaggaaagtacaaaaataaaatttaatcatagttgtcttaccagagaaccatatttgtgtagtcagaatgatgtaagcaatgaatactgatatcataaaaattgtcatctaaatatattctggaaaaagcagtgtggaaaagtgagtgtgtctatctgagggtgtgttcaaatatgaggggaagatggagattaaaattctcatctctcttaataaaaaattattaaatataatctacaaaaagataagtaagaattagaaacagagtatttaaaaatgtgaatgtatgttcagaagaagctgctagaatgttcaaaatggtagatttggaaagtgtgagaatgaagagaataccattgtgatttgtgacccctcccacacacagatgcaccaatacagtcatatatatgcataaatctgatagtataatttaacgtttaagcaacatatgttattttgatatgaaattaatctgtttttcaaagacagtaatttcatgactaaattatatgcttactttatgttttcaaacattttattatttttatttgtattaattatcatatatactaatgtatatgtatatacatatcttttaattttttttaatttttatgggtacaaagtaggtatatatcaatatgtttgggggtacatgagatgttttgatacaggcatgcaatgtgaaataagcatgtcatggagaatggggtatctattccctcaagcatttattctttgagttacaaacaattcaattacactctttaagttattttaaaacgtacaattaagttattattgactatagtcacccttttgtgctatcatatagtagatcttattcatctccacctcccctccccccacactaccctttcgagtctctggtaaccatctttctacactttatgtccattagttcaattcttttatttttagatcccacaaataagtgagaacatgctatgttcgtctttctgtgcctggcttatttcacttaacgtaatgatctccagttcccttcatgttgttgcaaatgactgaatctcattctttttatggctgaatagaactacattgcgtatatgtactacattttctttatacatttgtctgttgatgcatatttaggttgtttcaaagtcttagctattgtaaacagtgctgcaacaaacaagagtgcagatacctcttcgatatacctatttcctttcttttgggtatataccaagcagtagggttgttggatcatatggtcgctttatttttaggattttgaggaacatttaaacagctctccatagaggtcacactaatttgcattcccaccaacactgtacgagggtccacttatctccacatcctcactagcatttgttattgcctgtcttttggatataagccattttaactggagtgagatgacatctcattgtagttttgatttatatttctctgaggatcagtggtgttgaccacctttttgtatgcctgtaacccatttatatatcttcttttgagaaacatctattcaaatcttttgcccacttttggattggattattagattttttttctatagagttgcttgaatttcttatatattctgattactaatctcttgtcagatgaatagtttgcaaatatttctctccattctgtggattgtcttttccctttgttgattgtatctttggctgtgcagaagctttttaacttgatgtgatcccatttgttcatgtttgctttgaatgcctgtgcttgtagggtattgctcgaaaaatttttgcctagaccaatgtcctggagattttccctagtgttttcctatagtagtttcacagtttgaggtcttagayttaagtctttaatccattttgagttgatttttgtatatggcaagggatatgagtccagtttcattcttctctgtaggatattaaattttcccagcacatttattgaagagactgtctttcccccagtgtacgttcttggcacctgtgttagtctgttctcatgcctctaataaagccatacacaagactgggtaatttataaaggaaagaagtttaatggactcacagttccacatggctggagaggcctcacaatcatggcagaagatgaatgaggagaaaagtcatgtcttacgtggtagcaggcagatagctttgcaggggaactcacatttataaaaccatcagatgttgtgagatttagtcactatcatgagaaaaatatggaggaaaccacccccatgattcaatgatccctacctggcctcccccttgacttgtggggattatttcaattcaagatgagatttggggtggggacacagccaaaccatatcagcccctttgtcaaaaatgagttaactctagatacgtgaacttgtttctgaattctctattctgttycattggtccatgtgtttgtttttatgtcagtaccatgctgttttagttagtatagctctgtagtttaatttgaagtgagataatgtgattcctccagttttgttcyttttgcttaggatagttttgactattctgggtcttttgtgggtccatatacattttaggatttattttttctatttctgtgaagaatgccattgatattttgataggaattttattgaacctgtagattgttttgatagtatgggcactttaacaatattgatttttccaatccatgaacatgaaatatttttctgtttgttgggtcctcttaaatttctttcctcagtgttttatagttttcattatagagatctttcaattctttggttaaattaatcctaggtatttaaaattatgtatggctattttcaatgggattattttttaaatttctttttcttttttttcactgttggcatataacaacactactgatttttatgttgattgtgtatccttcaactttactgaatttgttcatcagttctaataattatcttgtagaatctttagtttttcctactataaggttatatcatctgcacacaaggatattttgacttcttcctttccaattttgatagcctttatatctttctcttgtctgattgctcttgctaggtcatccagtactatgatgaataacaatggtgacaatgggcatccttgttgtgttcctgatcttacaggaaagacttcctattttctccattcaggatagtactagttgtgggtctgtcatatagcttttttatgttgaggtatgttccttctatctcaagttttttttatgaattttcatcaagaagggatgttaaattttatcaaatactttttcagcatcaactgaaatgatcatatggcttttatccttcattctgttgatatgatgtatcacactgcttgatttgcacatgttgaaccattcttgcatccaagggataaatcccacttggtcattgtgaatgacctttttattgtattgttgaatttggtttgctagtgttttgttgaagatttttgcattagtgttcatcaggtgtattggcctgtagttttttttttttttttttttttttgatgtgtcttagtctgattttggtatcagggtaatactggcctcatagaatgagtttggaagtattctcttctcctttattttttggaatagtttgagtagggtcggtattagttcttctttaaatgtttggtaaaattcagcagtgaagctagccagtcttgggattttctctactgggatgattttatttctcgtttgatctttgtgctggttattgcatgttcagattttggatttcttcctggttcaatcttgatgggtcatatttgtgtagggatttgtccatttcttctagattttccaatttattggcatrtagttgctcatagtaaccaataattattctttgaatttctgcagtatcagttctaatgcctcctttttaattttttatttatctgaatctactctttttttttttcttagtctggctaacggtttgtcaattttgtttaacttctcaaaaaagcaactttttgtttcattgatcttttgttttgttttcttcacttaaattttatttatttctgctctgatctttattattccttttcttctactaattttggttttaatttgcttttgcttttctaattctttaggatgcatcattaaattgtttgtttgtcaattttctccatttttgatataagctcttgtagctataaacttccctcttagtactggtcttgctgtaacccctaggttttggtatgttgtgtttccattatcatttgtttcaagaaatttttcaattttctttttaatctcttcatgggtccactgttcatttatgagcatatttttaaatttccatttatttgtgtagtttccaaaattcctcttgttattggttgctggttttattacattgtggtcagagaagatgcttgatattatttcagtttctttgaatattttaagacttgttttgtgacctaacatacggtcaattcttgataacaatccatgtgctgtggaaaagaatgtgtattctgtagcagttggataaaatatcctgcaaatatctatgagatccatttgatctatagtgcagatgaatttcaatgtttccttgttgattttctatctggatgacctgtccaatgctgaaagtggggtgttgaagtctccaggtattattatattggggcctatctctctctagttctaattatatgtcttttatatatctgggtgctgcattattggttgcatatatatttaaacttgttccatcttcttgccaagctgaccactttatcaccaatagtgatcttctttgtgtctccttatggtttttgttttgaaatctactttgtctgttttaaatatagtaactcatgctctttttttcatttccattggcaggtactgtctcattcaattcctttattttcagcctatgtgtgtctttataagtgaagtgtgtttcttttaggcaacagattaataggtcttgtttttccatccaggtcagtaacaggtcagtatgtcttttgattggagattttattccatttacattcagtgttattattgataagtaaggacttacccatgcccctttgttatttgttttctggttgttttgtggacttctcttccttctttcatttcttcctgtcttcctttattgaagagaattttctccacttatatgtgtacagatttttcttaatatctggtttatggcagttacacatttgtgcatctgtaaccatcctctctttaagtttgcatatacttccagcactataatttaaatttataatgatgtttggataccttcatgattcatatacccctgaattgctacaacaaatgtgccatttttctccttttccatcagtttttacttgtgtcttatcagctaaagtccaggaagagattgaacgtgtgattggcagaaaccggagcccctgcatgcaagacaggagccacatgccctacacagatgctgtggtgcacgaggtccagagatrcmttgascttctccccaccagcctgccccatgcagtgacctgtgacattaaattcagaaactatctcattcccaaggtaagtttgtttctcctacactgcaactccatgttttcgaagtccccaaattcatagtatcatttttaaacctctaccatcaccgggtgagagaagtgcataactcatatgtatggcagtttaactggactttctcttgtttccagtttggggctataaaggtttgtaacaggtcctagtgtctggcagtgtgtgttctccagatttattatctttcttcaagattggtttggctactcttaggtgcttatatttccaaataatttttaaaggtattagtttgtcaatttcccaaaacyttgggctggaatttctggcagggtgacactaaatttataggctagtttggaaagaactgaatcttgacacgttgaggctttccattcctgaatataattatgcttccaatttgtttggggtttcttttatttaaccaggaatgttgtgaatttgttgtcatggctttcgagtctttggttttccctagataattaatatttttgttgtagaacataaatagtttttatcattctgatgatgttaatctgtcaactttgctaaatttactagtcactattcgtaatttatttctggattcattgtaatttctgtgtatattatactgtatctgagttaatattgttttatttcttattttccatttctcrtgggcttaatgtctctttatcrcattcattattgcattagctagaatttctaggagagcattgaatagaattggtgacagtggggatccttgtttctcatttctaatctgcaggaagcagtggaagttttccatttcaatattgagaatgatgcttgaagtagattttggtagatattttttatcagattagagaagtttgctgtcatatatatatatgtcataattgtgtgtaaaatcttgtcaaatcaacactctgcatctatttatataattgtgtgttagtccatttccattgctataaaggaatatctttgactgggtaatttataaataaaagagtttcattttggctcatggctctgcaggctgtgcaagaggcataatgtgggcaggcatctactcctagtaaggacttcaggtagctttcaatcttcggagaaggtgaaggggaagcaagcatgtcacatggcaagagagggagtaagagaaaaaggagtagaagtgactttaaacaaccagctagtgtgtgaactaacagaatatgaactcacttattatcatgggaagaggtttaagccactcatgaagaattcacccccatgtcctaaatacttctcacaccagaacccacctccaacattgagaatcacatttcaacatgagatttggaggggacaaatatccacacaacatcagattatatatattgggcttacatttctcactaaatagaaataagtatgcacatagagatgaactggccttcttcatattgtttaggacttcagtgtttacattcacaagagatttggtttatagttttatttctcagaattttcaagatttttgatattaagattatgccagccttataaaactatgcaagaaatgtttcctaatgtgagactgtttttattgccgttccctctccccacttttyttcttgtgatcayttagttgtatctttgaaatgcctgataacttttggttaaataccagatggtatatgtaagaaattgcagaattgcagaggaggtttatattcttcaaagaaagattcattcctctcccatcggcagtcataatgacatgatacctgttgtcatgattcagaattggacataatgtgaatccagttgaaaattgagtgtcagtgttagcttagctctctgaggttctcctacctttggaagcttgagaccaatttttgtcttgacagctttgcagtgccttctatcacatggtttctgtatttatccagacactccatttgccatctcaaacctactcttttccaatcaaaaccaatatatattattagtaaaataaaaaataatataactgaaagttgtattttcaaggggaaaaagcaatgasacttggtaaggttgcaattactaatgtcatcttttgaagaagacagaattgataatttacttagagattatggggcttaccctagtggtcactgagttagtacaagagaaaagacttcaatgcactctgttttcacaaacacaggagataaccaggagactttcgcttctcaaaattagggtctgagggtaatggtaatgaaacttacttcttctcctataactaattaaatgagaaatatactgaagaatcaggcacgagttgccagtctccccagttcactgcatcagctttggtgacctcctggaggggaacgctgcatctgatgagctcatgctgtgcctgatgtcttttgagccctgagaagccagagcccaaggggattacccattgaatcccttcttcgtggaatagcccagtgcagaaaaaagcagcactgtgtggccaattctaccctctttacaaatcagatacatgtgttcttctgctacaggctggatccacttatctagctggagatgatagtctgagacaggagttggcaaactgtctctgtaatgggccagatagtaaatattttagacttttcaggcaatgtggtttctgttgcaattcttgacatctgctattgtagcatgatagcagtcacaaacaatctgcaaatgaatgaggattgatatgttccaatttttatagaaacaaatgtaaatttcctataaaatgtttgtttcaaaaatattgtttcttgtttgcatttgttcaatgtaartacttttagctcacatactatacaaaaacaggtggcagggtggacttgtgcagggagtattttttattgatgcctaatataagacatccctgtccagtagaattttctgcaaagatgtgcgattgatttgtgcttttatgtcatatttaaagaatatttgtcagcacaagattccaaagactggctttcaactttcccagaatttttttgttttagctcttatatctagatcaatgacatatttcaaattaatttttatttcataatatgaagtaatagtggtcatgcttcaatgtctataaatttctacttattcaagtaacatttgttgaaataaatctgctttggtatcaataacattttaatatagtacttgtttataaatattcaagggaatatttttaaaaaacaaaattatagactatttatatgaaaatttagggggtagaatttttcctaacatttttattataaaattttttaaaataaataacattacacacacatatgtatatgtacatatggcagtgtgtatacatatctactctgatatctgtccatccatctatttacacctcaatacttcagtatgtatagcacaataacaatggttttctcctacataataatagcattcatactgtggagttattaatacaataatattatttactatacagcttttatttaaaatttcccaactttaaaataatattttaatcacttttttcttgcaattcactctccagtcaagaaataagcacatagtttcagtatcctgttactttccatctcctgtaatcaagaagagtccatttcctctgtttcctttcagtatgttgatctctgtgaagagttgagcaattagtcatttaaattttcctggggctcgttttgggtaattgttttctaaatattatattccagttatgactttggcaagaaaactacatagtattttgaatattctgctgaatcacagtggtgaggcaggggcacataatgtcacatatgccattattggttatgctaagatcctcacctaataagttggaatctgccagatctttccattgaaggggttctgctttttatgcgtgaatgatgaaaatctatggcatggtacttcaaggcagaacaccctgtttcccaagtcacacatccaatagttttatctttcattaatgatcctcatctgacctgatgatcttgacctgaatggttacaaataggtgatttttctaatttcatcattccttccgtatttttaagctaggattaatctgtaatgaatatctctcccatatctttaaatgaagacaaacaaactgcatggcaatgacaagaactcaatagttttatccttgccactacacttgttaccatcccagaagatgtcatttgaaattcaatcatatgtttattcacaaatgccctgtgaacagatactgtggccatttcccatgtcaacagagacttcaacttttagttatactctacacataaggttggtgaaaactgaagtgatggaatagagaagcaagtgtggacagccactagtttccaagcttgatgaaaaggaggacagattcagaaggttgcatccaagtatccaagtactcaggacttcaaatgtgattgcagggcactttagcaagattattgtcatgggccttaagttcatgactcttattacttggtctatccatctggaaatggtactgcccttctttggaacgggatttcctcatctgcacatcaaaagatttaactacatgattaccactgtttcttcaaccttcatggcttctttacagctcagttcatctatgtctcttgtttctagggcacaaccatattaatttccctgacttctgtgctacatgacaacaaagaatttcccaacccagagatgtttgaccctcatcactttctggatgaaggtggcaattttaagaaaagtaaatacttcatgcctttctcagcaggtaatataaatttatttccatttgtgtttcagggtacaagataacttttttgatccattggaacttacatgtgcctcctctgcagtggtacaattactctttgtacatgatcaagagcactgttctgaatgcctgtgtacaccctgytcatgatacatcctaattattgggccagattagtggactttggggagttaatccaattcttccaaattgagaaagctgaaatataggttggttgaattctgcctctaggtacaccagtgaggtacccaagaactcctcctggaagataaaactaattacattttcctcactagccatgaggaagttatctcactccagaacttcactgagtgtcttccacatggtgtccctcaccccctaggctgggcttgtaggataaaattatccacaaacacagaatagggtcttaaaaggctcacttctgagtttggaaagcagagtaaacagatcattgtagttcaataggactgaggctgtgatatggaaagaacaggctgttgggggttgggaggtagacggaaaagctgtctgcttcttgtactcttataccccaaagtgaggcataagtaatattttaatagcagtaaagacatttgagctacctcaaaggaggcagagaggatgaaaagaagagaagacagggctattaaaggagataatgagccacaggagcaggacattggctctaaataaaggatattagaacctttgccaaatgaccatggatgggatgagggggacattgggaatgtagcaggatactctgcagtgatgcagagcaccatgctgttcccctagtcatggccatgtatattggatgttggatctccatacttgaaatgtgtgtgctgagcatctggtgatagaatctccttcctttattctatgacctttaatgtctgctttatatctgccactgtagataccaagacaacaagaaaagaaaccttccttcaagcattcacatttagcacatgtattagtccactcttacattgccttaaagaactacctgagattgggtaatttatgaagaaaagaggtttaattcactcacagatccacaggctgtacaggaagcatggctgggagacctcaagaaacttgcaatcatggtgggaggcagagcggaagcaagcacatctttccatggcagagcagaagagagagaacaatgaggaaaggctacatacctttaaacaaccagatctcatgagaactcactcactatcatgagaacagaaagggggaaattatcccccatgattcaatcacctctcaccaggtatctcccccaacattgggaattacagtttgacatgagatttgagtaaggacacagagcccaaccatatcgcacactaataaataaataaataaatcagtaattattattctaggtgatccatgctgtctgtttcttctgccataacaaaatatccaagactaggcaattgataaataatggaaatttatttctcacagttctgaaggctgggagttccaagatcgatgtgtcagcaagttcagtgtctgatgtgggcctgttccttacagataatgcccccwctgtatccttatatggcagaagggcaaaaaggcaaaaggggagaaatggctcccttgcatctcttgatgttattattttagcaaggacagagccctcctgacttattcacttcctaaaaggagccatctctttagtaatgttgcattgggattatgtgtcaacatatgaaattgggggaggcatattcagaccatagcacatttttcaatggaaatataatgttgaggaaacccagagaaggcaacattttcttgctcaaggagatgagaaagagggtaaaaaaggagataaaatttgacctatgtcctgactgtggtaatagaaaagttcatcttggctaaaaggagcagcatgatataaaatttgaaacctcatggtgtgttggagactgatgatgagtggctatgcctagagttgacagtatcggatttgaagagtgtaaggagtgatgtggatcatcagactggaaacagaatgtgagggtccagatcaatccattgggaccttatcctataggacatacagggaagccatttaaagttttaaagtgagaaggtgacatgtttagacatgtgctcctgaaagtacctagaggaaaaaaatctttggctgcatattgagccagaaatacaaagggaaatacagtatgttagcctcctcctctaagcccttctcagttcaacccactggacaagaaatgtatgtttctaaagaaagattgatgaagacatttaaagtctcttgaaagattttaataaagtgcttggcatgtagctggtactcaacaaatatttgttgaatacagggtgcctgttaagatctgatattaggtgaagagtaagtatgtccattcatttttcagttgcctatacatccatccattcatccatttatccatccactcatccatccattcattcatgcatgcacccatccacccatctatctcttcatctcttctacgatwcactgaacagttattgcatattctgtttgtgccagttacagagacagtgtttgtcactgtcacagttacgcatgaggagtaactgctctctgtgtttgctattttcaggaaaacggatttgtgtgggagaagccctggcyggcatggagctgtttttattcctgacctccattttacagaactttaacctgaaatctctggttgacccaaagaaccttgacaccactccagttgtcaatggwtttgcctctgtgccgcccttctaccagctgtgcttcattcctgtctgaagaagagcagatggcctggctgctgctgtgcagtccctgcagctctctttcctctggggcattatccatctttcactatctgtaatgccttttctcacctgtcatctcacattttcccttccctgaagatctagtgaacattcgacctccattacggagagtttcctatgtttcactgtgcaaatatatctgctattctccatactctgtaacagttgcattgactgtcacataatgctcatacttatctaatgttgagttattaatatgttattattaaatagagaaatatgatttgtgtattataattcaaaggcatttcttttctgcatgttctaaataaaaagcattattatttgctgagtcagtttattagaccttccttcttttatgcataatgtaggtcagaaattaaagaaaatagagttccaggaggccatgctggttctcaaaatgataaggacagaaaggacaaagaggaagagggtagggaagctattttgggtgagtgttagagttacttgaggattggatttgaaagtgagaaactgtgtccaggggcagctctaacctctagggaaatattcagaggatcagtcaaagggtggaatggacattaaatgctagaattcttatatccacattggtgttcctttttttttgagacaaagtcttgctctgtcacccaggctggagtgcagtggtgtgatctcagctctctataacctccgcctcccaggttcaagtgattctcctgcctcagcctcctgagtagctgggattacaggtgcatgccaccacacctggctaattttttgtatttttagtacagacgggttttcaccgtgttagccaggatggtcttaatctcctgaccttgtgatctgcctgcctcagcctcccaaagtgctgggattacaggtgtgagccactgcgcctggcctggtgttactttgaagtgtcattactttatctctaaataaagaatcagattacttttattacttcatgtttccaacttagaatgatgtaatgaagtataaatacatgctttcatatcgctgctcatgtgttctgtcatgtttctctcttcaaacataaacaaaatttctttttggtttttgtttgtttgtttgtttgttttgagatgtagtctcgcttttgttgcccaggctggagtacaatggcatgatcttggctcactgcaatctccacctccagggttcaagtgattctcctgcttcagcctcccaagtagctgggattacaggtgccaacccccataccaggctaatttttgtatttttagtagagacagcatttcaccatgctggccagactagtcttgaactcctgacctcaagtgatccacccatctcggactcccaaagtgctgggattacaggcatgagctaccatgcttggctgggcaaaatttctaagaagaattacaaagatttaatctctctcagcttctcctacattattttacttttaacataagtgggatgataattttatgctatggtcctaaatataattagcctcatgtcatctccaaagaatagacaactaagtatcttatgttaaattatattcaccacttttcctgtcttctacttgaaatgtaagaaataagaagtaacataatttgttatgcttctcacagctcatctcccagaagaagttacttacattttggaatacgttttaaagataatatgtggatacaggtgtacatgaacatctatatatgtctgtgtacattatgtgtatttacccattttatatatatgcatatatatatatatatacacacacatatatgtaacttatgcacacatacatatagggttaaatgtttattacaatattgggctcatatcacacatcttgtattaaaacttgttattttcctatcaagtaatatggcagcaaaacctctaaggtgatagaaacatagggaaatgattgagagagataatagaagagaaagtggaaatgagtattacattaatgggaagatccaaatggaaattatacattatacctttcaaccttcttcattgggaaatgcaaatgtattaatgtagtgttagtagaggtgctggcaaacacccctaggtgagataaatcaagtagatgtcaagtctgttttctcctagagactgtagtgaataatctgttttcctgcctatttcacctcctaaaggctgcctgcattccttggctcatgaactcttccttctttcactccaaacacttgcttctgttgtcacatctcctactcctactactgactcttattctcacatctcccttacattagaaatgcaaaatgctttttccctggtgtcacaaagaaatagcactcaaacataaatttaattttctcggcaaggcaatttttactttctgcagaaagagtgctccttgcagatggaacaatggtgagagcacacctggacagaggaggagaagaggttattattcctgatggagatagcctttactgctgtgtcattcccctattggctaggttggactgcacagtctaagcaattccaactggctattttaaaaaagagcaggagtatgagccagagtggtgaggcatgtagtttggcaggaagggcagttacagaactggtggctcaggatgagtcaggatggagcaggtgaccaggggtgagtcatatcaaagcaggtgaccaggggaagagatgtgaactactgattaggactggtgggaaagttgtttactgaaattagaagggagggggcaaagggaaccaggaagttaaactttaaaatggagaatcaataagagagctgaacatactgacatactgattctttgaatagaaacttggggttcactatatttaacagttcttcatcttgaatttttacagttccttctcttcaaacttccttaaaatgtcttggcttagttgttctgcatgattctctaaaagaaaaagcttctctgaataaggtggaggagaattaagggaggttttagtaagtgctgcctgtatgagtctgtgaaccagcccacggatgcatggtatgacaaaacacccaacaagaatgaatacgcctactatggctgtgagagaagtaagaactgaggctatgattttttttttccatttactgaatgatttttctaggcaccttttaaaggggtcacttaccgctgagtttttggttaactcattggacagagcagttagaccttgcaatgccttgttatacttccatcaggggcagtattgtttgggatgaaggtacaatattgagttttaatcatgatgcaaactcctcctccttctgctgctgatataatgtctaaggctattctattttcccaagccatctggctagtagcccctaattgcattgctatttctttagcagcatctctagtgtagttaataaaccactgttgatcataatagatgtaattcatccagtctacatttttattaatttttacccactagaatattgactgaaatcctgaagctatttgatcatgggctttaaattcatctggcactcctcattgagctctaatagcatttacataaacatgggggtcaaaggacccatatagggcacttcttcttttatgattttctctctttttttgtaatcatgttgatgaaatgctagagtgaaagggatggtgaattggactagagcacaagtgctgctctaataacttggcagagtatccagcaatagtcccccatgataccaccacacttatgctcagggatgaacaaggacagactgattggtaagctcttggaaaggcttggttacactgcaccctgttaaatcttcaaggaatgctaactttttcccctgctgtgaaaggaatgaggtgaagttaacatcaggggctggaggccagaaggcccttgagggctgacccacagggctcttaacctcagagaacagcagtaaaagagccttgcatgactcatcgccccaggctgtggggttctggaagacagctaccatacagctcatgccaggtccctgagaggaccacccaagtggaaagggaacaatctgggtctctggcctgcctatcgcacaagcgttacagtcacttttgtttatcgtgcaaacagaatattttatccattccagccaagcatttgcatcctgataccctgtttcaattgctatagtttgttttaaatagttaacctctacaacaactagtttggttttatcattgggtatataacaagagaatgttggttagaggagaacttaggagagggagaaaagggtacaggaagtgaggaggaaatgaagcacatttcaaaggatcctgagacttctgctcctataccatagaaatggtttaatgaaggggaagaactctggggaacagagatggtaatctgtactggattacattggtttagctgacagtggggagggatagctcctttagtaaaatgaatatatggttttaagaaactgcaagtactagttagtgtggtccatccttgctctttagtattttatagagcattgagccaagtttggcagagaagctctgctctaggaggacaagatttccagtttatactggaatcttcatcaaactcttctcaaactaacttatcccagttaacagatttttagtctgaggagagctaggaaggataaagatagttttctgaagtggagagttgcccctaacttggcaaatctccacagggtataacaaggcaaccatcaaatgtaatagtttgaggcaaaattgacttggttacattaataactaggtagtcagcaatagagcaaggaaagaagaaggagtaacagaatagatgaaaggagttaaatttttcttatctttagtttgatagggttttctcctgggactacggcccatgactctggagggggcagcactttcttgacttgggtgtgatgggtccatcctttttctgctgtccagactgccatttcggtagttaggagcactaggtaaggtccttcgccagttcaagttttccttctctctaacttttgacaacgacgtggtccccaggctgatgctggtgtgctggaaatgctaggggtggcacctgtgctgaaagacctttagttctgagggaagggaaagtggaagataaaccaagtatataatttctgagaaactgatcttctgtttcaaatgtagagaaatcagtagtagaatgtagataaggcaatccataaagcatctcatacagggctaggcctatgtcttttcagggagcagttcagactctcaacagggtaataggccttcctactttccttgatgaaggtaggtgtcagagattatgatattcccatgttatatccagtacctgggctcatttcttttttttttttttcaacctaggctggagtgcagtggcatgacttggctcactgcaatctctgcctcccaggttcacaccattctcctgcctcagcctcccgagtagctgggactacaggtgccccccaccacgcctggctaatttttgtattttcattagagacggggtttcactatgttggtcaggctggtctcaaactcctgacctcttgatccacccactttggcctcccaaagtgctgggattacaggcatgagccactgtgccgagcaacctgggctcatttcttaatgacatgtgcagtgaaatgagtcctattatctgaatcaatcttttctattaatctaaacttgggtataatattttcagctaataccttgactacactattagcagttgtacttgaaaaggaaatagcttctacccaatgagtaaggtgatctactattactaataaatatactttagatgactaattggaggcatctctatgcaatcaatctggatattctggaatggccttaagcctggattccttcccctgaggggtaatgtttttatagcttgtttattagttttcctacatgctaagcaactatctgtaactttcgccagggtgtaaatttctatacccctataaactctgagaactacatcacacatgccttggggtccccaatgggtccctcaatgcagttggaacaggatttccctcataagaggtttggataacaattttctctggtttagcaatatcctttttccttctgaatttttttttagcacctatttttattggtttttagaccaaagaaagccaaatgtcattttatatttgacagtgcttcctgtatgattttataccagataagctaaattttacctttatattagtgtgttattaatgttaaactcaatttttataaaaccttgtagacattatttatccaattttaatgtctgaccataaggtaagatttttacagactctttttaaccctttataatttttgttaaagagcagtttagtgctttaaaaaaaac

SEQ ID NO: 6882 - DNA, 261638 bp, Homo sapiens
gtctgagcctcccgagtagctaggactacaggtacacactaccatgcccagctaatatctatgtatttttttttttgagacacagtctcactctgttgcccaggctggagtgcagtggcacgatctcggcttactgcaacctccatttcctgggttcaagcaattctctttcctcagcctcccgagtagctgggattacaggcacctgccacaacacctgcataatttttgtatttttagtagaggtggggtttcgctgtgttggccaggctggtctcatctcaaactcctagcctcaagtgattcacccgcctcaccctcccaaagtgctgagattataagtgtgagccaccatgcctggccttgcccagttaatttttaaaaatttatttgtggagatagagtcttgctatgttgcccaggctggtctcaaactcctggcctcaagtgatcctcctgcctcagcctcccaaagcactgagattataggaatgagccactgtgcctggtcaggccaacattttaaatgtctttattttgactatctaatagcataaaataatctccaagccaaaccttggatatttggtcaaatacagtacaatatttggggtgctattatgtgtacaagttttctcccaagcaacaacacaagacacactggagcaagtgtttttatttttattaccttttagatacagcatcttgctctgttatccaggctggagtgcagtggtgcaatcatagctcactgtaacctcaaactcctaggatcaagtgacctcccaactcagcctcccaaagcactgggattacaggcgcgcaccagtgtgccagccagagccagtgtttatagattgataaacagaggccctgtgaccagagtcctggggttactcatactcatcctatccctgcttcccaagcacagcaatccctcctactcctctgggtttctacctggccccatagacttctcttgatcaacctccaccatttcaccaaacttccctaaagcattgtccaccagcattgacctctaaggaatgtggaattcttggctcgggcgttccatcatcttcaaatcagttccgtgccctgaggcacgcgtttgtagatttacttttttctcagtaattaatcagtaagaaacaagacaatcagttattaaggagttttgctctttccactacttgcttcgctttctgtaagatgctacagaaggcattagacaaaaatcatcaaggggtgtttggtgatacagcagcaaaactctttgattcataactctctttctctcatttggttttcttcttttctcctggcattctccagcacggcatctctgaaaatgactatggtcaatatttcgggtaactgggaaaacaacttaccaaaaccaacgtgttctaagaagttgtctttctcaacactgcctcctagtaatgttaaaataatattcacttattgatgcttatgtgtgtcaggcagtgtgtaggcactatccatgcacgatctcatcttcagcttgcaagtaaacctatggagggttgtgttttctccaggttacagatgagagaagtctgcacactaggcactggagctaggattctgccaggtgtctctggagcccgcagccttaactgttatgctactgccagctccagggcctctagtttatttccctctctcccaatctgtgtggctctgaagatgaagtaaaggctgacgactctgggctgtcctctgaaaaatcctgctccctcctttcctaattcctcacacttatgacctgcttggggatgcgtcccacagcatgtttatgatcctggtttgtgtgcatgactctccgcctgatattttaaattctctccaacagcggaaggactgctgggaataatctgatacacatgaagagaaaacgaggagttactaataagattaaattaaacttaagcacattttaaacagcgtgtaaaacacaggactaagcactgtttgagatgagcagacacaaggcacgacctcatggaatttacaatctgctggggagaggaaatgagggataagactacacacaaatatacaggagtttatgccaaatatggcaagttccatgagaaaggaagaaatgaagcactgtagggctggaaggcaggagtcctcccgtttccctgtggacccaggtttaagagaaacggtggagactgagactggagaacaggaagttttactgttttactcaagggtcagtcactgatgcactgacaaggcctcaaggttcaccctccccaggacaagttacataatttacagggctcagttcaaaaattaaaggcagggccctttgttcaaaaatgaagaatttcaagatggtgacagcagagcatgtaatcaagtgtggggccctcctcagcacaggttgcatccacacagggctggccctgcccaaacgaacctccctgggcctctgattccctagggctcacctttgggaagtagggagcaagtatctctctcaccaccttgtagccagcacctagctcagggcctgctgcccagatgaatctatgaatgactggagataggatgaactgacacgattacacctgatgatttcttgggttgctttcagtgttaaaacactgaaggactggccaggtgtggtggctcacgcctgtaatcccagcacttggggaggctgaggggggcagatcgcttgagtccaggagtttgagaccagcctggcaaaatggtgaaactctgtctctaccaaaaatacacaaaattagctggccacagtggcccatgcctgtagtcccagctacttgggagggtgaggcaggaggatcccttgagcccagaagatcaaggctgcagtgagccgagattgcgccattgcattccagcctgggtgacaggaatgagtgaaaccctgtttcaaaaacagaaacaaaaacaaaaacccaacccatcgaaagaccgtgactttcaacatttcttggaggagacacctgagatgagtcctgaaggacagtaggatttttcttttcttttctttttttgagatggagtctcgctctgtcgccaggctggagtgcagtggtgtggtcttggctcactgcaacctccacctcctgggttcaagcgattctcctgcctcagcctcccgagtagctgagattacaggtgcgtgccaccacgcctggctaattttttgtatttttagtagagatggggtttcaccatgttggccaggctggtctcgaactcctgacctcgtgatccgcctgcctcggcctcccaaagtgctgggattactggcgtgagccactgcgcctggccaccagtaggatttttctttctgttttttccactttccttctttcttgactttccactattttaccatttctttcataaatcctaatggcaatgttatgccttacagtgagacatgcaacagtgacacagactggaaacagcagagaggttcaatatttgagggatgacctgaagccttaggcctcccttaagattccttgagatagtgtagatgaaatcttcattgatagagtctggtttttcatcttaaaattattttattttcactggacaagttggtagatgtttatgaagaaaaaaatcagaagactatggatgagcaaaaataattacttgcaatcccataagaatagttctaatgggattgcagtataaaactagttttctacctatttttccattcaataatctgagcatcttttttttttttcttttttttgagatggagtcttattctgttgcccaggctgtagtgcagtggcacgatcttggctcactgcaacctccgcctcccaggctcaggcaattctcctgcctcagcctcccacaggtgcacgccaccatgcccagctaattttggattctttagtagagatggggtttcaccatgtttcccaggctggtctcaaactcctgagctcaggtgatccaccgctgcccaccttggcctcctagagtgctgggattacaggcgtgagccaccactcccagcctattatgagcatctttatgtgtcaataaacctcttcattttttgtagctattaatatatgatattctgtcatatggttgtactattattaaccaatgcactcaaattggatatttggattgttttgattttttttttttttggctattctaaaatggtgttgccctgaatttgctgggtaagtaactagtctctctaccctttgttatacacctctgtggataacctcaggataacgacactattcccacctggggtcgtgtggtggatgtgagttaacgcatgtaaagctcttagcacaagtatagtacggtgcatagcagcctagacgtgctcaataaatactagctgttttattactttatagcccagagagagctgtcttacacagattgtggagtaaataaataggagagccggggaagtgttctttgaaaagctgcaggatgaggtgcagataggggaaggccgtgggctgggggctccctaggttgagtagttccccagtgttttctcatttatagagtaagcttccagatggctaggactcttctttttttttttaatacacagcagaggacaccaggtggtcaccaaagacttgtcaccgttccctgacatctaagaatctttgctgatgagtttccgatcagtctgtgcagttatcaaggccagtctttaccctgccacccacagcctgttcactgagaatgtgctctggctgaagatgcttgcaagggcagctgacaaaaatcagttgtgctcagcccaaagggcgagtgtcttatcttcagggatgtgggaagctgggcatggagggagcaagttccagaccagtacttgctggctctgcgaccttgggccagcagattccccactctgatccctgtctctgtttccttttctgtaactctgagggggactagaggaggtcaggagaatggcatagcacagtggttagctctgaaccccatctaacacggtgccttccccccacttgcaatgaccttgttgcattgtatgcactctacttttcacattgtagaggatcttatttatttacttgtctccactaaaatggaagcttcctaagggaaaaggccttgcctgtcttgttctctgcagttaacactggggtccagcactgccacagagcctctaaatatatgtgtgttgcatgagtgaaatctcagagcctgggttcaaatcctggttgcaccacttgctgtgtgacctcggacaagccacttaaactacacctcagttttcctgcataaaaatagtaattattttcagttttctcactagaaaaatatggattagtaatcgttcctctcttatcaggctaagaggatcaaatgaggaaatatccgggaagcattaagcacactggctggtacagagcacacgaatgacaacagcaaacgtttatgtagcacgacggccaggaactgatcaaaatgcatcacctatgttaactatgttaatcttcactagattttacgaagtcggactattatgccattttacagatgggtaaactgaggcccaggagttaaataacttatcactgttattttacgtctaaggttccttccaagctccccgtgggcgacccttccgaaggaccagaaggcgcgccaggccagcgtccggcccggccaggacggaaagggttactaggcccgcgcgcccgttaccggcggaggccggcgggctcacaatgccaggagccgggcgccggacacttcttcgcctcccatccgcgcacacgccccttcctgtcacggctgggcccggccccgcccccggcaccgcccgctggccgggcgctgccagagtggacggttccagaggcatgctaatgagggggcgggcaccgcagcccattggttgtccgcggagtgtcggtgaagtcagcgctgagtcccagaaaaacagagcggggccagctgcagcgtgtagtgcgagtggggcggacgcgcgcagcccgcccgcccggcgaccagcaaggtaagcccgcgctcgcccgcccggccgcgcttgcccgctcggcggcggcagcgccgggggtgtgcgcggctcggcccccgcgggcggcgcctttgttccgcgctcggaggaggcgcatttaaagggccagctgttggagggacttgggggaccccctcccccagagcatccccccatgggcacagggaaagcggtggtccctcgcggccgaaccgtccatcctgcctgctcggcgaatccccagtctttcaaggaaagttccccagggtgcggaggatctgggggcttccagggttgggggtttttaaatttccttttttggtgggtgtggggtagtacgatcatggcctctgctaggagagaatgtccgcccgtctcagggtggctgcaatttgggtgggtggaggagacatcaaagcccgaatgggtttgtgctgtaaagtgaaactaccgaggaggggcacctctgcagcagccagaggaaggcggagggagcgagcggcgggatggaggcatctcaggtgtgttcattcatcagcatcccctggagagggcggcgggaggggcgcaaggacgacgcggttggccggacccgcctgaatgaacggggactagtatgcgccggggacacsgcgcctgcccgtgccgcccgtgccccttcttctccccgagtggctgacagcatcttgctaggcagctcatcaccgacatggacagcaagcaactcctttctccgaattccccgggcatcccctgctaccacctcgctgctttccgatgtggcttccytgatacgtggtagcgccattcaagatagaggggaaagaggcttgaagtcattatgtttccttcatgggggaatgtgctgtcgaattctgcatccccatgcatccgctgtcgtaagatggctttgaaattcaccagtgcatgctttctccaggcagacaagaatttattacgctattacattgctacgtaaaagcagaagggatcccactgagcatggctcgttttgttcagtcctcggtttttcccagcatgttctgggcgagcctttggatttttgttttaaacactgagcgttgggatgcccctgttgtcacagggccgacctgctgaaattgctggaattggtttcatcgtcaataggagggaggttcatctagagacatcatggaacctatctggcgtgtcaggcctctgactccatctctcccctcaacacccccccccccgcccagccccccgcgcccttttttcctcttaagtggaggcgggggatggattggctgtcttcactctccttgtgttttgagctcctctgcttagattcaattctgtggttttggttggaaaggtatcttggtggtgatcgaagagaggagggttggattaaaagtggggtggacacagaggggtcagcagcatcaatgacagaagacagatgatggacatatctacagccttcagacaccgatgaggcagatggctgtctacagagtgaggggcgtgtgtttgggctgtgagggggaggggtggaggaggaggatgcctccagcagttttctgccccgccctctggatgctgccttaaatagccccttgccaaccaagctctgatgtctctttcttggcctgaggggaaagaagggaagggttggtctgttggcacctttgcccaaggcactgttggagcagatggttaggaaagggttagttctccaggggttgcagagagcacatttctcagctggagggccctgagaccactcctttggcgacttccctgcagggaattagcaactgaaatgaactgctgtctaccctgtggggtaaagagttgggagggtattgtcatcttgtggacgatacccgccttgttggccttttccttctcctacctgctttcatttgttgtagttggagagtttctgtatacttttcgraagagattgggcatattggggagtgggtaggagttatgggaaaggatgagcaaattcttcctggcagaacaaagcactgttcagctgttcctctctttccccttctctaaaataagagttcaawacagatagcagagtctagggttttctttgtaaacaatgaaagggcagggccaggaaagaaagtttttattgtgcagcattgataatgatcaggtcatcctaacttatctccagacccttccctggatgtggagatagatttgctgtagagggcactctatggtaatttaggatttgacctgtctctaggagaaaggcatggatggtctcaaaaagctttggtggagaagctctggaccagaggcaggacagctagctttggtcctggccaccaatctttgggctttgggctagtggcttctgctctctgggcctgtgtccttgctggtgaagtggaggatgatagggcagaaggtcttccagggttcctgacaactccrctgttcttagagtcacagtttgtgatggcattttcaggttctttcctgtttgctaaattgataataaattcaaagtattgcacaatggcatagaagaagcattctaggatgcaggcttctgttggattcacatctaccttttccttgattagtgtgatttgtgaggttttactgtaagtatgtaaacaattcagagctagaacggtccagagtgagaggcacagaccccagagtgagtggttgtgggagatgagggtgggatgatagattgctgaggaaagggagtttctgtaatttgttctctttccctgtggatgtttaacttgctggtttattcatggttatacaggtgaacgtttacctatctagaagatgagagttataaaagacctctgtgattgccatgttcctccccctcccccgccaaactgaggaatttgaggrgttgggaggtttggccatttttccaaggttgcacaactagcaagatgtggagctggggtgggaactcggggggatagattgtagatcttgtttccrgatgtatctgggtttttttgttttttggtggtggtggttgttttgagacagggtctcacctgtcacccaggctggagtgcagtggcacaatcatggctcactgcagcctcgacctcctgggcccaggcagtcctcctacctcagcctcccgagtagctgggaccacaggcacgcactaccacacccagctaatttttgtactttttgtagagacagagttttgcggtgttgcccaggctggtctcaaactcctggactcaagcgatccgcctgcattggccttccagcrtgctggggttataggcttgagccacggtgcccggcctatatgtatctgttaagccccctcttcctctgagagaaatgattctaagatggaatagcgaaacatgaggaggaaataggagcacaagaagagagagattggagaaacagacgagaaagtaggaggctggggacagattatgtggggaagggaaaaacacagaaaccaagcttggaggagaaaaggatggagcttgaaagggggaggctctattgtctctgaaacagctgagctcttctgcagcccttggggtgaagtgaggggaggtttggtagcctaggatggggggtgggggggtggactgagagttcaacctcagcctgagactgtcttggaatctccttgggattgctcctgttgaccctcagattgcaaagtgtcatggaggctgcttagtttcaggaccaactgaggcctttagatycacgggagcatgcagaatgtggacatgtgggaagtcaggtgtgcgggtggtgatgctggctgatgctgaggtgggactcagttctgctgaagtcccggtttttttgtaaatgcaaaactcaaaacacttttccatggatttcgtttcagtgcaagcagcattttctccttggattttcatcagtgctttgaatgttttatgagatagtgtttcgaatactcccttttcagaggagatacttggagatgaatgatttactgaattgtagctcatttgggggagcttctggcttgtgacctaagctaagcctcagaatgtttcaatgagcaattaaagagctgtgaacagtggttgaccagagcactaaccattcaaaggcaaggataaaaggtgataatagttcaaggtctggagctacagccaacagctggccatgaacaatgtaactgactttggctaactcttcaagccctagaaagtgtctctgtgggtcctttggtggctccccctttttgtgtgcggttaggcatgtggacccgtccctgaatcttgctgtctcccattcttcttttgctacatctccctccactatccatttctttttcttacctctttctccttgccctcctccctcattctttctttattatcaacaatatatctttgtagtttcttttaatctattgccattaaaatttcatgttctctgttcttcatttcaaatcagtcgagggccaggcaaggtagctcatgcctgttatccgagcactttgggaggctgaagcaggtggatcacctgacgtcaggagttcaagaccagcctggtcaacatggtgaaaccccgtctctactaaaaatacaaaaatttagccgggtgtggtggcaggcacctgtagtcccagctactcgggaagctgaggcaggagaatggcatgaacctgggaggcggagcttgcagtgagccaagatcgcgccactgcaccccagcctgggcgacatagcaagactccgtctcaaaaaaaaaaaaaaaaaaaaaagacaaaaattagctgggtgtggtgatgggtgcctgtaatcccagctactcaggaggctgaggcagaaagaattgcttgagcctgggaggtggaggttgcagtgagccgagattgtaccactgcactccagcctgggggacagagtgagactccatccaaataaataaataaataaaatcagttgaattcagtcttttttgaatgtgtatgtgttttacacacaaaacaaaaaagaggcaaatgaaccaaatccaactaaattgctttttacttctgtgtggccttccattgatttatccccccacttcttctgtggtcagcagtggctttttatagaaaaaaaagttcccaggtctctgtcatgcggttattgttttcacaacaatagaaaaaagtttccacccttgtattgtggaccacaagggacaccctctctcaagggatgtaccctgtttctagacttccttccatggaaaaagtgtctttaatgcattctgtaacagaggcctgtactgtaaggggttaggggtgctgatagtggaggtggggctcttctcagtgactgcggtactgcttagaatagggrctggcgggctatggcctagagagtatatstaggaagaattagcatcgttgttttctctgtttcctcaggctgagctaacctaactggctgtagcaggacccagacccttttggaaaagaatgagatgcttgttaactttctgattagtgttgagtgggacccaaggtatgtcttctgcccaccttgggagggtgggcacccaccgacagttgctggtgtaaagttcccggattctttgatggatggatgctgtaccgctttatgattttcttctgactctaattagttacagagaggattsactcttgatgctcagtggtcagcaagtactttagtatctaaagtgggccttgcaaacaagaagtcaycttgtcacattaggtttgtattctctgtaatatatgtgtactggttttagtataaaagtatttaagttgctttactgttgaatacaattgacgttctacgaaaatgtgtttattgtgggccctcatttgtaccagccctcygtaaatatgcatatcagtctcataccccaactggagaagccggggatagggtaggcatcaaacctgctggtgctgagaaccacccctccatgctttcctgctggctctgccaaaccaccagatgcccrgtcattccctactccacgtccccaaaggccaggcccccctgcaccccccaccaggactggttccctcaccagaaggcctttttctgcgtttcctggctgatgccttctcccctcagactcccctcacatcttaaagagatgcctttcagctgggcgcggtagctgtaatcccagcactttgggaggccgaggcaggtggatcacctgaggtcaggagttcgcgaccagcctggccaacatggtgaaaccccctctctactaaaagtacaaaaaattagccgggcgtggtggcgcatgcctgtagtcccagctactcaggaggcttaggcaggagagtcacttgaacccggaaggtagaggttgcagtgagccgagatcacgccattgcactccagcctgggtaacaagagygaaactccatctcaaaaaaaaaaaacaaacaaaaaaagagatgcctttcttcttgtgttcagctttctacttctgttgatattgctggttcccttgtctgtttcctcccccatattgtgagttctgggaatagagtgagtctgtgtttcttctctttttaaattaaattttaatttgtataaaactttcgcgtgtgtgtgtgtgtgtgtgtgtgtgtacacagagagtttcttttttgtttgttttgagacagagtctccctctgttgcttaggctggagtgcagtggcatgatctcagctcactgcaacctctacctcccgggttcaagcgattctcctgcctcagcctccctagtatctgggactacaggagaccaccacccccccagctaatttttttattattagtagagacagggtttcacagtgttggccaggctggtctcgaactcctgacctcaagtgatctgcctgtcttggcctccctaagtgctgggattacaggcctgagccactgtgcacccccaccccgcacagagttttgaaagacaaataggctgggtgtggtggctcacgcctgtaatcccagcactttgggaggctgaggtgggcggatcacctgaggtcaggagtttgagaccagcctggccaacatggcaaaatcccatctctactaaaaaaatacaaaaattagccagtcacggtggcgggcgcctgtaatcccagttaatctggaggctgaggcaggagaatcacttgaaccagggaggcggaagttgcagcgagctgagattgtgccactgcactccagcctgggcaacagagccagactccctctcaaaaaaaaaaaaaaaaaaaagtcaatactactagaaaaatataaaggctgcctgggcgcagtggctcattcctgtaatcgtagcagtttgggaggctgaggccggcggatcacttaaggccaggagttcaagatcagcctggccaacatagtaaaaccttatctctgcaaaaaatacaaagaattagccaggcatggcagttaggatatagacatccttgaggggctgctgttactctgtttacaacagttacttctaatgcactgagctgtttctcctgatattactatcatatttattgttacctgcttacaatgctgttttctgattgtccattttagatgttatttttatttttccttatttttctttttgtagagacagggtcttgctatgttgagaccctgcttgaggccagggtggactttaactcctggcctgaagcactcctcctacctgggcctcctaaagttctgggattacaggtgtgagtcaccatgcccagcttagaggttacttttagatgttatgtcttgatgtcttactatggattagatcctctcctctgccccccaatacttccctttctccctatcctctcattatagatatatcacagtttttgattacattgatatttggtgcttacattattttggctgtgtaaatagtgttcatgacagagccatatagtatactataatattttctttcttgtacattttttgagttaataattatcttacattttctatttacttagtttctatgtacttattgctaattctcaaagtatttgacagcatcttaagacatttgttttataacatgtgttcctatttatttatttatttattgagatagggccttgctctgtccaccaggctagagtgcagaggtgcgattgtagctcattgcagccttgacctcctgggctcaagtgatcctcctgcctcagcctcctgagtagctaggactacaggcaccaccatgtccagctaatttttaaagttttttggtasagatggggtttcactacattgcctaggctggtctctaactcctgccctcaaacaatcctccctcctcaacttctcaaagtgctaggattacaggcatgagccaccgtgcctgcgcttgttcctttttattttattactgttttttttttttttacgcccgcttggagacttccctcctataggcctccattctgtctcctttgttcttgcccattgacctctaggcctgtggcatgactcatcctgggaattccctcaccttatcctgggtgggatcctgtttcctttgttgatttattcctccacaagtttctgagagagggtctgtggaagttgatcactttaagcttacaggtctgaaaatgttcatattctacattcatattcgattggtgatttgattcatctagaatttgaagtcgaaagccatttcccttagaattttgaagccatcattccactgtcatctaggttctaatattggtatcaaaattcggataccattctgattcttgatcatttatggataacctgatttctcactgaaagtttttgggatcttctctcttttcctgtatttgaaatctccttgctttaaaaatgattggcctgggtctttggtgtgggccttttttttttttttttttgagatggagtctcactctgttgcccaggctggagtgcagtggtgcaatctcggctcactgcaacctccgcctcccgggttcaagcgattctcgtgccttagcctcccaagtatctgggattacaggcgcatgccaccacgcccagctaatttttgcattgttagtagagatgggggtttcaccacgttggccaggctggtctcaaattccagacctcaggtgatccacccgccacgggctcccaaaatgctgggattacgggtgtgagccactgcgtccagccggtgtgtgcctttttgatctgaagattgacgtctttcagtttggggaaattttcttaattagatatattttaataatttcattttctccattttctgtgttttgtctttggcatgcctattagctgaatgttggacttcctggagcaagtttataattttaaaacattttatttccttttttcattttattatatttttgtctttcagagagctatcttcagctttatcttcaactcttttccatttttaactgtgctttcatgtgtttacgtggaacatatttgcatgttttactttgtaagagctccctagttctctgaatacttgcttttcttttttagatgacattctattcttgtttcatgggtacagtaaattcctttatattaagggttttgtttgtttgtttttgttttttttatggttttctgctgttccctgctgtcccttggaagatgttgtttcttccaagtccctttttccatttgttttggttactgtatcttccattgcagctatccttccatgcatgctgatccttgactgtctatgtatattttaagaatggacaccgaaatgctgattgggcatcagtgccacaaggaagggagtcgttaacttcattgtagagtgacccagcagagagccccctttttctctactggagcagcctagatatcagcgccggtagatctttttcctggggctttcctggatagggctttcttggagaggattttacctgggtgtggggtagggtggggtggggtggtaaacagcctggccttcctgcattctgggagcctccatggggaaaggggctaggtattagtctgtttgatatgcagactttcactcaatccctgggtcttttgaaagttgcccccacctgccatccctctctcccatctctctacctccctcagctgtgtccctcccttggctgtatctctggtgtaagttacctgatcagtggatctccaccttctgctagctgaggcagggaaatcaccaggctgagcagactgcaagagggaccctgggtctgactgctctttgtaccaacttgcaggcaggcacccttctttttagctttaccctgcttttccctttagagtccttggtgcctccacttcctgaactgtctttgtgttctgtgccatgagttgggcacttgtttagtggctcctgctctgcttgcacttagcagagcagacaatgcggaaacctaaatcagctactgcatggtggtcagctctccactgctgttgacatatctcatctgctggggtctcttttttcattaagaaatgcatccgtctactgtccttttagtgggagtccagaagagagcagagataaacatgggtgttcagctctctgatttgaccaaaagtttgtttcatttcttcattcacacacttaaatttgtgcctgatatagrgtatattctcaagaagtgtttgttaaatgattgaaagcccgttcctaggatgatatgcgtacatttagtcatcagatttcaagacacccaaacatacagtgttgcaaaaataaatccgtcgcttattctgagatagacataataataggcagcagatcctgcctattctccccatgcagtggaggataagacgcactgggagggagacagtgttacagagtgttgctgtcttcagccctgtcagtaactacctgagtcactttgagaagtcccttaacctatctgggccttggttttcccagccttaaaatgagatgttggtcaaggtttgattcagttctctgcattgagcacctgctgtgtgcaagccacggtgctaggattctctacgtgtctcttctaaggcagccactgtggtgttttgtatgtatgtttgttttggcatgggccacactgagttgattgtgtttggtttatatgtctttctcctggcttagttcagtgccttgtacaaagtaagtcctctgcacattttgactctccctttttctaaaccgagggctccttgtgagtatcacgtcgccatcctctgtatctcctgtgtctatcacagttgttggtacataggaggtatgtaggaaatatgaaaatgtgagttgttctgccagaatccccagaccctgcttggagaacaagcctagcttgttgagggcctagctgcacgttccctggcccacttatggagttgggggactcaaatgcattggtattaaaatcaatggagacagcaattctggaccacagccttgacactagaggattgttttctcccaaacagatagtagtcatatattcatttcaaacagcacagtggagcggagaaagacttgttaccagttaagatcagattcatcttaaccatgaaaatgaattatagatgtatccctgcattcaggtgtttaaaaacatttaagtgttttttcataacttcttttggttttcccacacttctgagtttatgtgccaggactagtaactagaaattttagggatattgatttagctcagtggaagatattttttattgtaagagcaactccctaccagactgcattaggaagccctgaattctgtgtcaagccaaggctaaatgtccactctccagggaacatgaagaatcaatgcctgtgtgggagatgaggtactattagagcacctgaaaagtcctttgcttttgatttgttcatcaaatagttattgagcaccggttatagaccagcgtccatgctgggctctgggaatatagcagcgaacaaagagaaatggcaccttccctcttggaatttatagactagagctgagctgtccagtatagtagctagtagccacatgtggctattgaaattaattagattgaaataccattaaaaattcagcttctcggtcatgctagccacaaatgctctgtaggcacgtgtgrctagtgactgccctacggtcggcatgggcagttgtagagtgtttctgtaatctcaggaggaactcttaggcaggctgatcatagagctaagattctgtgtttctagacccgacatttatgattagcatttcatggtggaggcaactgaggcacagaaaagccatttgtttaagactgagctaggaacaggtctcttatctttgagtgtggctcttctctccctgaggtgaggtagggcaactgagagtatagtctttgcactcaggctgcctgggttcaaatcctggctttgctacttcctagatttaggtcttagggcaagtcactgccctgtgcctcagttgtatcacctgtgaaatggaggaagtaatagcacctacctcacaggattgcagggaggattagatgacccagtcattcaagtctttagaactatgggctgggcctggtggctcacacctgtaatcccagcactttgggaggtcgaggtgggagagtcagttgagcccaggagttcgagaccagcccgggcaacatagggagacccccatctctacaaaaacttgaaaaattagctgggtgtggtggtgcaagcctgtagtcccagctacttggaaggctgaggtgggaggatctcttgagcctgggaggttgagcctgcagtgagccaagatcacagtactataccactccagcctgggcaacagagcaagactccaactcaaaaaaaaaaaaaaaaaaaaaaaggaaagaaaagaactatgcatgacacataagtagtaataattcagtaaattctggttactattattgagactgagaaggggacagaagataktgggagagccaaggaggcattttcaaacagcagagtggagtggagaaagactgttaggaaaggctatgcttgtagagctgactgaccacctggggagggatacgtaatggaatgtttctcagccaggggctgctttagtcatgtgagctgatgtgaaaatgccagtatgtccatgaagtcctctgagtgtcacaactggtcactggtcctctgaataaggatcctttcagtatctcctttctcctggcttgcctgcacataggctggtccccacacccctttcccctgtccccatgcatttcttctcccctcactacatctccatcatggaatgggtgggacatttaccatcacccctgtggagcagcgggctgcatcgaaggaatgcagaagagagcagggacagaagcccagctgggccctggtattttcttggagrtttgcatctcttgttggtgtcattccctctgttgctcagtctttcacagtgttttaggggtgccccattttgctgcatgaggagaaagagagctctgatgttagccccagggatgggagggtgccccattgggtaggtaaatctctgcttatatgtggaactttggcttaagaaatactttatttatttattttttgagatggcattttgctcttgtcacctatgctggcatgcaatggcgcgatctcggctcactgcaacctctgcttcccgggttcaacctcagccttttgagtagttgggcttataggtgcccgccaccacaccyggctaattttttgtatttttagtagagatggggtttcaccatgttggccatgctggtcttggtctcctgacctcaggtgatacaccccctcggcctcccaaagtgctgggattataggtatgagccactgtgctcagccaagaagtagtttaacagagcagtctcatcaacactgtagacatgggccccaccctgcaggtgtttatttcttcatgaacacccagagggcagggctcttgtcttccacaacagacatcaacagtgcatttcaggctatgaaataggaaggttctagtatgatacagtgcgtgtggaggtgcaggtagtgagggtgctctagaggtacataatggatgtggcaccttgcctcagccaggggaggcacacagggaaagtactataataggccagtgatgtatctgaggtcaggtgtctagtagtggcagaccctgagctgacctgtgaggagactgttcctagcaagcctgattctcagcatggcatagaaatacaggttctccctgagtaccagtgatcaggagtattgagtgcttggccgggtgcggtggcttacgcctataatcctggcactttgggaggctgaggtgaatggatcacctgagctcaggagtttgagaccagcctgggcaatatggtgaaaccctttctctaataaaatttaaaamatttgcaggtgtggtggcacgcgcctgtagtcccagctgttcgggaggctgagggatgagaatcgcttgaacccaggaggcagatgttgcagtgagcagagatcatgccactgcactctagcctgggcgacagagcaagactctgtctcaaaaacaaacaaaaaaagaagtattgagtgcttgaggcttcacctatggtacagtttggatgtgtgtccccactcaaatctcatattgaaacataattcctaatgttggaggggggcctggtgggaggggattggattgtaggggcagtttctcatgagtggtttagtatcatcccgttggtactgtcctcatgatagtgagtgagttcttgtgagacctggtcatttaacagtgtgcagcccctccctctttgctcttttgctcctgccctggccatgtgacatgcctgctccatgcctgctcctccttcaccttctgccttgattgtcagtttcctgaggcctccctagaagccgagcagatgccagcatcatgcttcctgtacagcctgcagaaccatgaaccaattaaacctctcttgtttataaattacctagtctcgggtatttctttatagcaatgcaagaaaggactgatacagcctgtaactggctttgccaatccattcttgtttgggccttgatgttccatcatcttgggtggtggtctagcttataacagttatgataggaatgggtgcttagtagatcccggaattgttcttctgtttgcatgtcagtgtgaaagctcattacacatttatataatagcttatgcattgatcattaacatcaacctgtgggctgacctcggtttcctagtatgaaaggccactaggacataccttgtgaaattcagtttctcttattgcctggagtctgtgtggaacctggtggctgagcatatgagcagtatgtctgatgtgtaaaaagataattcatttgcatattgcttttctccacttagaatttatcttcagttggggcagatccagtgttgggtgactgtttcctgtgagcatggaattatggccaggggttgtaattgcttataacaaattgacagggaggaaaatgkgactgtttgcctggtacrttgatgtaagggagtctttccagtgctgctgtaagatatacagtgctgagtcttctgggcttgggcctttgtttctctcccttttttttttttcaagatggagtttcactctgccacccaggctggagtacagtggcatgatcttggctcactgtagcctccgcctcctgggttcaagcgattctcctgcctcagcctcctgagtagctgggactacaggcgcctgccaacactcccggctactttttttgtttttaatagaggcagggtttcaccatgttgaccaggctggtctcgaactcctgatctgcccacctcggccttccgaagtgctgggattataggtgtgagcgaccacagggcctttctttgtagacagtgcacacaggaggctggcgataggagactgggcagagtctagaagccagggatgaggtaagaaaggctggaactggagctgggagatctgagttgctgccccagtggccttgccagtggggaatctgggtggagaggtgaggcaggagtgggaactgcttttaagcaggacaaagtgaatagaggctctggagaaggaaagcaaaatcccaacagggacagaaatgagagtagctggagaaagctggagcttgggagagctgagggcctaagcagggtttggtggttgctgaaaatcaagttgccaggcccatgaaccgaggccaaggcaatgttaggccttttaggactattttgtgtttgctttgcagggcctctatgttggacgtggtacattagtgagccagcaatggcaggtgtgagggggcgaggccccctaggaactgggaaatattagtcatgcctgagcactgttagaagatacggcttctcatcaagacagctgctccgggaggagggtctgcagccgccagcctgcattacagtttatgttcttggttttgtctttaattattaaaggcacgggctatttaaatactcacctgaagcatcattgtgagtaattttcccttcctggggtcaaaggagctccagcagggaaggggtttggtggcctatggttctgggttctccaggtgcttccctcaaggaatgcaaggatgtcatgaggacgttgtaagatgcccttgacagtagggtgcagacctccctgggctgtcttgcagattggcatttattttgagtgagtccttaatttgaggagtatagggtgttcccttttatcataggcaaggaagaaacagtgctgttagaagatgtaaaatatttaacactctctttaaaaaattaactgtccaggaacctttgattgctggtgcctatggcaacatgcatggttttcaggagtgtcttctcggagtccctgggctcctcagaaggggtgatatgggggtccatgggttaggggtgatgtgagggtccagtcttgggagggctggctgggaggccaagagcccacctgttctgcttggcttagaggctgggcagtagcagggctgagccactgcctcagagggtggtagtcgggggtggtctgttttgacaagtggagaggagtgaaggggagaaggagagctcgccatccttcttgggcttgctgagtttatgcatttgttttgttttactggcctctgttagtccctggtgcctaccgttctccgtccagcctcaggacttttgcgcatgtggtttccttagcctggaatgtaaagggagccttccttccttacctggttcgtgcctcttacccctcagatctcacctggagcgtcatgttctggggaaattatctctggccctgcttcctaggtgactctcctgtttgagggctcttatggttcggtggtctttgttacacttttttggaaaatcattgtttgcccaccctaccagcctgtagggttatgacaacagtggccagggctctttcttgtcaccagtatgtccccagtacctagcacgggcctggcctacagaggggccccactatctgttaagtaaattaattcattttttcatttattatgttttgggttcggtagagatcctgggaatacaacgagaatgaaacacccctgctgtcctcaccgagctcctaaactagagcagtagataagcagtgctcaagatagccattgagggcaggaagaaagctttatcagttggagttctgtttatgctttaactaaaggaaagacttagctttcctatttataggagtacagatttataattactttgtaagtatcctcaaaactatttcacaaataggaaggtgtgatcaaaaagtttggagactactggtctgaagggagaggtaggaaaatgaaagggtttttttgtttgtttgttttttgttttgttttgttttgttttttgagacagagtttctctcttgttgcccaggctggagtacaatggtgcgatcttagctcactgcaaccttcgcctcccaggttcaagtgattctcctggctcagcctcctgagtagctaggattatagtcgaaagggtttttatgccaaagtgtgatgaacaatatgttagggcaagtacagggtgccatgagggcatgtgggttggggggtgagctggaatccaaccagaggacagagggaccggcacatgcaagggcaggcttagtggattgggagaagggcacatactttagtaaggcaggaggagggcttgctactgggattgggaggggttaagagttaggattactaagagagatgagactgggcmcctgcctgcagcatgggcatagtctagcagtggtgcaaatgtgccttaggagagacacagcatgaggaatacttggcattcagaagagggtatatattttgcttagcagggatcgggcctggtcatgctttaaaaatggaacatgctcaagatcacagaggcccctctcttcattgtagaaggggaagaggagggtgctggaggttgacttcaaggctctttaaagcccatctcaggagaatgacattctccttggtctcctkctacccagtgggatttttatcctaatgtgatttagacccctcctcaggttttattctgcaggttacaacattgtataggaacaagaaaatggcgtatggtatatgtaaataagcatatttggtgtgtttacttacctgtgtaatcacgcacactcccttcttttctttgtttgttttcaagtcccagggcttgaagtaattacgtaattagaatccacaaagagtatggcgagataaggtgtaattaaagaggaaagcctaattttggaagaatgataagaggtcatttgactcagtctgggcccaaatccaatcttggaagaacagtgagaggtcatttggatgtaggcagcttgaggccacccaggagcccagactggcctcagaattggacagattctgtttcagttcactgtgaaagccactcattgagcatcctcttggtatagggtattgtgggaggcccagctatgagtaaggaacagaagtcctagatctcagggaggacatggggaaatagggcctgagagtaaagtggagagatgrctcctggggacagggtggggggcggtgtggggaaggattcacagaacaggtagcatttaacttgtgctttgaaatgtaaggagggtttcaagaacatggacaagaactttctgggtctattggagacactcagataatatttgtggratgaatgccaggctgaggttggaggcagaaggaacatggccatattggtggatggtcattttgcagtttggtgatgaggtcaagcttgtacagctcagacagtgtagtgacaactcacagccaggaggccaacaggcttaggccctgagtgtgtagtgaggattgtgtgcagaggagtcagagagcactgcgggggtcatgggaggcctccttgtggagggaaacttggacagagccttgaaggaccaataggagggaggaaaggggagaaggaaggaccctccaaaggaagggaatgacatgggtacctagagagggattagagaggagataatccccgcaagaggggaggggtacataggggagcagggtgaaaccagcttggcaggggtgggtaagactggtttctgggggttgggcrtgttgggcaggacaggattgatccagtgggatagaggagccatggcagattgttggacaggtgagtggcatgaaaaaggcatgttagggccagaggaatctggccctggtgggtgggatgggctctggggagctcagcctcagctcctgggcatgaggtggtagggaccaggcagtaggcttgggaggttggggccctctgcagtttcttatcacggaagggttctggtcttggatgagagaaataaggcaagggaggagctggaggtatttgcaaggtcccagcctgggagaatggagatacttgagacaggaggggtacccgctgttggggaaagagggcgtgagtggggacttggtatgttgagggccccaagatccctcttctaacccccagttgtgatctagtggagagacctcaggccagtcccttcatctcctgagctccatttcattgtcagcaggagtcactgcctttacggttccatctcatctcagtgcagtcattgcagccctgggctcaggcaaggggaagggtctaggctgaggatttgtgaggccatcccttagaggtgagaggagaaacacattgtcctgttccttgttctcctggagtgagcaggagcctgggggagggcctctggctgaccagcttggatgaggagttgtggggaagaaggggctgtcctgactcaaccagcccatctcagggtggttttgagactctttgacgaaggggtgtatgaattctaagtttatgcagatgttgaggtaygtgcactattctggggcacagcagggaaggggttaatcttcctgaatttgcagaaaggaaattctcaaggtagggaactgatggctagtgacctcctacctaacctccacaaagctagtctttgggaaacttaaggccttcggtctttagagacagagtctacagggagggcttcctggcagaggaggacttggacagagccatgaaggatgaatagtatgtgagaaaggagagaagaaagaactttccagaatgacatggagttatagtacaaaattcacagaagagattccagaaaggaaggcatatgtttttgaatacctagtatgcctaccagctctgtttgtcaggtgctttcatgatctttgtcttgttatctttacaccatttctgcctctcttattagcccatgttacagataaggcagtaggattagaggggtgaaccactttgcccaaggtctcagtggtagggtgggatttcattttattcagatttctgactccartggcaacaaatagccatgccactatattctgctggctctctgggaatataggaacaacagataatgatttgtctacatgactttattcccaagttaaacacttacctaaaacgcggctgcggctgccacccctgctgcagctttgcagtactgtgcaagaccttagaggccagtgatgggaggcygttagagctcctctgagtctgaaaccctcatttatagatgaggaaactgaggcccacaaaggagaagagaatgtgccaaggttaggggcagaatgggaatgagaactagaggagtctggagactttggcgcttgtggctgtttaaaggccccctaggctccctgtgtaaaagtwtgtttttagacaacaatgggaacctttgtctggagggttggtctgaccagggttgaatatgaaagggtctgtgtgtatgtgtgtttctttcctttgctttaacctcagatacctttgaactagcaggaaggattctttcagaccaaaggttaagactaaaggcatttaacaggtggaaagagcataggaaggagggggaagatcagaagccacagaaatagaagactaaactccaggcttggataaaaggaattttccaagcctgtaaataatcactaacgtttattgaacacccactgtgccaggcagtctttacatgtcattttatgtaactgccatcgcttccccatgaggtaggtgctgtttaattgttcccattttgcasatgaaggaactgaggctycaagagtctaagtgacctatttaaagtcatggaattagtacaatgtagagccaggactccaactcaccagatcctaaactctccctttaactcccaaggcattttattggactaggtgctcccaggtgcctgagcatatgaggatatatgaaatagcaaacttagggaggtcatcctttggcaatggttctyatkgggatgtggattttacccctaggagacatttggcagtgtctagagtcatttttggttgtcacaaatcttactggcatataataggtagaggccaagcatgcttccgaacatcttagagtggacaagatagctcctcgtaacagagttaccccatgcagaatgtcagcagtgctgaggttgagaaactctggcctttgggatcctggttgtatcgttaccactcagagcacagtgctagtggaaggtcccatctgaggaacttgagttgttgctttagctctagagacttaaattgtaccttactgaatatttatagtttgggtttgtcactgactgagacttgatgggccaaggtggggctagtggtgggtagaggctggaaagaaaaattctagcaaggtgtgaccagccatggtggcctagggctgcatcttagttgcagcaggtgagaggtggttggggtccactccaggctgctgagaattgatttgctcacttcatatgtaactgaaataagaattcagatgcagctaattgtgcttttgtaaaatttatttttatttttttgtgagacagggtcttgctttgtcacccaggctggagttcagtggcacaatcacagctcattgcagcctcaacctcctgggctcaagtgatcctcctggcttggcttcccaaaatgctgtaattgtgctattttttwaaaaaattaagttattgctctgactactcagcatcagaaacctccgaggaagggttacatgttgcagatacactcagatacaagtatgctgcttgccaaattcctctgttaccagttactgtttaatctaactcgagtcagcccctatccacttggagaatagcgcacaaatgtggggagccccaggacccttggcttttactggagcctcccatgctgaactggtcagtcagagcagcccgtctcctgagggcagtgctgaggaaaggggccactgcgttaccctgactgctgttgctttccgctccctcttccaggtcagacatggaaaggtggctctgtggacatatctcagatggtgacctccccaggcctaatttctgccccagcgcagccgctccctctgtaacactgattgagtgctagcactgccttgtcaagcatctgctgtrgccacagacacataattatggccctgccttcaccttgccggccacttcctttctatcacctgggactcaccccaaggcctctttcatgaagctctctgatccctccaactaacagtgtcccttcacaagcacctttttttttttttggagacaaagtctcactctgtcccccaggctacagtgtagtggtgcgatcatggctcactgcagcctcaacctcctgggctcaagtgatcctcctacttcagcctcccaagtcactggactgcaggtgtgagccaccatgcttggctaattttttttggagagatggggtttcgccatgttgccaaggctggtctcgaactcctgagttcaagtgatccatccaccttggccttgcagaatgctgggattacaggtgtgagccaccacaccggcctcttttggctttttatccagtcattaaattctgagtctttcctggatcaccttctgacctctccagtggcccagccactcactagctgtgtgaccgcaggtgaagcagcacagcactgaatcacttcccttccagcatcagggtggaatgagagtcatagttgtgggacctggggtgttgttcctctcaggtcagtggaaattcaggttctcctttgatctcatacagattaatgragaattgagaactagttgttagcaaactctcttcagattaagtaagtaagcttctttaatattaattcttcacctagcaaatgtttgttgagtacccgctctacccaggggcgtgtgataggtttagcaggggtgggaaatggacctctttggcctagccctcaaggagcttactacagccttgtggggtggtggttgtgtctgttcaaaaccataacagggtggcttctccagcatgtcactgtgtgtcttccttaggaccaattatcacggttatgtgagtgtgcatgcacctcccccaacacttgaattaaagtttcagggagatggaattttttcagtctttttcaccatgtgccataacaagcaggcagtacatatttgttggatgaatgcagtaatgaatgatactagttaaattctgttttgaatgcagggtgagatttagacctacctagatggataagggggcgttacagactggtggggatggggatgggtggaggcaggaggagggactgccgtgagcaaatggacagagacagtgaagcccaaggcatgctgggcacctgcaggcccactgtgattagaccatgtggcacagtcagaacgcaaaaagactgtgaagtaagtcggrcccagatggtggagaatcttgaattcaagccgttagagggattggatttattctatatagtaggatgaccttgtggtccagtttcccagggtgcttcgtcccaatgtgactattactagtgcccccttttcctcttaagtgtccctgcttggatgataaattacatggtcttgcaatcctcaaggccatatggcacccctgaaggtttcacagtgggccatggtcaagctggtcttaggaaggtcagtgtccacagtgcctgctggagtctaggggcaggagatgagatgtctcctggtctaggcacttcaggccttagctggaggagctgtagtgacttctgaaaggaggagatggttacaaaagagattaaaaatccaagtgacacccacacatggtctctaaaaaggctccaaagtggctcttccagsatagacccattctaaagttcagggatcccggacaggcatttttctaacttgaggttatgactgattaaaaaaaamcccmaaaaaaccaaaaaaaacattgtgcctacttcctgagcaattagaagttaagagaagcttctgcccagcctctaaaatggcctggtggaactcactggtattcactttcctaaaccccggcattgttccttggaattcaaaataggttatgaatgtgcttgatgtcaggaaagataaatctgtgaggaggactgtagtcaatacatttcctttttaagtagaaacaatataaagagcttaattcagccctgaatcaatctcactttgttgccatgattgtgtaaaacctgmactgctttacgtctgtcttacaatgtttatattcccctgatgttccccgtctcagccggccgtgcagagtcccagcctttttaggccatgyacggctctctcttcttgaggctgttttcttgtgtgctgccaaagggctgtgcgacgagcagtgattttatttcatatctaggggttctcttcagggtggctattcagtggtgcccgcaaatgagcttccttgtctaagcaagttggaaggctaaattcttttgccttttcctttccattaaaagattattaaatgtaaaaatagtttgatacatacacatggtttggraattaaggcactayaaaaatgtatacattgaaaaatttcattcttacccctgctgggtcccctatactccctccctcaccccacctccattagytggaatgaactagtttgtccagagcagttccggtttaccttctttgttccagtgaatgatcaatcacaccctctttcattttcaaaagtgtcccagtttaggtgatgaattatrtattatccaacagataggtagttacttttatcagtttcttgcgtatccttccaagatttctatatgcagatacatacatggggaatgtgtataatatatatatattgcttttgcctcttaacaatggatcctagaaaactcttatcagtacaaatggagtgtcttcattctgctaaactgtctttggagagtaatgtttgtagagactgatagttagttgcctttcccttggtttatcagtttaattgctgtttagggcctgcttctctttatctagagagagatggtaggctataggaagtgaaggcagattccttcacttaggaaaacccagttcagtagtaaacccatccaggatgcatttgtgaagcaccaactttatgcctccctaacatggtactaggcactttggatgaagtggtctcttcttcatctccacttgttcacatccttcaagttctagctcagatgccttagccctcatgaagctttccctgatttgctggccagaattcctgggcatctgtatccatctactcatccatccatctctccacccatcatccatccattcatttatccatttcatcaactagtgcttattgagtccctccttgtaccaggacttgtgctagatatgtgaggatgaacgagatgttgagtctcttgctacgggagacagagacagatatggtgcagtgtggtagctgcaatgatagttatatgccgagggtgttggggaagcacagagtggagggtgcctgatcactgaacttgggagtgtagggaggtcttctgaagaggacacttcccctaatggtacttgcttttcactttctcctctgtgtttgccttatcctcactgttagactgagatgcttcgtgctttcttcagctctggccccctcccttgtcactgcaacccctagtgtagccttcttcatttaatagtcactcaaatacttattgaatggggaaaaaaagccaaaatgaattaaataggcctacccgaaggatcttaacatcaaaaagagcaggtgagatgttctttgctgcccttggccttcacggtttattcacacaactcatgtcctgaaagggcttctctaaattggtgctgatgcctccttccagtctccttttatccacaccacacagtctctgccccctgatcatcccttagcattgccatggtaggaaacccctatgactctgactagtgttgaaggagctgcatgggccgggcgcggtggctcgtgcttgtaatcccaggactttgggaggccgaggagggcggatcatgaggtcaggcatttgagaccggcttggccagcacagtgaaaccctgtctctgctaaaaacacaaaaattagctgggcatggtggcaggcaccggtaatcccagcgactcgggaggctgaggcaggagagtcgattgaacccgggaggtggaggttgcggtgagccgagatcacgccactgcaytccagcctgggtgacagagctagactccatgtcaaaaaaaaaaaaaaaaaaaaaggaaaaagctgcatgattgggggccccaagtcccaccccctctctggtcttggtttactcttggaattaggggcatagctgtgaccccttaggatttctggatatttgacatttcaaaaacaatgatttctagacagcctggtggctcagccagctccttcttttatcttcttctaataaatccagcttcctttgccatttcctggtgccacagggggtgatctgtccaggataagagatagccaggccaggaaaatgaccttttaataaagttaaaatggccaccgggagagcgggacggccagtcatgtggccgtgagcctgtttgctgtgctgtgtgctgaggtccacaagaacagaggtccaggtagactccagctgtgcagctgtggaggcaaccagcagcagtgggttgtcctgggagagaattttggctgaatgttagcagacggtttcctaaaaccacgcagaagcagccttttaggggaagaggtgctatttgtttgacagctcacactccccttttggttgtcctcatctgttctttctgcagtttttcacaagtgaaaaagtgggatggtgtttctctggtaagtccattttggactgtggcatagtgttgtctgtgtgcctggcattgcactggacatctctacattccattaaatcactggttcttaaacttggggagcgtaagaatcccctggggtgcttgttaaaaatgcatattactctctggtggacccaaaactcgtgatttttaatatattccctaggttatgcaggtcatacccagattttttcagctgcaagtcagaaaccctaagtcagattggctatgttttgcagtgggcaggcctatgcgaacctacccccaaagttcaaggatgctgacaggctgaagaaagaggctgatttatctagtttctcagaaagaaacattcaatagggacttatgaacagaaaccatgtctgtgtctcggatggtggtgagacaagatggtggatccctgcgctattacccccwagacccagggtttatatacggtaccatagggagggagtgacttacgaagggatgtgtaggacatttgaagcatgataatatcaaggttgttttcacctaagggcaggatttatgtacagtctcttagacaaagaagaaccratacactggaaatcttagaggccttccatgaacagtggttaatcagaagtcaatgtgatggattaacattcaagatggagttgtctagcctgcacaggatgacaatagggaaattcattgtctttcaaacaggagtggtttcatgtggactgcaatgtgaatcatgccccctggagttgtgcartggggccattcttaatccagacactgggcgggtttgggattgattgtttcagtggcttggtgatgtcaacaagaccccagcttcttctcatctctgtcatccttggcattatcttcatttgcaagctgggaatgagacagccacagcatttccaagcatctcagacacaacattcttggaaagaagggtataaatggattctggtgcttcttctcaggagtcaggaagcttttggaggcaccaccagctctcttctcatcatgccctcttggctggagttgggttacatgtcttccctgagtcaatcactgttgactgaaaggggatcccatttcctgagccatctggaggtggggtgggtacctgaacagagtggaggctctgtcaggaaggaaggagcaggaaccagaggccgggaaggttcccagcagggcctgaggtgcagggggtgtgcaggccacccttggagaaacccttccttccaccatcctggacagctgggggttgttggtgaggttatctgtgtcgtgcagatgaggaagtgaggctcagtgagggttagtggcttgtcttagataacaggccttgtaggttgtgggggttgggactgagggaacctggggcatttgagaggcctttttagccccaagagagtaaccatccccttttgccttcctaaggtgtccaagctgcccccttcatttctgatttctcctccatgactgcatttatttgtggcaggaggctttcctgagtatttcttatgggacgaaatctcagggcatgagaaaaatacatatactgtgttttcccctccaagttgactttgcctgaaagtaattgaaataatatcagttcctattcggggagagagttaaaataataaaacgtaacttaagaggtcgttgttaggatttaaggtcacacaatgcacatgttggcccctgtgcatgttatcttaaatcctaacaacaatcccttaagttaggttttattatttatattgtgtggtggggaaactgagacctgggaagktgaagttgactgtggtggattgcacagctcgtcttcgggggtggacccgggacgggggctgcctcgttgaaagtccgtgctgcttctccatgccacgctgtggcttatcagcagccaccagccttgttttgcccctgaaggcaggttctcagggaaagaggttttagtgtcaaaagagttccaaatgagctgaatgtttcctatgggaataattctcagagcattaggaaaaaatatcctgamcataataaacacaagaaagaatcaggaaatctggtttgttatatagcagctaaaatgcaaatagggaaatctctcaaaaaggtttcaagggctgttggctttgaaaatggaaggccccagttaagacggtgagaaaaccgtactgggtccaggagacgactgatacatgtggccactgtggcagcaatgagtggaaagtctgcacaccttgctgtgagccccagttctgctgcttttgagctgtgtgacctccrgcaagtcgcttagccttttagggcagtttctgcacrtgtgaaatggggctctggctcgcagtttggtgggcagagggagcctggccagctgcacaaggccttgcaaaggtgaaggagtagcaggtgtaaaccacagagttggcacctctgagttggaagtttagtgctgctctacctggctgcgagctggtagttgcctagagtgcggggatgtggcagagcatggcagagcaggctgagggcaaaagtctggctttgacttctcaaagagaaaccgtctttgcctgaaaagcccctctctagctstggatgtttggagaacctcccttggtgctttgcctggcctgtgcaccagggagtattgtatggggaccgatgtcctccacagatgccccagggcaggtaacatgtacagggtgggcagagataagtgctsggttctcagtacagacctgtgggaaggtctgagrctcgggaagctctggctaagctgggaggagggagttgaaggaatgtgttgagggtggaycacaggtgtgttggggtattcacaggggaggacctttccaagtgctgccaatacaactctctgatcatggtggctctggagagaaggtgacttgacttttcagatttgagcagaggaaatactaaagtatttctttaccccagcagagcacatctacaactttgtagggttttgagtctgtagtgagatattttagattagtttctccctttcattcttcctgcctccctcmgtttattgaacaccttctaaacatttgttgagcaacttctgcatggcaagctgagctaggggctgaggtttcaaagacaaaatcattgctctcaaggagttgtctcataggtaaacaagatgattacaaagctgtgtgataagtactaacaggtaagtacagggtcctctgggagaggtaggaaggaacacctggttgtgtctggtgggaggaggtgacacytgagctggagctgggatgaagggaaatgcagcaggtgaaccagcgtcttggaaggcattctatgcagagggtggtaacagcgttcattcttggaataaaagagttcatgaagactttctatgtgacagtggtgatgcagagatggatgggacccagtccctgccctgcaggtgttcacagtcaggtgaataggaagtggcagtgcaggtgacagtgtttggggtgtagacagagttctgtggcaagaaacacaggggccctgctgaatccagttattgctatttgcttatcagtcttccttccaggggacctcttttgcaggttctttcattgggaagaggctctgtttaaggacctagcttgctgtctgctgccctaggggctgaccatgctcttcagcaatttgggttataatgtgaggcatctattcttatttctagctttcttccttgtggagccattattggacttaggaagttggacttgggcaagtcactgcactactttgggcttcatttttcttacttayaaaaatagcccattggaccaggtcagcgtttcctcaagagttgtctagggaccacctacctttgaaaggcatggggtgcttactgaaatatggagtccttatggggcagtgccttttttgcgttcatacagttaacctttttaggggctgggcctggggttctgcatttatcaagcactccaggtgattcttaaacatcttagagttttgggacctctgggctacargatttcaacctgcaatcttttcctccctaatctcctcagctgtatgtctacaggaactggacaataaaatgttagctttttgaatgttttatcgttgcagtgatgccctcggcaaactgcttggtagtttaagtgtccagaatcttgacagtgtatgcttatgaactgtttctgcaggctgtttttgatattccttaaggaagaaaagccttgttaacaggcacctgaatgtggctgtcagaatctgtttaagagctgaatcatgacagcaaacactcwtctcagcctttcatctctggctttggagtatatgactggcttcccttttctgagtcattctctcttggcctcctacattctgaagaggtcatttgcattgtctaacatgggagccaaaggtttcaacttctctgacaaatggaatctccgctttggttccaaactgaccgtctttgtagggtcctccagggagttctcagtgttttaatagctgctgtgtgggttctcatttgttggtactgtggaaacagtttttttttttttttttttttttttgagactgagtcttgctctgtcgtccaggctggagtgcagtggtgcgatcttggctcactgcaacctccacctcccgggttcaagcgattctcctgcctcagcctcctgaatagctgggattacaggcatgtgccaccatgcccagctaatttttgtatttttagtagagatggggtttcaccatgttgtccaggctggtctggaactcctgacctcaggtgatccactcacctcggcctcccaaagtgctgggattagaggcgtgagccactgcgcccagccagaaacagtttttaatatacaaagtaagtaaataaagagtcttaggctttatatggctgcctgggagtcttccccagtttcttatcctttccccttggaaatctagtgcctctaagacttcacagtgttggtgatgttgagaagctgttgcctaagaaccattctcaggatgacccctttatatcattcaggtgtgagtgaaatggattttggacaagggctgggccaggcrcagcactgtgttctgacccgttacgaagaggtaaaccttgacaactggtatcctagaccttaaaaattaaaaattttcgtctgggtcttggttcactcctcattctattattctgtgttttggttttccttgatgaaatcaatctgtaaacacagctctgcactagtaaattttaatgaagccctcgacattacccaggtgggggaaattcagagctatctttaaacaatgtggtagttgcaggtacacacccaagaaggcagagaagggcatgagccttctctgtattctccaagggtcttgcatagtgttctgcccacagtgggtgcccagaaagtggctgttagaagaatggacttttaaaaaataatagactgataattaaactggcaaaggtatggaattcaragggtggctcagtgtggttttggatttgcccttggttcttcctcaagtttaattttcatggagatatcaattagatgcaggattagttgcaatgcagaatggcagagaggggaaaaggcagacgtcgtatgcattttaagttcttgggtacatctgttagttgtttattatttgccagtcactttgttagacaatcccaagagrttgacaaaccacttccttttgtgtccagggaaattgaggctgagaagtgcaacaattggtgtaaacttatgtagtgaagctattggcaggcttgctgaccagtagtcaagaaggattcatagagtgccgcctctctactggatcacacaggagttaaatttagctttgtgaaaaatattagaggtgatggagatcaactatacattgtcttggggtgtatagttgctttgtgacatttctgttacatggctatttggcctctgcttgcatctttccaaggacagggagctcactacttattgagtcagttcattttattttttgaattattttaattgttaaaattcttaattaattaatcatttttgagacagagtctcaccccgttgctcaggctggggtgcagtggcgtgatctcggctcactgcaacctccgcttcctgggttcaagtgattctcctgcctcagcctcccgagtagctggtattacaggcacctgccaccatgcctggctaatttttgtatttttttagtaaggacggggtttccccatgttagccaggctggtctcgaactcctgagctcaaatgatctgcccaccttggcatcccagagtgctgggattacaggcatgagcccctgtgtccggctaattgttaaaattctttcatatgagctgaaatcatcctgtaatacrgttttctcatttagaacccatgtcacactagtttttacaccccatgattcatttcgtcattcaaacgtatgtattgagcaccgactgttttaggttcaggaggaatacgagtaaacaagatagataaggtttttgccctcttggaatttagagcctggtgttagtacagtggaaagaagattgaactatatgtcagaaaacctaagtataagccaaagaattttacagaaagaaagaaaagaagaagtgaagattatataacacttataaacttggctaagacacttgagtatcagttttcacttcatttaacagaggacattatcccattggaccttccagaacagtgaaggctcgctggaataatgtaccttgaaaaatgttaattgctatgtattaccaagaggagtagtagtagctcttgcttctgtagagtagttcttaaagcatggttcttggaccaccagcatcagtatcacctggaaacttgtgcaaattctccagccccaccccagacctgctgattcagaaactcacagggtgggggccccaaaatcttttttacaagtaatccaggtgaattcgatgcctttcctagttggagaactactgctgtgggttagagcaataattctcagccttgcctgcacattggatgcgcctgagagaggggggcgctttcaraactatatctgttccccccaactcccctcaaaagttagatcaggatctgtggtggggcctgtgcagaggctgcccaggtgatctgcaggtgcgccaggtctgagaatgctgctgtggccacagggcccagcccggagggacaggggattaagataaggtgcggcagccttggagttacctgggttggtttgagtctgagctctgccccttcctggctctgtggcctttggcaagaggactctggcctgagtttccttatctgcgtagtaaggataaaaatgcccatctctcagggttgttgtgacagtcgatgagatgatgtatgcaagcctgcaagcatgtgtcaggcacagggttggtgaaggaggactgaacttattgatggtagctgtgggtatctgagggtgatggtgctcatctttccctgcarccctctttgctccatattaagcctctttagttcttccatccgggacataaattccagcccccctttttagaaaactccattttgtccgtttctctctttaaaaggtggtatccaattagacaatatctatcaaaattacaaagatamccactttatcctataattccactttgtggaatctgtcctacagatatacctgcatatgtgaaaaaagatgtatgtccatttctgacagcattgtttgtggtagcraaagactggaaaacctaaatgtccatcagtatagtgtcttcatgcaatcaaagactgtgcagccacagaaagaaatgaggcagctttttaagtactgacatgggactctgtagcatatattttttatgtgaaaaaataatgttaagctgtatggtatgctatcatttgtgcaaaaacaggacaggacatttgcttgtatgtgcatatactacacctggaagggtacaaaagcaatgggtaatgttggttgcttttgacttgggggtggaatagggacttttcactataaaccattgggtgtcttttaaaccatgtgactggaatctattaaaaacaatacattaaaagaagtgtggtgccctgagctgaatcctccacttgtggcctgaccacagcagggtacagtgtgagtattaccattttttctgtgaaccagatgctgtcctacttttaatgcctttgaagattgtattactctgggcaytgtgggctctgatgaaccttgtggtcaggatggcacccttctctgtttcccatgaatggttgccagggcaggtctcgtggacttcaggaagtttagacctgcccccagcccgtacttttgcacaatcggctttgtttttcgcccagaatgctgggctgttaaggtcatttgaatcttgattctggcatctatagcattagctcttcttcccagttttgtgccatctgaaggtttgataagcctgcccttcatgtctgtctctagtcaagtcattgttaaaaagacagtggacagtgtgtgcctaagaattgaaccctgcgtcattccaccagtaacccttctctagcttgtcatcaagtcattagtgatgccaatgtatacatttactcaccagatgtttattatgygcccattatgtgccaggcactatgccagtgccgaaggtataaaggagtaagacaactgtcctgcctggaaagagatcatcagcttgaaaagagatcatgattggcacactttttctctaaaggcctagatggtaaatattgtcagctttgcgggccatacattctctgttgtaactattcaactctgccattgtggcaccaaagtagccatagacaagatggagacaagtggcrtggctgttcctataaaactgcaaaaacaggtgacgggctgggttaggcctgtgggtgtgtttgctgacacctggtctagtagaaagacaagtaactcaatcaagtttaataagtgctctgagagcatatgcacagagcacaatggcggcccaaaggagggagtgatgtacggtcagtggggtagtaaccacctggctacatagacagtggtgcaagcagcttcactctgtttcactgtcttatctacaagtggatcataggaggtttttctagatgctttrctgaaatctaggtgcatgatatctttggcatctcacctgatctaccaacttggtaaccacaagagaaaaatcgattggttttggcatgcctttgtcattgtggacgcacattgccttttcccaacattcacatttttttcgaaatgttcccaaaccatttgttctataattttgccgggarccattattggtctgtagtsgtccaggcttatttatttgtagatatcaggatcacccactttcctgctttaaaattgagacattggcccatgtctcctactcttagaccccgaactttgtgtgattttgaagttgatcaatagcagttctaagaaacttttataatcagttaaatatgcackaaagaaattatatgttgtcraaagaaaagttggagccacatcaaaaagtggaaatcagccatggtcttgctgctccagtgttatccctgctaacattttggtgttgcttttgccaaatacatgagaaataatcaaagctcacaatcatatcgctctggaaggggtatggcttatagggggagcctgatgtgtaagctacttaaccttttagaggggcacaattcatgtgtgtttaagggatggtgaaggcatagaggagaagggtttgtttcacctgaacaagtggatgtctgggaaaggcacaatagaacaggtgacccttgataatcaagtagaagtagttgaaataaaacagaattgcatatgggctacggttacaaccatgtgctaaatgtattttttaaaaactgcagggaactgtcctaaaataatactgtggttggaatgttgatgaatgtggttttattttctctgggtttccaaatgggagtctattgcctcttataattatttttcttaatgcaacacatgcatgtccctgtcctcaggaactcagggctgcagagcttggctgcagtctgctgcagggtcagggagcttagagccgtgttccatgcaccsttgtctttttcattagtggtagctgaggatgaagtagagaatctaataattctctgatagcctagccctgggagtagtctagtcttgggcgtggaacctgaaagttttagacaaatcttggaatataactygaatacagtagtgcagattgcttctttgaaacccagtctgaataggtgagaccttgcttttccttgctgaagtattttacttagcaaagaattacttgcttttaaactgttcaagtgcaaaagcatgaggtaatggtttgagaggtaagtgacattatttagggcatagagaaaatgtttacacgtttatttctgacacacagatttcccatccccagcattcgttyccacctgccttatccacaggcagaagagagggcacccagaactgaggagggtctccagacattctgaagtcctgtctcactcctgtccacctctggggaaaggagaagtgtagttgttggattgcctagggtccagattttagtgctgcttcttaacttgctgtgtgactgtgggcaaagtcttggagctcagcttttcttctccaataaattgggatgataaaattggcctcagttgtaaggattgattgaaccagataatgtatgtaagcaccagcttaatgcctgacctataaacaggtacccaatacagcatggctgcttttactcattattactgttcgattgttagtgccagccttggaaatcggctcttgtgtgtcccctaagtggccatgcagaaagaactcttgccaagcattcattatcagtattttgcacccatatgaatgatctgcctcatggttctgaatattgacatgaagttggtgggcactagtgggatttgtggtccagcaacccaaaataatgttcagtgacatttctcttcagggattatttttcacaaaaggctttctataagattgctgaagggttgtgttcataaaatgtcaggtgctatgtgtgtgacggcattatgttgatgaaggcagtgttaaactgggaaacatgcatatgttaagtagggactcaagaaataagtatgggttgaatagaagaacaaaaggggaataatcagcaacaaggagaaggaaagggagaaaaggaggcacctttcggttgggccttgggaccctgtcagaacttctgcacccttcctgtctctctttaacctatagaaccacactggcacctggctctgagctttatgaggcctggaaaacttgtgttcttgaagttagtgatgtgtcttcatcctttttccagacacccccattttcacttttctaccactctgagattctactaagttccagattcagtcttattggtgaccagaaacaagataaaattagagaaggaagtccgggtgtggtggcttacacctgtaatcctagcactttgggaggccgaggcaaggggatcacttgagctcagcaattcaggaccagcctgggcaatgcatattgaaaccctgtctctgcaaaacatacaaaaattagctgggcatggtggcgggtgcctgtagtcccagctactcaggaggctgaggcaggaggatggcttgagccccagaggttgagctgcagtgagctgtgatcacgccactgcactccaacctgggtgacagagagtgagaccctgtctcacagaagaaaaaaaaattatgggaggaagctctgtcctcaatcaggaaggcctgaagggtgggaagataggcttataagttaagagagaatgccaagcatggtggctcacgcctgtcatcccagctactcgggaggctgaggcaggagaatcccttgaaccctggaggcagaggttgcagtgagccaagatcgcaccactgcactccagcctgggtgacagagcaagactccattaaaaaaaaaatgctaagagagaaaggaagatgaaagagttacttttgtcagcctcttaagatgaaaaaggatgacttagggctgacatgctcctcggttgcactgagctccaagctctctgtgtgccgttcacctctgcctgctggtaaatatcagctgtatctgaaggtgtggtatggcattcagtccctcttcattcttaacctatcatggccattggcgactgggaagacaaagggtcaggcaaagggggtaccttattagcactgaggtctggcatatagtaggtatttaataaacactcgtctgtctattttctggttcagaatccatctgtggtaattactttgaattcagggcatggatagaactggaaccattctttgtgtgtgtgttgcttttaaaatatatttgagcagtaggacagatggtattgagagtactgaagttaatatataaaaaaacactttaaacatctttttgtagaaatgtccattttagcaaatttcacagagagtaaaagtctgttggtttcagtttaactgccaactaccctttcccctaatttggaaaaccatagctagatctaatagattagattctcagtctttctgcattctcttaggcccccaggcatttatggccagattgtgggagcatgttgtgccctttgagtatgaatgcataacgcttcctttatttttaaataccttaaaattttaatttcataaagctgcattttactatttaatttgaaggggtttgctgaagtatatttaggcatttataagcttttcttttggagatggagtcttgctctgtcgcccaggctggagtgcagtggcgagatctcggcttactgcaacctctgccttccggttcaagcgattctcctgcctctgcctcccaagtagctagtagctgggactacaggcgtgcgccaccatgcccggctaatttttgtatttttagtagggatggggtttcaccatgttagccaggctggtctcaaactcctgacctcaggcaatccgcccacctcagcctcccaaagtgctgggattataggcctgagccaccatgcctggcctagaagctttttttttttttttttttttttttgagatggagtttcgttcttgttgcccaggctggagtgcaatggtgtgatccgggctcactgcaacctccacctcccgggttcaagcgattttcctgcctcagcctccsgagtagctgggattacaggcatgcaccaccatgcctggctaattttgtatgtagagatggggtttctccattttggtcaggctggtctcgaactcctgacctcaggggatcaacctgcctcggccttgcaaaatgctgggattacaggtgtgagccaccgtgcccagcctagaagctttttataagaagctggaaatgtcttcaaattctgtgtctggtatttatggtggtccacttaatatttgtcagtttgcttttctgattttgcaggagattgggtgctgacttagtacaattattttgtcaggttttgttgtgtttttggtgtttgatggttagagtggaattgcagaactcccttttgaaaggccttggtaagtagggggagaggagagcaggaccaaggctatgaggcagcttcaggttgggatgacttagcatggggctttctctttacactgttcccctttctgtatttttccttctccscctctttctttccctcatttctccccactttcctgctcctgaaatatttcatatacattgctggatttagtgcatctaggattatggtaaaaaagagggattttccttccttcctccactcctccccttctgctcttgcttaaaattcaggttttattttgacgaacattttacaaagtatctttggccatttcctccataccctgccatacatgtaaaagtcagtatgggttttgcagaktatagagctcaggagtcatataaaaatggatgtcagttcttttgtgactcctattttggttctggggtgtctgtgctcactcttagtggggacaagcaggaggtggtaacattcacaggtgctggtggcagcactggtctgtgtgctggaggggaccagcaggaggtggtgacatccacaggtgctggtggcaacacaggcctgtgtgctgctgaagcctggccagcaccaggcgccttggctccagctctgcccgttgctgattgcatttggctgttgggttttttggctttctgatgtgtcgtttgtatyggccatttagcctattctgtttcacagccttttcatcctaggaatcacacaacttgagcatttttgaccttgtaaggctttgtagaagagactgtaaattccagatcactctgtacagcagtgcaggggttgaagtgagggaagatctgttacttggacggatggccttggcctctgaaggcagtccctgcagttggtcttgggtgtatgttgaacacatcccagagggaggtggggctgcacagaagactgctgatgggtgtgagcccatggaagacttggagactgacacctgcttcttttgcagcatatggtattttttcagttctctgcaggagggagggaggtttagatatttaaatgtatggtaaacagtctcctttcccttattacttatctttgattcattccaagccagtttcagggggcctagtagaaaagtaagtgtcctctgtcattccttccctccctaccagaaagctcaaagtttccggctaacctccggtttgggtgagagattgctgagaggcagtgtggctgggtcctaggtaaaggccaggcagatgtggtttcatgataggttctaactggcacgtgtttttgtgtgctcaacagcatcctatctcttctcttaatggccatctagttcattctttaacattastggggaggaagcctccctggggcccagggaggtgaamtgacttactctgggtcacatagtagtagaagattccacactagaattgtatctcttttctgttttatatcatgttgcattgagtctccaaggtctgtrcatacttcacagactcttagagaaacttatacctaatatggtgatggatagctgaatatggctaagagcacacactttgcgatctgatttgggttctattaatagttctggctctgctacttattcactatgtgatcatgagtatgttcctggtctccctgagtctcagtttcttcatctgtagaaaggggaccataactacctcattaggttttgaggatcacccaggactattgcttggtacatrtagacactcagtacattgcagctggcagcattattttccataccttgctgtagagctccaaggtatagtgaggctgycagctgtggtgaggctggcatccctccactttgagactgaggtagggagaactgcagcacatctcagacctgcctggattcctgtgccattttgcttcattcagcacatgccctttgagcagcctggggcatgtgcacccattggaagaggatgcctttgggtttaataacttgtgcgtttaataatcagcctttttggctgagtgatatggcagcagcagattgattttattggggcagaaaaagagttgtgtgcttttccgggtagccctgagtcacagaccgccaatttgttatctgcacatatgtgcagtcagctgtgcacaacgtcctcttccctgcccagctgctctggtgtgattcattctacaaatatttgagtacctactgtgttccaggcacaggacaaagtaccaggggaagatacattgatgagcagaaacagacctgagccctgacttcatgggctttgtgaggttgtggggaaaacaggcattaagcaaatgagggtaacattataatcagtgtaaggctatgaagagcaagtacatggggctactgaagcaggtactagagagatttgacctaagctggaagtccaaggaaggttcccaaagaagcggcaagtgagctgaaggaaggccaaaggtgtgaggagtgggtgagggccggacccgactcttgtgccatcccctgagcccaacacccttccttcttttccttggtcctttaggaggcagttaatcctcttgcagtcagtcttgttataatttcagatgtattttatttcttttcaattgcataggtttcagggcaaaaatagaatatggcctctactttaggagttcaacaacaatgcagccacttgttgaatatcaactgtgtgcattttcattgaatcctctcaaccctggaaggtcagtattaggattcccaggcgaagaaactgaggctcggagaaaggctaagtaacttgggcttttgtctcmtgttggttactgattagaaagctgggattttaaccctatggcccattgccaaacactcttgtgtcctctgcctctccctctcagagacagctttgtggcttgacctggggatccaacaactatctccatgtcacgtccatgggaaaatgcaacctgagttccaaccctccaacttgaaaatgaacttttggcgcatggcctgtttgtcggttgagggctgttgtcttaattctgtgtcagagaggcattgaaaatccagaattaatggaagatggtcttggaaatagtcacttgaggtgagtgacaatggaccagatraaaagaaagtcaatttcacccctgttgtggccagtatacctgtggagcgtggggaaragaaatgggtgtgggctggtaacttttaattatttagagttaagtctctaatttttgtgcgcttttttaatgagtgggctctgggtaggggtaatctatgctagttacttcatctatctgagcctcaatctcctctgtaaaatgggataatgcagcttatctacttcagcactgctgtgagattcaaatgaactacagagccttaggattagaagagggtatcaacatttgatatattatcaaatgtattaagataatacacttgaaagtgttttgtaggcctgtgtatatgatgctacttttgttgatctaccaccgtggttcatgttattattaatagcacaacacactggttcttaaacttgagctggatcagaatgacctggaaggcttgttaagacacagattgctgggtccctcccccagaatttctgattcagaagctctagggtggggccagaggatttttatttctaacaggttcccaggcaatgctgctgggctggtgaccacacctgaagaactacactacccagatctggagccaccaggcccagctggtgcctcagacctagacagtgacaggtaaaacccactgaccttggtggggggtgggtgtggatgtcaattcagggctatcgtgtggccagacagagctgagttggcattggcgaccctaggtcagggactktgatgtctggagtagggtggaggcagctactctgctctcttgggtccctgaggacttaatatggccgctggcagtcaccatttctcggggctatggtktatggtgcagaaggtacctctctcatagggtgcgttaggccaaatttggatagacctatccacactggtgaactccttcattcttgaggctaactcagctccatccaagctcaagcacccttgggcttctgtaaagaaatcatcttctttctaatgattttccaagggtgcagtaaagggagcagccgcattaattctggrgctgggtggctgatcctgtctcatatcctgtccctcatcctaagagatttcctacttcctgctccagccacactccttcctgccccccagcccgtgtgtgatttctgcttaaatctctttcttagttgagatagacaactttttaaaaaattaccccccatttcagwatagggcaggctggagcaggctagcagcagtttttgtatttttgggatcatattgagtgggatcattaaagtcaccccgagaaatggtgactgccagtggccatattaagtcctgagggacccaagggagcagagtagctgcctccaccctactccagacatcacagtccctgacctagggtcgccaatgccaactcagctctgtctggccacacgatagccctgaaktgacatccacacccaccctccaccaaggtcagtgggttttacctgtcatattgagtggcttgctaaagatgcagattccctggctatcccctcaaaggttttaatttctcaggtctggagagatcgcagaaattctgatgcaggggtctgagaaacatacttagggagataatccaagagaattggacctgcttttcagtctgctgacaagtggataccactttactccagctacccagtgcccacgagcccctgcttggacatctgtcctctttagagtctgtgcctgaaagcctatgccccatatttgagagatgaagctgtagtgtgggaggggagtggggcttgcttaatggttgccttcttggttagccagcttcagagtttccattatggcctgtaaagaggtctttttacctgcagtgtcttccatcgatattctgcctcatatacactctacttctgcctcaaggcccagtatgaatctgaagtcgaagtgacttttgtagcccatacttggttcctgctcacaacttctctatgaatgatgatgggtcttctggtttttcttttgccttgtatggctgtctgattagcttccattgggctgattttatctctgaaattatattgtaagcatcatgaaggttgtggggtctgcawggtgttgggcatacagttatcgatgattatggataacttggttcaccgtgatgtttctggggtggagtgaccactgtttgatacctggtttgacagatatcaaaaccatggcaataagggtctagaattggcttgatctccacagtatctcttagatgcaaagatgttttaggtatagggctttgagtatcagtgccatcaaatagtacttccagggggaaccccagacaagtctgggtcctaagtgaaaccagaggttttagccagaaataaaccagcatcaggaagggagctggtcaaacactgttccactgcatcagtgggtggcagaggttgctggcaggacagagttagctggcatcagtcatggcagaagatgactcataaggctagttgaatgtgtgtgtatgagtttgtgtgtgtcagagacagagagaaaaaagattcttacttcaaacggcattcttcctgtgtctcccgaggatgtattttttcccctcagatgtttctttttttctacataatagtcaatgttcaagattgtgtaaaaaaaaaaaattaggaaataatccaagaacccaatattcaaaagggcctgggcagactgtcagcattttgtcaatggctctttctagcctgggttgcttgtgtggtagcatgccagatctatccaacaagattgccacttgctttgcctgttctttgctctcagtctaaataacttctcaattcattctagtcctttwaaattttcatggcttgctgcatttcgttagctcacttaaaatgagaacatggaatcaatacagtacaaccacagacccaaagatggttagacttaaaagagtcctttctagatggtcccatgtggccmasggagatcttaagctccttggtgtaaaggtcctcagcccaggtgtcccatgtctggtgaatttaattttcttctttcagccctgcacctgccatccttgcaatcctgctttccctctgttcttccctcagccaaactgatgtgtggtctatagagagaaataggtttctcaggcctgaggtagctggaaccatttaagtacaaggaatccagtgtggaaaggggtgttgttcagattgcatttaaaaatgggttgggaataacactggctgtgaaaacattatcaaaaatctgcaaaatcaacactctttcttcctggtaaacatgaagggctcggcagctgcacctccctcacgtgtgtttggccaactgctgcttgggacattgtgcctccctcagcggctcatgggtgctgattggagccagattggctctttgctggatcraaaggtgtctcaatgctctgaaatgccataccagtcaagggtgcagttgaacttaacggtagcgtatacccgtccatctgggttacatgcgccccacatccctgttgaggtttcactgcgtcaagacccagggcaggcagaactgaccctcctgcttaggcaaaggtgacttatgggtgatttctttccatcagaatcctcaccctctcagtcaccgcataaccttatacaagagaatttgtttatttcggagaatcagcccacacacaggtttgaagcaagtccaaaaggracatttgccactgtgtgaaacttgtctcatcttgctgctcttcgatgagaactggtccactacttcgccctgacccccgaagttgccaatatcatttgtggaaatcttactgtttggaaatktactggtttcccmgaacaggagctatttgcctgagtttcttttagagaaagctgaactgcctttttggcactccttgtcttccttttttttttttycccatgtatcttcataagtagatggcttggaaatagttaccaagaagaatacagctgtgtactccagtctaatttcctggagcgtgagccatgtcaaagggctcggattctgtttttgacatggactcagggatgtgctgcagatacagtagcaggtgggctgatttcaggggagcatctaaccggaaaagcatctaaccaggaacctgtggctgaaattggatgtgggggctggatgataaggctacaggtagatgcagtgttggctgaattattagatcagatttacatcctcgattcagaaagcttcttatggtacttagaattgtgcctggacctgcctggacctgtcctggtcttttttttttttttttttttttttgagacagtctcggttggttgcccaggctggagagcagtggtacaatgtcggctcactgcaacttccgcctcctgggttcaagcaattcttgggccttcagcctcccaagtagctgggactacatgtatgcgccaccatgcctggctaatttttgtacttttagtagagatggggttttgctctgttggccaggctggtctcgaactcctgatctcaagtaatctgcctgctttggcctcctaaagtgctgcgattacgagcgtgagccaccacgcctggctgtggtcatttttgatcagacgctggagctctggagggcagccctgtgaagtgggcagatctctcagagctgggagagagagcttacacttcaaagagtgatcagcacctaacagctcttttaacatgtgtctagcatctaggttacaaaaaaatcctgtatgtgtaggatgggggtgacctgatttttaaagaagcccttgtgaagaaagacccattttggatgaccagaaaaaggagaaggcccttcttagagggctggaggaagaggtggttctttagcagcatgctctgatagctttgggtttgtcttctggggcagttgactctcctgaatggggtgatgctgggctggtacctcaggagcagagtaagttggctctgacactagccctcttcctactagccgtctctcctctagaaaactaccctctccctgatgcaaggcctcttccatgtctatactggcttctccaggcaggagctagggcttttctcatttctgagagtttccaactcagtcccaaaggctgcaactgcctttgatgttgagaaacgacaacgacaaaaacaagcaagaaacaaggcagcaacataggctttaggagacagacgtatcaacaggctgggygtggtgactcatgcctgtaattcctgcactttgggaagccaagatgggaggatcgattaaggccaggagttcgagaccagcttgggcaacatagtatgacccccatctctgcaaaaataaaagtagaattagctgggtgtagtggtgcatgcctgtagttggagttacttgggaggctgaggtgggagcatggagcatcccttgagcctggggtgttgaggctgcagcaaatcatgatcttaccgctgcacytcagcctgagcaacagcatgagatcctgttgctcaggaaaagaaaaagaaaagttataaacagaaggctttgtatttcagtttataacttaaaaataaggagcayttaattcgattctgcaaatgtggagtaataagaatgtgatcttagttccacattgcatcaggttacaggtggcacagaaaagatacaggtgtgagagcggaataaaacaggaagttggggtggagaggaaagctagtgacaagtagggttgtagggagaaggagaragcaaagacagrcttgcatggaacgagataaatgtgcatgagcaggcttgtgagcagagttagaaaacagcacaatttgaggtggaaccagtttgtagtaaggatcttctcttaatgctgtaatttatgtccagaaattctgaaaaattacatcttcgctttcatttttttttccactttaaaaataaatttttgacagagtctcactgtgttgtccaggctggtctcaaattcctaggctcaagtgatcctccccagtagctgagactataggtgtgagccaccatgcctggtaataccttcactttccaaaaacttttgacaacctgacatacctacctgtccttttagaatgaacgcttgatactgactgatggtactgtaagaagcaaagaccctatttatttaataatcttcaaaataaaatgctttttctcaggacttcaagaccagcctggccaacatggtgaaatcctgtctctactaaaaatacaaaaattagctgggcatggtggcaggtgcctgttatcccagctactttggaggctgaggcaggagaatcacttgaacctgggaggtggaggttgcagtgaactgagattgcaccactgcactctagcctgggagggagagtgagaatctgtctcaaaaaaaaaaaagctttttctcccccagacaaaaaccttattgtctttagatgagcccaaagagttaaagaaaattgtctgtattgatacatgaatatacatatatgcatacataaaaagagaaaaggaaatactttcatatcatccagcagtttttttctgggtkgtaattttatgactattttttctttttttggtggggggaagggtgagttattttctatctttttaaaaacagtgaacagtattactttaatcagaaaaggagttattaagatatagtgctctggttgaaacatatggataaacaatatttaaatacagtattattatttacctaaagtgttatttactttttatagcttaagtttggaaatgcatgcatttagtgtatattagcccttcccctgctttcttctagcttttaaaatttgtaatttttaccaragttacacaggcatagagtttcaagaatccaatatttctacatgactgcagtctccgacaccgtcaccgttagcyccctgctgccccggtggcagccactttaaaatcttagctgattcttttgatatttacttccacatttgatagtaacctgtatgttttactaccttttggacatcatctgttaacttatcaccatgtaagatgaagatttggttctcttttcctttcccttctcatccttgtttttttttttttttcttcttttttttgaggaagaaaaatcctgtcttctctgaaaatcttgggtgtcaggccttatccgagagggacaaggtttccttatttggaataatatgtgcattctttggccttttgtgattttgccaataagacttttaaagtctgctccaaaactctaagttattggcttgaactgggccatgtgttgctatgagctctgtagaccaaataaaaccaggggattgtcagaatctggattgaatttaaggcatctcctggaggttgttttttggaccaaattacagattaccaattattttatcctttgctttggtcataaaagtaagagtgtagagaaaatatacaaccctagttcattgtttgctggcctctggaaaacttggggcaagggggcggtcctagaaggtaccttccttgagctctcagtttcaggaaactctcaaaagacggcttctgttcatatttggtgatgtacagggtttgtgaggcagtgtgtgggggacccagctggatttgtataaagtcccaagaagtgctccttttccagaagggctgctacaatccaatctcaggaacgtggactgttatctgagttctgacagtttcactttgttcccagggccacccccagtcacctccaaattctttgtataattccagaggccattcctctgggcttatcctgcttcctccacgctggtgaataactcccacctcctgccctttgtctctctatttatggcccttctgagttctggagaagacttcactgggacttacgtcagtgagcttaacatctttctcattaatgaggaatgagagagaaggcaacaggacaatgcccccatggcttccactgtaagaaagttgaagactgtgaatcttaaagttattagagcagttggaagccacacggttttaacagttctacttgtgtacctctggcaatgaggaactcactctctaggagccactctttccattgttggatagctcttctcattggaaagctctttcccgctgatctgacattcgtgtctggaactttcatccatttcagaggataggagcattcttgacggtacagtttgtccaaccagtcaacacattactcttccttttgttctgacataagtggtataaaatgaggtaatagatgcattttgraaaaagtaatggcaytatacaaaygcaagaaatgttattgataggcttttatggcttagatgartctgacttgaactttcagcatcatatactccattagtcgagaacattgcagtgaccttttttaggaagcagtttcctggagatttaatcagtgtagaaaaataccatattcagcctttattccacaaaagtgtcaaatatttacatgtctgaatagtctgggctgggtgtgccggctcacacctgtaatctcagcactttgggaggctgaggtatgaggattgcttgagcccaggagttcaagaccagcttgggcaaaatgttgagatcccatctctacaaaatactaaaaaaattagctgggcgtggtgttgcacccagaagtttgaggctgcagtgagctgtgatcatgccactgcactccagcctgggcgacagggtgtgactctgtctcaaaaaaaaaaaaaaaaaaaaagtctgggccactactcttttggcttagatgccctttaatttcttcctttcgctttccttttttttttttttttttgatagagtctcgctctgtcacccaggctggagtgcagtggtatgatcttggctcattgcaacctctgcctccttgactcaagtgattcttctacctcagcctcccgagtagctgggattacaggcaygtgccaccacacctagctaatttttgtatttttagtagagatggggtttcgccatgttggccaggctgctcgaacttctgatctcaggtgatccgccctccttgacctcccaaagtgctgcaattacaggcgtgagccaccgtgcctggctgccctttaatttctatgtgtcccgttttgtttttcacatatctccctctatgtgatcatgtgtgtgtgtttagttttaaaattctgtttttttgagagaagaaagatattgagagctaactctgatacctttaaaaatgaaattctgaagttgaagattaaattacttatacattttattaattgatatcttccaggaggaaaatatcgtgttttgtgcaagggaagatcaggctctttttgatgaagggatagcagaatggttaagaacaggctttctgagtggtggcggctctgtaatcccagggcctacccatccctcacctctaagtgcctgtattccttcccaagtcctcacccacctgtgactagatatggttagggaggaggaccagttttgtaaataccagaacaagtatcttctaactgtatttgagtcttgataaagatgagtctaacacgcagctgttggcggggagcagtggctcacgcctgtaatcccagttctttgggaggctgaggtgggcagatcacctgaggtcaggagttcgagaccagcctggccaacatggtgaaaccccgtctctactaaaaatataaaaattagctgggcctggtggtgtgtgcctgtaatccgagctacttgggaggctgaggcaggagaatcgcttgaacccgggaggtggaggttgcagtgagccaagatcatgccattgcactccagcctgggcgacagagggagactccatctcaaaacaacaacaaaaaaaccatgcagctgttacacgttctcccacctgccctaggatttctcttaccttcgccctcaaacgctttctctttggaaaartcacttgggtgcagtttgttgaaactggtcagcaaattattcttcccatagctctggcataagtctcattagaaatggttttatgaagcaaccgtaaaaggagctggttttctcagtatttaagaaaactcttgttttctaagtactgagtgtattgccagaggttcagttttgtttttcttactatgattttgatttatttgagtctgatagaatggtatcagtgacatgaggaataattacagcatcttttgaaattctatcctggaaccccaccaggaaccgacccagattggtgccaaggtacacataataggttttaggttttaaaaaatacttgttggaaatgctaggctttttgatacttaaagagcattgttttagtgggtggagttcttttttgatcctctaagtttaaacttcttagttcaggggtggccagtgaccatcctgtgttgtgagagtttaagaggcctctgagaggcaagacctgcatttgtatgtgtgtgtgtgtgtgtatgtgtgtgcacatgtgcacatacacactcacatttgtacttcttcattttgccaacaagttttaagcttttctggactttctgcttttactgaatcttcagagatgcttgctatcttaggaaatttagtgtgatattaagtctttaaataaagataaaaataatttgctttaaaccaagaaaaagagacagagagagagagagattggcagcaataaatcaacatgttaacattggtggacagattcttgtgttttctttgagacttcctttgttttctcagctttctatgattaacatgtattacttttatattagagaaaatgatttgtaaaaaagcatggttgctttggaattcattctcagtctgccgatgggataacaaggtagagaatacaggagggatgacagattggagcttagggacgtcaggagccagggctgccatgggaactgttgttcccagcctttttgtcatcagagacgccctcttttgtttttatacttatttatttttcttctaaataccccttgctctgaaaaatttcatcaaacccaacaccatgtttattaagtaataatatatttccccactcttgatcaattgaagatagacttaactgcctattagagttacccgagtcttaatggagttgatactgttccagctgagagtaaagatgtgtggtatttgaattgactcttatrttagacattcatctatgtcctccacattcatttctacctgagtggaattttctggctgtggacccaaggctgaggctctgcagttagagctcttctgtgttttggacccaggatccctgtattccttctgacactggaggcaagaaataggcatttctgtggctgggaaatgtctcctccaaccctttttggtcctaatctaaatgagaaaggagagagccaaatcccccaactccagcatccacgtatgggaataagcccactcccacggagtcccgcagaacgtgggaggaggagcttctggcaccgtttcccagccctgcattccagttttctggtcaccttttctgaacctcctgcggaggaactgtgaaaacaaagaatggtaaccatacaaggaagcaatccaactcaaacataataaaaattaatttaaaatattagtggatctcttgttgaacaccaaagggagggaattaaattattaatgcctaggaaaataactttaaaatcctttctccttctctaccacttggtatcctgtacacgacggcagctgctcctctagaaactcccttttacttttcatctcctcactctccccagccctccaggagtagtggggcatagaaagcctcccatccctttcatctggacaggtaaggaagctagaggggacacttctcttcttagaggatgacctcagttccattccaaggatagggtgtagaacaagagttcttagtttttattggaacatggacccctttgagactctgatgaaagctttggacactttttccagaaaaattatatgataataactaacatttatgttgtagacattgtgctaagcacgtaggtgtattactcttgatgctcatcacaaccctgtgaggtgtaggcactgttatctctgttctgcagatgggaacactgagccactgagatgttaaaagatttgtccggggatacacgtataaaaagtggtggagtctttgcatatagttttagttggcactcaggttaagatcttcagctctagattatgagccaccaactgcaatcacttgaagacagatgtctgcacatgtaacagggtagcgggtggatactaacccccagggctggtgaccaacctgcttgtcagggtggtaaaggaagggaaaggctgctcttggctccccttttgcagagtcctcccccgtcctcttgcaccaattaggtgagtctgtgtgtgggtttctaagtgtctatgctttgcagtgatcccacacagttatctaattggcatttaatgtgagctgggaagacagacaatctgggcttctctcttggttttgctaccaccaaactgtgacttggggagtcattcagaccctgtgcgctcatctgcagaccagggagaatgaactctggacttcactaggattgggagggtcttgctacagtgagaggaagtcactgcccttaatttgtctttctgtggcccataagtgaatggcctgctatagtgtgcaygtctttctgttattaagattaggggtcccagaaactggcctgtgactgctgaccacacttgacacctgcagtttttggagttgcagtgaatgttttcttagagctccaatccgtgatcagtaataattaagattttgtaatagctgtactccctcttctgtctgcccttcttcccacccatttggccatgacccccatggcaggtatccttaaaatcacagagctgtgaaacggcagtgctggaaaggaacttgatcacctatggccagccatgccattgtgcagaaatggaaataggctcagagaggttcagaaacttgcccaaggccacacagctaatccatgggagtagaggctgggtcatattcatcatagtttctctgttttagtcctcactgcctcccaaacttcctcagtgcatggagagtgacagaacgaactatttgtacaagcagagctattttagaagttcttcatggtgctaggcccacagttcctcatattcaggtaattgttaacttctcccagcaccaagatgaatctctgctatagacagagacctgggaaatacccctctctatttactgcgttatcccaggtaatgtagagatggatatagccaggcagtgtgttgagaaacttttggaggtagggtggtgtggtttattaatggctgtgctggggttctgtctgcagcagaggtttaacttggatataaagagcatcttttctgaagctgggcccagctgatctgagtggtgacatttagcactactaggcattagcttccagcatcyaccacctcttgccacatgccactgtgagtgttcatggactttctcctcttctctctgcaaaagagaattctattgtctattactcaactttcctagtaacactaccttctaaggagaagtttctcttggttagtttagtgcctgggcctttttcatatggagtcagggcaatgagtagaggctgaattagagaactaggaagtagggatggtcagagtgtttgtgtgtgtgtgtgtgtttgtgtgtgtatgtgtatgtgtgtaagcacctactggcatctgaaagggccaatacttgtaggtgagaagagagaatggaggccaaaggagaggaggagggagaggcaagaagtgtttatcagcacaggagatgaaaagtaaaaggaagtttccagaggagctgtctgtgtttaggatatcaagtggyagagaaggagaaaggattttgaagatactttcctgtgcattgggattttgaagatactttcctgtgcattaataatttaattccctccttttggtgctccacaagagatcccctaacattttaagttaatttttattatgtttgagttggattgcttgcttgtatggccaccaagtggacactgggctacatggagacccagtaatgttcaggcgacactggtctgttctatctggggcatagaacagaggatggtgaggcagtagaatgtgagaagcacactctggaaggtgagtgatgggggaaatgctctgtggcagggggcctggggctgatctgctggagtcagcatgtgcttggtgttacttcattctgcacaaatcccagatcattttcctgtgttaaaaataaagaaatatgtcagagttctcagattcagtgcttatttacttcataccctatcttcaaaaataatttgaggcagtttgaatttagtggggaaatgtggcaattcattcagactgtattttttccataaatagaaaggaaatttgcgttgagaaggaagaagaggttgagtttctaggccacattttactgacagaaatattattggggaaggatattttaatttttgttctccaagaaattgctcttttgtactgctttgaggtggaggtggtttagcacagagaggatttttaaaccaagggaaggagcagtgactgtttggcttagataaagagagtgctttcttctgtctgtgcctcctggagtcgaatcgatctgtgtgagctgcctgtccaacattcacgttcagtgagatgacttctttgagtggctaaaggccccagaacaaacagcctgctgggacttgcaggtctgtgcatggagcttcttcctgtcggctcctagaagggcagagcaatgcttctgcggaagagtaacatccagaagactgacactcagaatgttcaggcaagagtaccagtcaaaggcagaaaaaaagacccgcctggtactgctggtaagtaaataagcatcgcagtcttatttacttattatttgtttatttttttagagacagggtcatgcaatactgcccaggctggagtgcagtggctgttcacaggtgcgatcatagcacattgcagccttgaactcttggcctcaagccattctcctgcctcagcctcccgaggagctgggactacagacccacaccaccatgcctggcttcagcaaggtctttttagcccagtggccaagctgttggttaccttgaaattgtccatattttttgactaccttaaggggccttgtgtgagggcagaaaatatcagctgccttctgatgtttgaagcagtgcccagggcagatggtgattccctgcctaggtttgaaagatctcaggaaagcagccatttgctgggaaaaggcctgtgaccagttcctggtgtctcaacaaggtgggtcacacctgccttgttgaggctggtctttctgactggctggggaggtccccagggagtcttgccgatattggtcacaatttctcagctgtgtcagtgtttctcaaagtgacttctagaccccaggcatcaggatgttctgagatgcttgtgggaaatgtgtatacctggacccataccaggtggacagagtctgaatctctgggagatttgggcttcccaggtgattccttttaccctgtagatggagaaccactgtcctacttgctgccactgtgcagaactggacgttgtggttagtaaatttgaagccagatgatctagactcaaattttgtgtccttaaggaaggcggggaaggaagaagggccggcagtgtgcaggtgttgagtaccagctgggagaagatgcgtggttagtgcttccagctctcttcttttatgtgcgctcagcagcagcccagggtgtggatgttatgcctgtgtacaggggaggaaactgaacatcagagattgagaactcgtttaacatcayagagttggcaggtggaaaccagcatggccagccttcttgcgtttttagttatgactgtaatccccactctagaatgatgagtgtctccttgagtctggctgtgcagtagaaatatgatatgagctacaaaggtaatttaagactttctagtagccacgttaaaaaagtagaaacagacaaaattaattttaacaacactttttttctaacccagtatatccaaaatattatcatttccatatgtaattgcataaaaaaactctcagatattttacattcttttttaaaattctgagtcttcaaaatccaatgygtrcatgactcttacagcacatctcaagtcacactaaccatatttcaagggctcagttgccacctgtggctagtggctggagacgtatgtcctaccctgctgtccaggtagccaggggtcagagttttctagatcactgatttccaggcaccccaggatggattcatgctgggcagactgcatgggtgtcacctgaggagaggatattaaaattcctccatcaggctggagccccaggtgatctttttgtgtaacctggttggaaatggctatgctaaaaacattcactggcaatttacttgggttgtctgtgactatgcccgcccccttttcagggacagttgcattccaagcacgttctccgggagtgggtggggtggtggggtggtaagaaaggtgggggaacgcacaccctaagggtcttttccctgccttactaaatagaactatagtttcagtggagaaaagaaatcccgcttatttttctggttgtgatcttgcataaggggtggaacctttccttttgatggctgagagcgggatcctgtgttctcaggaaaggtgagatgaaagaaccaacatacttaggggagaatgagatgttgtgtacttaagctgtgttcttttccagtggtttgattttaaagtttatttgctgacatmgtamgaaatttggtccaaaagagagtcygggagtctaaacctcaaatgcttcagaggtcaggcaggtagcacgagatgaagggtaagagattgaagaccaaactgttaggaatgttctccgcactcacaaaaatgttgtggtcttccttttttctggaaacataagactcttgacctttcattttcctgtttttgatagataaatatttatcttttgtaagagaaaaaccagtgcatgcaactgggatcaatggcagccaacactcagctttggcgttagggagatgaatcggagagccttggccatttacagggcagcagctactacccggctccatccagttgttatccttgaggccctgtgttgccagatcctgttatttttaaagagaagccacattttgaaattataaaatgtttggctttataaatgttattgtaatttaaaaatcattacaaggccgggcatggtggctcgtgcctgtaatcccagcactttgggggctgaagctggcagatcacttgaggtcagaagttcgagaccagcctagccaacatggtgaaaatgtatctctactaaaaatacaaaaattggctgggcgtggtggtggacgcctgtaatcccagctaggggaggccgaggcaggagaatcacttgaacccaggaggtggaggttgcagtgagccaagattatggcactgtgctctagcctgggcgacagagccagactccgtctaaaaaaaaaaacaaaacaaaaaaaaaaacattatagactcacaggaagtggcaacaaatggtacagagggatcctgtgtgcccttcaccccacttccccagtgttaatattttatgtaggtatagtatgacatcaaaaccaggaaattgacaatgctacagtcttattcagatatcatttgtgttatakgtactcatttgtgtgtgtgcacatgtgtatgtagtcctgtgcagatttgtataatgaccaccataatcaagaaaacctttgaggctggrcgctatggctcatgcctgtaatctcagcactttgggaggctgaggcaggaggatcgcttgagcctaggagcttgaaaccagcctgggcaacataatgagacctcatygctataaaaaaaaataattaaaaagaaaatctttggcttttgaattgtttgtgcaaatataacattgaaaactttgtttaggtctaaagaacatgccataggcctggtgtggcccgttgacctccaattttcaacctctgttctagtctagccctttctttctttcttttattcagataaatttcacatgacacaaaattcattgttttaaccatttaagtagacagtttttttaagtatattcacaaaggtttgcaaccatcactactaattccagaacatttttgtcaccccaaaaagaagctccatttagcattttcaccccattcccctctacccccttttcctgacaacaaacaatctactttctgtctctatggatttatctattctggacatttcatgtaaatggaatcatacagtatgtgaccattcgtgtctgattgggccttttatcttacagaggaagaaacttagggccagagaaggaaggtaacatgcccataattatgctgctggcaactgccctagtctggacttgaacccagaaccagtactctttgtaccatacctttctgcctgttagcattcaggtcttcagttttatgatgatggtgataaaactaccaccccagctatttcttatcagttggcttaagtaagcatgcgtaataacagaatgtttctcttacttgtactgagtattaacattatgcaaagagtcactttggaaatgggaattgtcaccgagaaaacaaggtagtttagttcagtgtatgtttattgagtgcctactatgtgccaggctctgggccaacagggatgaattgaatgggtcccagccatcaaggggcagtcatttgggggaaacaaagagattaaagataatttccagatgttgagggcaaatatgactgtggggcagagggaaagggtatcagttctagcctgggggtggggtggtggtgatggtgagggatgatttaaggggtggaaggaagctaacaggtaacgaggcagcagaaagatgttttaagcagtagagacctgagcaaaggtttaggcatgatggatccagagagttgaaccgtgagctcattggtggtgatggagggcgaagtggggtattggagatatggttcgaggggtgggcttgggtcagattcttgagggtcttgacgtcataaaaagtcagacacggctatggatgtctgaatttttcaagctgaggatggctgaatggaggcagagtaagagaagccaaacatgggaactgggtttcctgggaaatacccaggtctgaacaattggggtggagtcaggggtatatggtggtggaaccagtatctaagtagcaacagacttgagaagaatcaaggcaagagaaaccaagagacccattctagaggccatgatgaagtcctgcccaygcttcatgccatgatgaagatgccatggggcatctttaaagggctctcagccctgttcccactggcctgcctcctcctccttgtttacccgcccacccactcagcaacgttttactgagtacttgctatgtgttgtgttgctgggggtaccgcagtaaacaagttgggcaagattcttaccccctaaagggaaatacagataaataagataattacagattgtgagagggtctacaaggaaagcagcttttgctggtgagagtaaggttagggagtctgggctggccccrgtgaaaaagcatatttgatctgagctctcaaaagtgagtgctctctttccgtggtgagaaaaagggaaagagctttgcaggcagagagaacagcaaatgcaaagactggggaaggaccctctggcatgggttaccctgggctttgtcgagattttttcagggggtctcaaatcagatagagcaggtttctggagatctggccctacactgtcttagggaggggaggagagagaaccattagctttgggaggaagaatacatatcctagtggaggaaaaattgtgaagtcattgtgaatcattgaaagtaggcatgctttctttttttccttttttttgaagggagagctaaactcattttgttattttcaactaattttgttatactttatgagctttgtgtcattcagagaacttggaaacattcattctccctcctactgaatcagtggagtaggtggaagagctttaaaaagctcttgaggattcatcttcctttgccaatggatgcaggaggaggacagctgggcaatgggaacacagccaagaggtgtttgggaagtgggagcgacctcatcattgagcacccaggaagcttcagtggggttcaggtcctagagatgttggcaccagttatggccccagtgggttttgttatggaaaagagagaagtctttttcaaagtcagaaaagggattcattttgcatattagaacttcatcttaaataaaataatgcagtgtgatttaaaaaaacactgcccatggtggggcacggtggctcacgcttgtaatcccagcactttgggaggccgaggcaggcggatcacgaggtcaagagttcgagaccagcctggccaacatggtgaaaccccgtctctactaaaaatacaaaaattagccgggcatggtggtgcatgcttgtagtcccagctacttaggaggctgaggcaggaggatcgcttgaacctggaaggcggaggttgctctgagccaagatcatgccattgcactccagcctgggcgacagagtgagactctgtttcaaaaaaaacaaaaacaaaaaaacactgcccaaacatgaaatagataacttctgatttgtttccttcccaaactggtcagcctcagggccagttgggcattttctcccctggactgcctgtgtttgttgatggaagagttggaatttgtggagggagaaggagaagagagtatgtcgtgagctcggaaagcagcttgggccttggatctggaacaaggagagagggaccaagtctgagctgagtggcatgaaatttgaggtgtattttgaaggaaaccagagggctccaaggtactatattgggatacagtgagccatcaaacaaagaccccttaaaattttaaaacaacagcagtaacaaagcaaagcagaaatgattatatggatccctgtccatatataggttagtgggacaacaatgtgaaaatataagtgattcatgctaggaaggagagatacatggggctttgagaacttgtaacaggagagcccagagtggtccagagtgggtcgggtggcctggattgatgtttggtaggaatgagggtggcagaggtgactttcacaatggttggtattgatctgtattcttgggatgggggatgaattagggagtgatggtttgaggtctttggcagggcctgggacaactcttgtgaagtcttttggggggttgggacagagaaatgtcttgttttaggccagaatataacagtactgtagggaaaattagtgaatcttttaaaaattgaggaccaccaccgggtgcggtggctcatgcctgtaatcccagcacttggggaggccgaggcgggtggattacgagatcaggagattgagaccatcctggctaacatggtgaaaccccgtctctaccaaaaatataaaaaattggctgggcatggcgacaggcgcctgtagtcccagctactcaggaggctgaggcaggagaatggcgtgaacctgggaggtggagcttgcagtgagccgagatcatgccactgcactccagcctgggtgacagagcaagactccttctcaaaataaataaataaacaaataaataaataaataaataaacaaacaaataaataaataaataaaaataaaaattgaggaccaccaagagggggcaaattatgatcttgagcttttcctaaacttcctcctccaccatgctcttccaagtttgcattatggctcacatggaggatccttaggttgatggggacacctgcctgtttccttgttccttggaaggatagtatggattgctgctgggccttgcaatcagaaaggctgaccttagtcagctgtgggtttctctggtgctggctgcctgaaggtcacctagtggcaccttgtaatattgggggaagagatttctgcaggctggtgcattcagggagccrgtttactccgatccgtctgtcatctttgcggtacacggcatttactttgccagtcttagcttgagattgctcaggtcgttacatgaccacaaagtggagatctggaaagagaggtgctcagccaggcttggcaggtttgcaggcgctgcattgaccggtagagtcctgcgctttggtgggcaggaaggacctgatcagagtgctctgtgccttggagctattcctcgaaggccacctgaatgactggatgctcccacatcctttcttctgccagagcagtgaacccacacaggtgtatgaaggctcagatctgctgctgagattggacacccccaatcgtttaccaagaggcactgacattgggccatggtatacaagggatgggggcaaagaggaaggccacttcacttacccatttgctattctggctgctggcattccttttttttttttttttttttttttacatttatttaaaagaagttgtggttgtcatagtgtgatgcagagagtgggtaaacataccagggatgtgctactccyctaaagatctggatccttggctctttcctggaggatgctgaattcatgtccttgaagaggttttggagcttctgagacctctgggtgaaatacactcttttcatattggacatcgcaatcacctgtgaggaggttctggacagtgcttggacctctaaaccatagattttgatttaatggctgtggtacatagggggttattttgttgctgtagttctgcaggtgtttctaattttcagccatactcgggaacctgcccactagttactgattcagggaagctcttccgattcttcaggtgaattctgcctgtttgtttcctcatacgggccttgaaccggaaccctacccttgaccacgtgtttggtctttactcctctgtgtgctgctttccagcctgtgttttggagtgcttttccccggctttgcctcagcctagatcagggctggtgactcacttctttcttatctatgaagaaaaggagaactccatgtggggattttgatgggcagatattctggaacatttttcacaaggcttcctgcttgaggctcaaatgcatagtagcttcttgctgcggaaatccaggtcctggggtggagatagacagggcagccttgtgactggtatgagaaaaacatctttatttactgtcttttgtccatcatgaaaggcttagtatttctttatttcttttttcttttttttttttgagacggagtctcactctgtcgcccaggctggagtgcagcggcgtgatcttggctcactgcaaagtctgcttccctggttcaagcgattgtcctgcctcagcctcctgagtagctgggattacaggtgcgtgccaccatgcttagctaattttttatttttagtagagatggggtttcaccatgttggtcaggcgggtctcaaactcctgaactcatgatccacccatctcggcctcccaaagtgctgggattataggtgtgagccactgcgcctgaaggcttagtatttctaccactgtgtttcttaggccctgcagactctgggacagcagactccagggagtcgtaggtaggcattgccagggagcagggctgaattagtgacatttttgatatggacacttgtcaagataaacttctgtaagtgcatatgtaggtctgtggatcaagtccagcagatgttgggtcacgtggcatcaggcaggggcttttaagacccagagctaataggagatctggacaagaccaaattgtaggggctcttctcatctccttgcttttgcctccattgtcgtccatttctcactgtgcctggtccactcccatccaacctttaggatttcctgaggcctctgtccatgctaggaagtatcttttcacctccactgcatcaggtgcccctgctcagtgctcccataacacaggtgcatactcagatcactacacttaccrtagagggtttagctcaggggtagagcatttgactgcagatcactacaattacccattattttataattcattttgagtgtctggatctatcttttattcagatcaacttgagggtcttgttcacttttgtatctccatcaccttgcatacttcctggagtgtaatagggctcaataaatatttgttaagtgaatgaatcaataaattctttgtgggagtgatataaataagtactatcaagatcttattgttgaacattgcttacttattacagtgctgttaccttgtacataaacttatttacagtcttgtattgaagatgcatgttaggggagatttttctagcataaagagtactcaagaccgtttaggacactgagcacttttgatgtatggcaagcattttagtggaaagtggggtgcttcaactgtatttccttgactttaatacttctctgaaagtattatttttgataattatctttaattagttaattgtgtgtgtgtacttgtttattgtattaatttttttgcttaatagtataagactagtatgtagtccagcatagtgtacgagtcctggattaggcaatcgagagacctagattgacctctgcatctaactatgggagtgggcaagtcagtttcctgcttacatttaattcatgtaaagtgggagtgttgtacttctttgggggttgcaaatgtctacaggagtgaggctaccaacttgagttattatatgggctctaccattttttttttcttggaactaggccccttttgttttcccacttgtgttagaattataagtagaagaaaatatttctgtaccgcaagaaaaaaataatgcaagggcaatgactaatgacaaccccagttcttctctgtgtggaggagacaatagggagtggtggggactgtggtatattggagcggccaagcctgcctatgaagggtgactgcttttaatgcttagcaccacctgatcattttaagacataaatgtgggccatgttgacaggtctgatttttttttctttctttaagagaagccagaaatctgggtttttgtgtgatagctctgatttttatgtttggctcagattttctaaacatatccatagatgaaatgtaacacttccacaggttggatgtcaccccttgtgctttcagtttgtgatctccattaaagatgatctctaaagctgccttctgcccaagatcctgtgattctaatggggaccatttcagctggtgaattaaagatccttgttctactttgggaagtcagagtggggaaggaaatcgggctacaagagataggggtttatgcctaaattgcctggcaaatggtgtttaaatgagtcctgttggggagaggccacagggtgcctgtgattcacaccaggtgttttgtacatttgtcattgcaggagttggcatcctttggaagagttcgtgaaagctttctgcccagagctcctggaccaatgcatcttcccaccaccttaaaccactggtgaatatatgtgtttttttccttcttctcagtgaagggaaatgctttgttaactgtagaatgcgatttgcagagaactatgctgtcctttctattatagaaggaagtatactgggctgggcctaggcatatctgggttttggtacttacttgattctgccrtttttactgtgggattgtaggtgaattctttgacctcccaggccccagacagagaaacatatcctgctgtttacaggatatgtttgctttgcagactaaaagagataatccatgcaagaagtaatgtatgcacgaatgcttatattttcccagggagaataaagtcctgggcaaatagaaggtaatactgtttggctctgagatgtagagcaaggcagttctccccctatctgctacatttattaactttattaacacactttttcaagttggaattccagatataagtgttacagtgtagctgccatagtcagcccaattcaactgaccaccagttaggggcttcctgccttgacttttgtgatgttcacagacaccttcatctgccagtctcataggggttttcaagcagggcacttctgagccaacagatacattaaagtgtgaaactgatatgttggaaataatgggttttaaatacttattttctgagactttcagagtggttcttcaagagatttccattctctctttttttttcccttcctaccactatagctaccattttcttgaaagatgaattaacgacatttcacaattaccttcatttttatttgagatcagagaatttcacagttaacaaatgttcttcctttttttgaaagaaacttaattactcatcacagcaggtacatgtcttgcctctatgacagttgaaagaggcaaaaatatgtccttaataacagtgtgttccagtgctgaggtgagagtgcctccaggtatgacagctagtggatgttggaggtcttaggtgagatattgagggaaaggaccaccatgggccagggacgctgaacaacccatgcatctttatttgagctactctttgtagagaaaagctggcctgtttaacactacctggtcagctcctatgatgtggatcaggtgctcctgtgacctactgagacagatcccagtgggatggccactggtgagtttgcaggatgctgggggttggaataggaaggaagggcagtcagttaggtaagcaggcccaggattagggaaccagatcagccacaggaggctggctgtctagactcccctgtccaaggggacacagtgacattctgagccccagaacctgaatcccatctggtaggcaggaagggctctgtagtggaagtcctcagggaagcagatggcatcaggtagcaggacacttatgtattcaacaaatatgtattaatgcctgctctgtgccaaggcactgttctggggattcagtggtcgtaagatagactgtgcctatgcctccctggatcttagatttgagtgggaatgatacataagaatgtgagctccatgaggacaggggtctttgcttgtcttgtcttgttcactgttgtatcctcagctcttagaagagcacctcacacctgatgggtgttcactaagtattgtgagcaatacttatgaaggaagcaaacaaataactaaatagacaatataatttcaggtggtaatgagtggtatgaaaacagtaaaacaaggtgaagggctggcggggctctttttgaaagaatggtctaaaaaggcttctatgtatgtgagagagaaaaagaaggagattggttttgtgcagagacctgagtggagtaaaggraccaggggaggagaagtgttcaggcagagggaatagcaagtgaaaagaaaggcctttgacgtaggataagcttggcttagtagaggagcagtttggctggacttgggctggggggtgttcatagggagggagagtgatgtgaaataagagcagtaggtgagagccagaccctgtaggccatggtaaggagtttgatttttactctgagagtgattggattccatagtccatgtgatcttctttgtgctttaacatttttcctctggatcctgagtgcagaatagatgctaggggcaagagtagaatctgtataacctatcggaggtccttccagtggtccaggcaggagattagggtgtggcttggattagagtagtgatgattgaatgatacgaagaagcggtcaggctcaggatacattttgaaggtagagccttctaggttgcatgtggcatgtgagtaaaaacaagagtcaggattagtccaatgtttttggctaggtgaatgacgttgccgttcactgagataaggagcaaagagggaccctaagggttctgttgggccgtcttaggtttgagatgctcattcaatattctcataaagatgtagagttggctggggctggaaatggtatctctcatagtcattggcatgtagatgatatttaaagccatgagactgaatgagatcatctagggagagaaaggaagagatgcgtaggatttttgacagaggaaagagggaagacgaaggcaaagggtatattttccatataaagtccccactaagaagtaaataaagacatgctaatgaatatggtttccattttatgcaaatatgaattatacaaatgagataatatgatataaaagtagtcataaagtctcaccttatgtaaaaagtttgaagtgctgtgacttccccaaatcaagaaaattagtttcaagattgcataattataaatctggtcagctgagtgaattattagcaagcaggaacatccagcagcctttgccaatagcctgtaagctacattgctcttaggcactggaacttctacaagccatttcaatgactaaatttaatttactgttattacatttcaggtatttttctcattcaatagttatatcatccaaaagttcattgagggttcactaagtgaaaacatacctgaaaatcagtaattttgcaatgaaaagttagacatcataaaattttctgaagaaggccaaacaggcaccatgatttacagggctagaagttagaagatatttatgattatcttcaaaatatcaaggataaatgctacaagataacaaatatactgtgatggttgtggtagayagttgcattccacctgtacccctcaactgccattgactgatacgagaaaatcagttctgactcatgcacatcttcatctatttgtgggcttctggcataaaatgcagctgtcccatatttgctttgtctgtttcccagacaaatcgtctcattgagcttcttccatctyctcgttgggcgccttagttttcccattttgaggctcctagtgagttcctttagtcttgcagtctccagctgccatagacatttttgcctcttcccaccatcactggctccaaagcctatttgcctcctcctccgactgcctatgtgagccttcctccgtctgactgcctttgtgagcctttcagtttaggaaccccccaatccccctgccctcaaagcttttgaatatcctcacaatttccttctttgaaaacattttcactccttccctcaaccccaaccccatgtggtcttctcaggccttttgtggaaatgatgatgagagagggcagggtgatcagcagcattctagaatggggtctggccctcccgtgggcatgggcagtgctgacttgcttctacatgtatttcaagactccccagcttgagtgaaaacactctgagtggtacttctggaacatgtaatctctagaaaatgaacattaattgtgtagtgttctgtctatgaccaacggtttatggcaaatgagggtttcagtggaatggtatttataatgaatggcatcaaccctggttttcatttgttgtcttttctcacagagtggaacttaaataaaattaaaaagaatgaaacttactggcaatcatagggggaggatttttccttctgattcctccttcagtaagtgatttcaggaataaaaaaggtatgggatcttcctatgcccctggagacttagagtggtgggacattaaaaaactgrtggtatccttcgtaagttaaacacacacacagacacacacacaaacaaaaaaaccgctgaggctgtagaatagtcttcagtgcttgtatatttgtagaccatctcaggaggagaggcctgagatgggtagctacttaaaatttttttgtgtgttatgtttatatattatatttaaaaaggataataatagtatcccttttattmtttataaatgatctagaaacattgaaagtttcctcaccagttggtttataactcctcttgctcaatatgtcttttgattgagggcattgcctgttcacagtgcctttaattggtctgaggcttcacattcattaacggcttgggactagagtactttgacttgagtttcaaattttgcatgtatggggatatgtcaggccaatttctttcttccatcctttcccttatttctaaaaaggatttaaagctgtttgtgctcaatattttcttttttcagcagctttagacaaatatggatttgaaatgaggtggtcgccatgagttgagccacagattatggccatttcaactgaacatctcactgctgccctttagaacaaggtcttcttgcattgtggaacagaacaggatttggaatcctttgtgattgatagtttctaaccgcggagttcagacaaattaaaaagcaatccaaacccattttctttatcttaagaattccagctaccctaggaaaatgctcaaaatagaatttgtataagttgccacctctctgaaagagtagggtggcaactgaattctaattcggtgtccagaaccaatgatgccagtcaccacactgctgtttggagtgtgtgctattgggggcagcttctcaggggtcattgtctagaagtatctccctgggctgccatattgctttatatcaccagaggttcataaggccactttctggccaaagttattgtgacctacaatgacatgatatccatttcacacaacagcgacatctcttaggtgttggtgtttctccaagagatttacacatttgcatttgtactttttaaacaaacaggaagttgtagcacatttgccagccacatgtaaaaacaagatactttctctttttccatctagtgactacaaatagagagtggaatacattttttgtctttcctttttttttctttttttttgccctggtttggagaagtaaacattaaattgtgttggggtcgtcactaaaacaaggagatcagcatcatctccggtgattactgctcgtcatgggaagaaatcattctgattgttccactgactaatttagacaaggcaccatttgatgcctacttcacagcagtgccctcatcctgctgtctccttatcaacatagagatgactcactccatgtttttctcactcagagagaatttctctagtctactgattatggcagtgattaaataaaaaatgattcctgcagaggtgtgcttgaaaaaaatgattgtattatttgtgcttgttgaactttggataattcagcattcactattataatcagtaagatattggtttttaggctttttgggtaaagggtcaggaacccctttaaggtacatatgcacgtacacaatttccatgtataacacttctacatttttaggagatgacattcccctgcccagttaccatgcttagtcacacatcccatgctaaatgtgcttctggatagctctgtgtggcaggtaggtgcctgctgtaaaagatggcttttctgattagatctaggtgaaagactggggaagatagctatgttcaaggcagcctaacttcaataaaatttacaacttccagaattgtcccaacatggactcaaaagttggaaatagtctcttatatgagttgctaatccttttaatttaaaaaggaagcagaagcacctttacactttttgtttcctttctatttgagacagggtctcgcactgttgtcccggctggagtgcagtggtgcgattatggctcattgcagcctcgacctcccaggctcaaacagtcttcccaatcagccccgttagtaactgggactgcaggtgtgtgccaccatgcccagctaatttttgtatttttttgtacagacaggatttcaccatgttggctaggctggtcttgaactcctaggctcaagctgtgcacccacctctgcctcccaaagtgctgggattacaggtgtgagccaccacgcccagcccctttttgttttctaacagctaatttcattttccagcagatttcatgtttctggacattgtatttatttgttccctgaatttatcatatttatagcattttgtcttctgtggccagattgcaagctagctggccacaaaacaccagtgttttaaaagtttttaaagtagtggccagagttttaaaaatcagaaaatcttacataatttgatttctaactactcatgaaaaactagaatatctagcagtactgggctctattcttgcatgggacagtgggctggaatggaacagaggttgccccctcaggagggagtccaatttgctgtggtccccacatcacctgtttgctacctgtttgatcctctcaggcttttggttttgtcacccctgacttactgttcgtttaaaatcttatcctaaaaaatcaagagatctttaggttcaacaaaacaacctttttttttgttgaaatggagtctcactctgttgcccaggctggagtgcagtggtgtgatctcggctcactgcaacctccgcctcccaggttcaagcgattcttatgcttcagcctccccagtagctgggaccacagggtgcaccaccatgcccggctaatttttgtatttttagtagagatggggtttcgtcatgttggccaggctggtctcgaactggtctcaacctcaagctatccgcccacctcagcttcccaaggtgctgggattacaggtgtgagccaccacgcccagcctgatacctctctttttaaataaggaaactaaaatttaaatgatagggaaaaaaatgttgggacagtagggtgaaacaaatatttttttctttaaataaatttgtgtgttttatggctgggcctggtggctgatgcctgtaatcccagcactttgggaggccgaggtgggcggatcacctgagatgaggagttcaagaccagcctggccaacatagtgaaatcccgtctctactaaaaatacaaaaaaattagccaggcatggtggcgggcacccataatcccagctattcaggaggctgaggcaggagaattgcttgaacctgggaggcaaagtttgcagtgagccgagatggcgccattgcattgcactccagcctgggcagcaagagcaaaactacatctaaaaaaaaaaaagaaagaatggaatttgtgtgtttttaactaagaggaaggaaagaaagcaacaatgtaatttttaaaaagtattctttacaaatatcaagtcattatattagttttgaaacatataatgtcctttgtataatgtgatttactcacaaaaataccatgttgggaacatttatacaaatttactaattacatttgctcttaaatattttcattttatttttcaaatagaagtgaactactgaactcaaaggagttgaatgtttcttaggtttttttccttttaatagtcagacaaaaatataaaactggacaacagaagtcaccagtgttttaatgaaacaaagaattagtttttgggtctggtaccttctaaagcatctgtagattctagaaaaggaatttcacaccaccaccaccaccaagaaagcccaaccaacctaaaacttgaataactgaacttaatccgagtcattcctattttatgagccatcatgatccacagtttctgtttcttctcatgtcgtcgtttcctttctgaaatcattcttgtagactgctgaagactaaatgctagcccagatggagactgaatttcaacctttttcatttttggcttcttggttttggggtgagagttcatcagactgttggtatacgtgacttgccaccaactctacagcaacctgctgtctctgagctttagttgtttctgagataaatgagatcatgtctgggccttcctcaagctctgacattctagaattccactattctgtcacatactgcacatactcagtgctgggtaaacctggagtactggccatgtaacaacttctgtggggttcaaagggcagagtctcagtagagatgggttcctaatgtcatcgtttatttctcatggctgccagtaatawacacgaaagaagaactaaatatagtgagttatgtactcaccagctcatggtattatcctgaacttgccgcactgagaggaaattctgtagctctgtttagtagatggtacagagtaaaccccaggcagagagttttcatcttcttgtcatcccgcagaatatttctgatgactagagctctcaggtctgtaagcctacccgtcttcaccggtgctcatgagacttggactaccctaatacttggattttacaatcctgggttatattgtttcttaatttttttttgtggtgggtccaaagccagttgaacaccatctcttggctctgatgagtcaaaattgtgaccaggacaaaaattaaatggcacagaggctttagcagagaaaacaaaacattttgtagaacatgctcagcacaggatggtgtaatggaggctgcagggggtgttttgctgtgggcctgtgttagcagtcattggctaagagcttataatggcacttagagcatggtacaaatgtatatacacacccacaaagtatagtgtactatatgtgcaatatactaaacctgttgtgcttgtattttatactaaatatattgttttaggaagttatttccaaaatagccaaaatacatcattagaatgattcagcactgctcaggttggcattaagtgggctgtgtgtgtaggagcaaaggagggaccagagttttgaaaactctggttttagaaaggatcttcttggctgaattctagactgtgttcctggttcctaagcctgataatactgtgtattttgcagctctttagattgcctcaaattcattgatttgtttattcatttattcaaccaacacatatggagtagctctaatatttacacagggccttttggcatgcggagtacattcatataccttatcccacctaagtgtgcttgtttcagagcccagtcacatgcatgggcaacagcctgcattgatgcattgattgatgaatgcaatctctatttcttcatagagtgtttctctttgctttctgttgtgcttgtaagcagagatatacgtggttttgtctgcaccatgtagaaaggaacttaggacaggtgggcaggagggttgctatgggagttgtgctggacagtcattcccaggaacagaggaggtaggaatcatcgactaagcatgagattggggtgggtgggagggatgtgattgtggctttgaggaagatggaaactatttggaacagctgacatgggttgggcattgggggctgagcaagagctgaaagcaaggcctgctgggtgactgagtggaagcttctgtgtcagcaggtgtggcctggatgtgtagggcggcaggtggagctagatgagactcagggacaaaaggagagggctgggggcaggggtgggatggttgcttggctgttgacataaggggacttggaggagctgtttctgaccctgatgtggccatatagggagttgttgaggtgaacagcaggggaggtacaggggccccgggggtgcttggcagtagcttttcttagtttggcttataaggcctttgatctcttagcactcctcccaccccacatgccctactgggccattcctgagtgcatactatcatgtgtacatactattcctttttttctttcctttggcctaattacctcctacctcaagtgttagcccaggaatcactcccgggcaactgtttctgattgctgtctgccctctcctctgctggaacccttcaccctgtgcatgcatctctccctttgtactgtacagactcatttgtaagtctctcgcatatgtggattggaaggttccttgggtgcaagattgtgcctcgtacccagcggaggacctggcatgcagaatgtgttcatgaaatgcttgctgagtggatgcataactcttttgttgcatcattagtagcataacagaatgatagagctgaaagacacctacaagatcagctagtctaagtcatttgtttcatagttcacagagaattgaaactcagaggggttgaatgcctggcctgaagtcacacagcttgtcctaggctgagccaggactcaagttcacctcctctgactccaaatgccatgctctttccaccacaccacagtgttctccaaatgtcttttatgtgtgtgaagacagcagccctctgcgtctgcttagtgcctggatacagcctaatatcactattcgtactgttatctaacttttctcatcgggaggaaaactatgtyctgaccacgcggggagcttttcctctgcgtgcatggagccaggtttacaacaggccttacctcactgcttccccttccctttccggtttgtcctagtttatctttgggcagggtaagcatcagcaactgtttctaagtaaatagaggaattgcagattcaggatttgtggtttcaagtattcagtgtcttttgcttcagcccgtcccctcctggctgccatcactgcctcccctgtctccacattgccccgatttagcatgtgttgaagactggtagtgcacgatggaggtttctttcttggggcaagcagaagaaccaacagagcattgaaaagggaatctttragagagagagagagagagagagagagagagagagagagagtgggcatgtctccgaaccattttgtgtcagttaaaaaaaacaaaccaaagtatatctgctggtttctggacccatccctggaagatggcatacaagacggccatctagaaatgcttgtttgtacacctcccttctccaaagtgcgtctccgagcttttgagcaacactgatgtttagtatgttctgtttagggttaaatttgcagcgtgactgaggctggggtgtggctagttcccttacagcctgtccatggatgacgcagttttgtgaggttggttccagatcgccacggatcatctgacctctctccccatcaccctggtctgaagtacctcagggtcagttccaggactgaatgctgggagtggggctgattggtttgaacctttggtctcctctgttaattaactaaacagtgcatggctaaaaatgtcgctttggggaaaagggctctgaagaacagtctttaaatccttcaccactttaaggagctctgcaatattgtttcccttagcgcttgtatattcccctcacctttttttttttttttttttttaaagtaagaagatgatgtacgatcttccctttagcttggaaatcctatggcttggaacaagcccggtgtcttcagtcttagagatttctgaagccactttggaccttcttcgcttctagccacatgggagcctgtgtctgatcctccctgggctggtcttgagttccaggcattgagctggaagtacatcagccaaggatttggctgtgtcaggaagtattttgatttgctatattctctgcttggcatctactcatttccttcagggacgtccccttccttggaaaaaatagctccaaagatgcttgtctcactgatgagctaagaaggagttccaaccaggcgtttccattcagggatcttggcttggcagtcacaggtcactgagtgagaagggtgtcaccacacttaaaatattcttaacatcccccttcccctcctgccagcagtggtctttatgctggctagttttgagaatgacagtctggagactgatccagcttggactagcaggccttaacaagcatgtatttctaaggtgtcagccatcacactgcttggctgtgacctttaggggatatcctaagtggcagccttccttgcaccctaacctcaagctctcctctcctccagatgtgcataattttcctgtgtggtgccagggaactgtggttataaatgagagagaaggggctctgtgggggtcccagaactgtgttgggatcctgtctgtgaagttacgctcatctgagctactggtctaattctatttttaaaaagggaaattaattgataccttttgacagtgagcctgtgtcagtttttggagtgacaccaaaatagagtcatcactttcttttcataggtattcatctatttaatattccaggctagaattcttcaggatgttgatcccaagcttcttagtgtatacttctagacccttcttagtgttaattatttagttcctcaatttcatcacctttccttttctcagaggtttctgaaggattactgatagtgattcatcagtgacagttcagattcttttagctgtctatggatgtggttcacctgagcctgaaaacccaaaaaggagtagctctcacttaaaggggctgcgactctcctagctccacacctgtcttctgcctcagtcacctcttaccagagtctccctttccagtaagatcattctcatagttggtggaggtggaaacaacacgaggaagagtggcttctcttataatatgacgagggcttcttcaagcaggtctgttatcatacgctttgttttcttcttggtctgatcatagatttttaaaaaagaacctccaaaacaaaaaacctaatggttatttcaayttcttatgttttaactcttcccagaccttagaacaagcttgtccaacccaaggcctgcaggctgtatgtggcccaggacagctttgaatgtggcccagcacaaatctgtaaactttcttaaaacaatatgggatgtgtgtgtgtgtgtgtgtgtgtgtgtgtgtgtgtgkttgttttgttttagctcatcagctatcactagcattagtgtattttatgtgtggcccaaaacaattcttcttcttccaatatggcccagggaagccaaaagattggacacccctgccttagccttttggactttcctctgaccataaatgctgctgtcctttgttcagctttgactccattccttcttcctgtggcctagacatgcaaatagggcattccaatgttaggagtgctttgcagccccttaaaagattttctagtgctttcctggctcccaaatttccccaccctctttggaccacagagtttttctccaagctcagataacctctgactcctcatttgcccttccaaaaactttgcttctccccatggtgttctctctaattttaagctgtgactggctttctgggctcccaggcataaccatacagggctgtgttagtgactcagatcaggattcagctgtgctgaccacccagaacttattcccactcctactccccaagagaccagctcttcaggactcccacccagggcagggctgggtgggtccaccaatgcctctgccagggttgagttctccaggaccatctgggcctctccctgagctgaggtacaagaccgaggctgcccagcccctaggtcagagacgaaaggaaggaacaggctaggggtgggctggcagagagttcaggytccctgagctgggagtatttggggaagggaaaagaggaggaggtcggaaagtttgtgatgactctgaagactctcaggtttgtcccggggggactcaggccgccaaactgttcacttttctgcagctcggtgttgggagtgtgctctcttttggagtcacccatcctattttgggatgactgagtcaaaggagtagctctatcttggtgcctggaagtgcctcacatttcctcattttagacttgccattcttttcttaaggtgcttttcttaaggtgcttaagaaaagcaccttaattccattattaaagattcaggatcattaagastcaggctggattgaaatttatctctttactgtctatggaaaaagatttaaggagaaaaatcactgtgagggatgtcgatttaggaaagctttctaaagaacccactttaggaatgtgcatttgcatacaaacaatgaaagtgctaattaaaatgattctcacatcatcattttagcagtgcagggactgctgcttggcaacacttatgaagtggaaatgagtgtactttgaaaataataaaatattgttccatccattgaatccactaagacattaggtccttttatttgcaaggcactgtgctagaaccactgtgtgtgtttgtattggtcaagagtataaaacctagtccttgctctctagggtgaccaactgaggggtttccctgggataaaagactatcaggaaagcccgggaagaaccaggttgaattgggccaaacctacctcgggagttgaaaggctggtaggactgaacaatgttcctcaaatatttcacctgttgagataggccacacctgttcacattgttttagaaacagcattttgccctgtaggacgtttttgccctggaaattgagtagtctaattcccttttaaagcaagagcccaacatttaaaatatttctgtcatcattgtcgttattggcatcagctatcactgggcacctgctgtttgaggctgggactttgccctggagagtgggggtggggctgatctggcctggagatgatgtgaaaaccttttagctcctgggcgaataactgccaccttatctttttttaaaaaaagaatagtgttttagaacacggagcctggagcgcagtagatgcagagtcaatatttgtggattgaagtttattaactttgtggttgagagttcagggtctgcagtcacatagacttaagtttcaaatcctggctctgccatttgcctgctcgatgatcttggcttgtgacttacctctctgagcctcattttcttcatttgtgaaattgagataaacataaatttagttattatataatattaatgttcatatgataattatgacaggctgcatattgtggtatatagtaccacaaactcgagtcaggctgctaaagttcaaatcccccttcctagtatcataacttccagcaagttattgaacctctctgggccttaattttcttatctacaaaacaaggataataatagtacctttacagagggttgttagatgtgagaattgtcaagcacctcatcccagccataagaaaacattatatacatgtttgctaaaccttaaagactgtgaaactattattaattatttcattttggttcttatagaaatcctgtgaggttagatacagggcaagtattactccccactgcctcattccctatttgttgttattgcttgtttcgtatttgagggggaaaaatggagttctgaaaggttaaagtggttggctgaagggaacctggctagtaaatgttataactgaaactagaacccatggtacttgctataaaagatacaggtgtgcctatacacatttatcgagggcatgaagatattaaggctttactgtaataaatctgaagacaagtgactagkgtatctccctcttctgcaccaccacccccaccaccatgtgccagatctgctggcatactgctaactgatgttctttgtgaatgatggcattgagcttgtgccctctcattgggtctctggggcttactgaggcagccagtttaaacctcttacagattctaactgcattaaagttagtgttacctgctctctggctggacttcctttggagaccagaagattctactatattccaatacctgatttcagaaccccttaggggagccatgtcatttgcgggaagctcaggcttaaataggaatgctcccctccccctacctttctgtttgcaatagaaactctttattgctcttgagaaacttaattaggagaaccatatatcagggagtgtaaacatagctttaaaacacttgccaatctcttgtcacctaggcagttatctttagattaaaacgttctcatgtttgttcacaaacatgggcactttaaaacatgctgccacatgaggggttaaaacataaatattatcctatatgagcaaagaaaggtgctttagtacttaagtcctatttttgagctgtggaattcaattccttcctgttgccagctgaacctggggctctgatgtattagatgaaaatatattcctatcttcaaacgtggacaacaggacattctgtcctccaaatttcagtgtttgaattgggtgttacaggaaacttggcaccctctcttttcaaaataataaacagacatgatgtggcttcatgtttcatctgatggggcttagatgctattgcctcataaaggctgattcacagacaaatggagactaattatagtagcttaaaaataatatcgctgtttaaatttggcaaggcaagatgcctcgcatgctttgtaggacacgagagactccgtttctttggtggcatggaggtgacatacccatttctatttcagccacacagtggtggtgctggttcattacctgccatgtttattttttttaaggatttcttatgatctctcacatatacccatgcacaaacattgaactctctcttcctataatctttacagggagttctttcctgctatctgtccactgcatttttaagaaacaaatgtctgggctgaggaaagtgaatggctttttgtttttttttctaagcatttcagaatctctactgtgaaaaattgcaggaagttattcacttctctctaaggaatggatagaggatgtctgtcataagagaccattctgattacttttattctatccatcttccccaaaactgtgcattaggttggaaaacagttttaatttgtttttgaatttgctttaaataagtaggtgatatacaaaattgaccatgtgcaaaatttaaaaattagtaaaaatgttttcagtgaaaagtaaatcttctacctctctcatatctaggatctaggtacctctctttggaagaaatcctgagcaccattttattctatactattctggagattttctagatatttataaatatgtatgtgtgtgtgtatatatatattatatgtagttcatacaaatggcacatattatctacaattttttttttttgagacagagtctcactctgtcgcccaaggtrgaatacaatggtgtgattttggctcactgcgacctccacctcccaggttcaagcgattctcctgcctcagcctcccgagtagctgggattacaggtgcctgccaccacgcccagctaatttttgtatttaatagaaacagggtttcaccatattggtcaggctggtcttgaactcctgacctcaggtgatycacccacctyggcctcccaaagtgctgggattacaggcgtgagccacygtgcccggtgatctacaatattttgaaccrtttttatttaactgtaatcttggagatcattccacatcacacattgagatacctcattctctttaacagctgtctagttttccattgagtagaagtgccataatacataaacaattgcctatgaacggtagttaggctgtcttaatcttttgtccataaaatcattatataatgaataattttgtacatctactgtaggataggtggtctgtctcagtggttacaagcagggctctggagcccaagggcctgagtttaaaccctagtttcttcgtttacttttttttttttttttttgagatggaatctttctctgtcacccaggctggagtgcagtggcgcaatctcagctcactgcaacctccgcctcccaggttcaagcaattctccgcctcagcctcctgattagctgggattataggcacacgccacaatgccyggctaattttttttgtatgtttagtagagatagggattcaccatattggccaggctggtcttgaacttctgacctcaagtgatccgcccaccttggcctgccagagtgctgggattacaggcgtgagccaccgtgcccggctcttcatttactattgaggtatatatggtcttggccagttactttatctgtctgtgtctaagtgtcctcatttgtaagatagtatttatcttgtcggtaggatgtaacggttaaaatcactagtctatctaagcttatagacctgtgctggacatgtagacaggcctgtttgtatttactagtgttgtttcatatgatctggaaacacatgaatcctaagctattcttatctctgcmtgtttctgaaccatctcagtagctttcagaagccataccacagttgttgggtctgtgggttayatcggtctccttgatttattcagatgtcacatttgtcctcctgtccttcatcattcccttgttacttttgtgtaacatcctggagaataaggaagatggtttttcaggccactgtactcatgggttcaaacccctttagaggcataaaatgtattgtcagtggtgataattttaaacaaatggtctgactcccctcccaaccccaaccgctgccgctccattcatagttaatttagaatcttacaatacttaaatatttacatttaggcaaatatatagctcatgtgtatgtatgtctcgatatttagtgaattatttcatcatgttttaagttataagttgaatctttggaaaagactgcaaagtgtcctcaccctgttttagtcgactttggaggtggatgttccagggccttacatcaccttaaaagactaccagttggatttagacaaaccagagctaaaattgccacatcggggtttgttagctgtctgaccatgggcaagtcacttaagcttccaaagctttggttctccatttacaaattgttccacctcatggagctttatgaggataacaggagagagtaggtgaaggactcagcagtatgcagcacagggcaggtgctcaagggccatctgttcttcccttccctctcctgccttccacttcctcctgtcactgmctcacggtcccctagaagtaccctccttcaccctttctttttgacacaggatcttgctctgtcacccaggctggagtgcagtggtgtgatcagagctcactgcagcctcaccctcctaggctcagctgatcttcctgctcagcctcccaagtagcttggactacaggcgtgtaccaccatgcccagctaatttttatttttatttttcgtagagatggggtctcactatgtttcccaggctggtctcaaactcctgggctcaagcaatcctcccacctgggcctcccaaagtgctgggattacaggtgtgagccactgctcctgacccctcctccaccctaacctcagcgttcctcctctccactctcctcctgactcatgccctatgatttaccagtgcgctttttctgcctttactgggagggcagtttacagctcaattgttgtcaatagcatcctaccttaaatgttaaccaaatgttcaatgaataaatgcctgtacatgagtgaattagaggcaggcttatcatctccctactccaaagaagtcattactatttctctgacagcagtaactagcaacagctttgcaaaatcagaattgggggcacagtggtgaatggtagcccctgaagtgataatagagcatggtattttcaaccttgattattcctttgaagcattttgccatggcccactcacaaaatcctttccccagatttttttttttttccaagacagagtcttgctctgtcgcccaggctggagtgcaatggcrtgatcttggctcactgcaacctctgcctcctgggttcaagcarttctcctgcctcagcctcccgagtagctgggattgcaggcacctgccaccacgcccagctaattttttgtatttttagcagaggcagggtttcgccatgttggccaggctggtcttaaactcctgaattcaggtgatccgcccacctcagtctcccaaagtgctgggattacaggtgtgagccaccgtgccccgccctttccccagattctattgcttgttgtttgggaatgcagcaggacatagaggcgatgtcaagaaactgtttcatctcatcgaagctctattagaaaggcacttgcatgagaactattttgactactttgctccccactttccaaggaaagcatgaactgttgacttgcagatttagtggtccttggtttaggttgttggggatggactacaaggcagtgggggtggtgacctgaggaagtaaagctgcagatggaaagggagcaggaagacctttgctaactcctccaaatcacttatttgtagaggaactactctattttgcattaagtgttttgctgtgaatttttgagatagcagtcacacccatatttaaatgtaagaattagagtgttttccaaagacatacaggccaggtctcttccagctccaaaagctatgattttacaaacacaaatattgggataataggaaccattgtttccacttggaatgctcttcccgtggaaagcattcatctctttcttatacagacctttctatccttcaaggtctagctcagttctgtctaacttttgtaattctttgactctggaatttttggcagttagttagatatggcattgtatgttgaagtgtagttccttaaaccttttgtcatttaggtgttttcacgtgtttatgcctcggccacccactaggtctttactctttagggcaaggtgccacccatctcctgtacycctacagatggatgtagttcagtggttctcgacaggtgccttgtagcagcaggatcacctgggaactagttacaaatgcgctcatacccactgaagtagatagaaagtctggggccagagctcagcagtctgccctttgacaagccctgctcgtggctgtgctgtatgctgacttttgagaacctttagtgtagtgataagagcaggggactgagggtstaagagacctgggtttgaagccagcttcaccatttactctctgactttgggaaagtgaatttgtctgtcttctctccccttctaggggtattttatgaacatttatgatgcaggatgttaatgggtaccctaagggttggggtgggtgaggggctctgtggccaaataagttgatgaaatgctgctttggctaatttaaataggattcttttgggcaagacttttcagatgcctaaatatgtcattgaaagtctctgagagtctccgtggatgttgcaaacttgcgagaccctggaacacattttctgctgcattcctgctaacttttccgggaacacacagtgttttgtggaacacattttgggaaatgttggcttagctaatctaagggtgctttgagcctsgagattttatgaccttgtaaatcagtgagacatttagaaacttcaaatacagatttagtcagacatggtgccagaatctataatttgggtaaaccaggcttatagagaccaagttcaacattgagatgatatggaagtaattaaacattagagagtaaagggttatatttttaaaagaagtgagtttttgttaggtagaaaatggcatattaggggcaaggtggggaagataaggaaaggaaaatgtcatttactgagcgttttggaggcctggcagaaaacatatggcacatttaaatcaggtaatttaaggcgattttaatgaaggaactatttataagggrtgtgggcagagctttggaaaagcatcggcaatgacgaaggacttgattcctctgtgtacctaaggttttacacgtatcacattgtcattgtcatagccccaaagctggtcttattatttcattccttgcagaagaggagtgaagcccaaagaggcaaagcaaaatgcccttagataggacctgaaatggaggaggcagaactccactctgccctgtccggcccccagcctgcacctcctggttcacatttctttaggctgagcctccttatttccttcagtccttctctatgtaatgaggctgaaaacattgctttgtagaagctcatatttggagctagatgcgttgcactgagcaatcagtagacaagagaaaatagcaccttaggcaaataaatacattaataataaaagagtgcaggttccataagtgggaaagaaagaaagatcataaacasaaattttcatgtctgggtgagttggggctgtggaaatctgtcatccattctttcctaggatccatccatcctagaaaatctttctggaggaagtgggaaccatgtaaaggacatgatgtggcagcttagcttgtaggggctgggaagagggagagggaaaatttttcagacaagggggcactgcttggggaaggcctagcagtgagagtggaaggcaagggtgctccttgcgtgggtaccttaacaaaatggcagtgtgggcggtttggagaaagggtcaccatgggatctgagggggctgctgaactaccagtttttatatctgggccgtgctgttccagtgaagtctctttagcctaacacctttgttagaagatggtaaagggctgggcacggtggctcacgcctataataccagcactttatgaggccgaggcgggtggatcagttgaggttgggagttcgcgaccagccagaacaatatggagaaaccacatctctactaaaaatacaaaattagctgggcctggtggtgcatgcctgtaatcccagctactcgggaggccgaggcaggagaatcgcttgaaccaaggaggcggaggttgtggtgagatgagatcatgccattgcactccagcctgggcaacaagagtgaaactctgcctcaaaaaaaaaaaaaaaaaaaaaaaaaaaagaagatggtaaaggttgaattttctaagaattgattttgcttcctttgggaagtttcagagtatatgaatgctcagtttctcttaagcccaaagataatttagaagtcatgtttctgtggaggtttctttccccattgtgagtttaaatttggggcggcttttaatgctcaattagaatacttcttatggttaagtactttctattccaaaaaacaaaaacacctctcaaatcctctgcacaagacctgcctttgaaaacatctggtaaaaataacaagtcacttggaaaactgtgattctcaaatggacccccgcctcttggttagtgggaagtcactggggtaaacctttatttcctgttgcttccacacagccggcccttcacggaaatatttcacatgtttcctcaggcagcagggaaccttgaagggcagacagagggctggggccccagataggaacacagttgctgtctttgctcaatagcgcctcagggtgtgtggagagccagcctctgcctttgaagctgggccggctccctgcccctaactgctgaaaaccccagctctccccaagccatgagcaaggcccaaacttgccacacctctggctctttttgcaagagagatgttttaaaatagtcttaaatgtcagacatattttttttcacaacatgcctcagacatytcataaattattctgcagtaaaactttaataggaatgcttagaaaatgaagagttctagtcaatggagtttttggtaacttatacaaccgttaaccccaaatcaccctactttttctaccccagaactcattgaagaaaataatttaaaaatagagatgatttttctgaacccatgttagaggctgtctttgatgactgaggtcttatgtttcttcataatgccatatgttagtttgaacaacgtgatattccaatatttgactattttttactttaaaaagttaatttgagatggttcagtctgataatatgtaggaagtataggagttggagttcagtgttttctgaccagaatacaccgataaagttgattattttttcttagaaaaaaaaaaaaaaagaaatctgcgatatccacctttcttgccatttgcttccttctcwtgaatatgggtaattaaagattctggttgcagaatttgcatggttgctcaagctgtgtctgctgtcacattggctccacaytggggctcttacaaatatgtgtcacatctatagctgtagatctaacgagctctctttcgtgtgcacatgcttctgtacatgagcctgtgagccctccttccttttgtggtttttcagtgttgtggcttagatttatttctatttataatgcttactgtcttgatttattcagttactagttcctgaaaagttggaatttgggaagttttttctttttctttttttttttttggagatggagtcttgctctgtcgccaggctggagtacagtggcgtgatcttggctcactgcaacctccacctcccgggttcaagtgattctcctgccccagcctcctgagtagctgggattacaggcgcctgccactacagccagctaattttttgtatttttagtagagacggggtttcaccatgttggccaggctggtctcgaactcctgacgtcgtgattagcccacctcggcctcccagtgtgctgggattacaggcgtgagccrctgtgcccggccagaatttttttttttttcgagtcttgcactgttgcccaggctggagtgcagtagcgtgatcttggctcactgcaacctccgcctcycgtgtttaagcgattctcctgcctcagcctcccaagtagctgggattacaggcacccaccagcatgtccagctaatttttttgtatttttagtagatatggggtttcactatgttcgtcaggctgatctcaaactcctgacctcgtgatccgcctgcctcggcctcccaaagtgctgggattacaggcgtgagccaccacgcccagcccagaatttttaattattgggacagagatagataatttgagctggggctgtcctaacaagtctggaataygtgctacatcacagaatcatgatcatcaatgcccaaagtggtgctgcatagatgcctttttgcccataggaagattcaatgatatttagatgctagcatacttcgtttcatgatatttctcattctttaaaaattggacttgctaatttaccagtatatttcattatctagaacattccattaactctatatttggcaagtgtttgaattgagaagaaatttcaaaagtgagggtatatttcctagtatctttttttttttttttttttgagatggaatctcactctgtcrcccaggctggwgtgcagttgcgtgatctcagttcactgcaagctctgcctcccgggttcacgccattctcctgcctcagcttcccgagtagctgggactacaggcactcgccaccacatccggctaattttttgtatttttagtagagacggggtttcaccgtgttagccaggatggtctcgatctcctgacctcgtgatccgccctcctcggcctcccacagtgctaggattataggcatgagccaccacgcctggcctcttttgcctttttatgtgaaatcaaagcaacaaaattgtctcttgcccctttacttcatccaaggcaccgtgttaaaattcagaaggtgtatttgcagtgactaaagaattttgcttctctttaaatgtgacactagcatgacgttctccttaccatttggtctgtaggaaggcaaagctagctatctgtgacttgactcaggacagcatcctttgggggaaacggtgctgtgttgaaaggtagagcccttgtttcattcctgtccaggtcccaagctcactctgactttgtgggtagatctgagtttgtgggtagactttttccttttccacctggactgcttcctcttctatacagtgaagatgtcaaactagatcatttctaaggtctttcacaacacagtaaacccaacagtgttttttattgactactttccacttcacagggtcctgagatagttccaactgttaagagagcatttcacacctgggtgttttcagaggtccctcatagataagtaaaccaagaaaacatgtttgttggccattctgcaagagcagagagaatgccagagtgtgcagagtattcagcccttccttcagagagttatgcgtggcttggagaagaataaatgatacgggacctgtcacatgtgtgggacaaagagtgggctagacagcgagcaccctgagtgacagctgttgtttatcaaacacttgcaccatccccgactctgccaggtgcttttaattgctttacctataatatcctaatcaagccttgtagtaaccacatgagaggagtgccctgtttaccctgttttacagatgaagacaccaagataatttgcccaagtttccatagccagtaagtggtggagctggtacctgaatttgagccttttttttttttctttttttttttttaagacagagtctcgctctgtctcccaggctggagtgcagtggcgccatctctgctcacttcatcctccgcttcccgggttcgagtgattcccattcctcagtttcccaagtagctgagattacaggcacgtgccaccttgcctggctaatttttgtatttttagtagaggtggggttttgccatgttggccaggcttgtcttgacctctagtgatcctcccacctcggcctcccaaagtgctgggattacaggcgtgatccactgcccctgcctgagcctacattcttaattgccttgcctctaagaaaaaagatgaaggcacagacagagagaagaaacaggactctcttgttaaaggaaagcatggaattgccaggggttaacaatggcaggagaacgggacatttgtgaccatgggctacttaggtggacccatttcctgatggttctctcaccttggttacctgtcactgccttgtgggccctgggggacactgcctctctattaagactctggctcaagcttggccagaaaaacctcctgccacccctcctccagcactctgccagtgctaaaaagagccttgtgtttactggaacttgggatatcttttccacttgagttgaccagagccaagtcaaggtagtaaacagctggactgaaacagccatttgggattggagggtgaccccaatagtataactatacaaaggctttaaaaatccctttccaaattttccaaaacttggttttactttaaactggtattttccttttaatgcctccatttgcagaaccaaaaattctcagttttggaatttgtgctgtgaaagggtcagagtgaacaatgtgaagcatcctcattagctctgtttatttcttggatggaagggatcacttgtatctgctcatggggctcaggacaaacttctgttcactgtcactctctcagcagccatcatcagtgggacactggccaggcatcacatggcttaaaaaaaaaatcagtgtcttgcttttaagcaccctctgtgcgttggattataagaccactgcctccttgaggggcagtgatgatattcatctccatagcctggcactgagcacagcatgtggtaccaaggagacactccatgagcacttggcatatttgttgagcacattcttttaatcaccatgcaaacaaatgcaatggaaagatgtttttaaaatgaggtgagtacaaggaagggaaatgcattgcaaggcacagctttgtagtatgaggcatgatagttcttaagagccctgggatttagggtgggatagattgggttatacatcacaattccaccacttaatggtagggtgaccctagagaagacactggatcattgcctcctttctaaattggtaacagtgcctacatgrtaaggctactaggattaaatgagatattgtatgtaatgtgctaagcatgaggggaggctcttgatgataacaatagggttttttttccctagcaataaatacatcaaatttagctgcccttcaaaagaagtgggaaggagaacttgtgtatatgccccctccctgaccaaagaaaaaaagtttgcatgttgcacagtggtataatactgaatgttttgcaattacctggatcagaggcaagttcagcaggatatgagtggtcgttgtggaaatgtagttcaacagatttctgaagtctggaaaactctttatatagaaaacatgcagaattagaaccatatttcaaagcttttatagcaagaagaaaaatacttatgagacaatactatacatatactgtgaacgtaaccagataatataaagaaagattacagggaaattcagcaaataatgagattgtgttagggtggtgacattatagatctttttatttcattttcagatgtttagttgtgtgcttatatttcttttgtagtttaaaaaacgctttcaaaaataaaacctattcaaaaaaagcttcactcttgaaatgagttgaaaaagagtcttcttacaaaaagtttgatacttgaatggctgcytttgaattttttagttttaattgcttttccaattgttttctttaagaaactttttctgttgctgaataatcataaagactatacttagtgaaaacacatcgagaagttggaatttaagagtttgatgcaaaatggaaattttcctttgaaaataatrtgataggataaagtattaatggactattagagatcaaagcctgtctaattaaaaagtaaacacttgctctttagatggcatcacagatgtgtcaaatatatccattttttaagttatagtcattttatggattatgatatgaaatagtcttaaaggtagggtgcatttcaattctttgctttcctaaacatccaggcttagaaatatttaagttaatggatgagcatagtcctagtaaacttctcactcggaaaccctgtgccagactgtgtgcagatggggcagcagtcatgactggcaggcccagcaagtggaatcacatttgcacattgttttattcactgtgaacatttttgcaggaaaaaaaggaaaaactgtctccctgcttaatgcaattctgacgcgatcagtacaaattataaattacatttaaagtgatggtacaaattagtgaacatttccagctttgtgtgacagtttggggttgagcatcagcgtttaatacttggtgttgccgtcacttggttgtattgaccaacatttctcaaagtatagccctaaatgacatctgccagaaatgcaaattccagggcccccttggaacttcagaatcagcatatctggctgcagaacttgtaatccgcattttaaataagtgcctccccaggtgatccatgtaaagcagttttgttgaggccctctagtacatacagtgggaacgtttgcaaagattatttgttatctcaatttaagatacttatttttaaatccagagaatacaaatgtataatgaaagtttgagagcaaagctgactgattttgggtccatatttttacttatgagtgagatttgagacttcaaggcactgtgggtaktgtcttcaatttgtgcaataaaattaattttcaaagtacaagttagaaatttagttgaagggcacatgtgagaataattttaaaatgctcttgctgtttttccgaattctccaactcatcagagttgacttagaacagcattgcaagtagtcatttaaaatactttctcaatatcaataagaaaacttgcatttgagaaaatctctgattattaaatcatttgtgaattcataaaacagtaaatttggagaaaaagggacgaagacagagacccaatgttatatcaaggattataactaatatttagttcaataattatcattgggggtaaaagtaaagataatattcattcagttatctgcaaaagagatgatgatggttttattagggtcttccaaccacatacttacatgaagcagcatttttggcctttaaagtaaagaaatcaaagccaaaaaggggtcagtttgtttctggctgtactctgtataaagttattaattttttttttttttttttttgagacagggtcttgctctgtctcccaggctggagtgcagtggtggaatcacagctcactgcagcctcgacgtcctgggctcaagcgatcctcccactttagcctcctgagtaggtaggactacaggcacacaccaccacgcccgactaattattgtattttttgtagagttggggtttcaccatgttgcccaggctggtcgcaaactcctgagctcaagtggttcacccgcttcgtcctcccaaagtgctgggattataggtatgagccaccacgactggcctaaagatatttttaagggactgacaattgggattagagagaagcaatcactttgaatatcttaaaacttctttgagtttaaaagtgatctcacataatgtatctgtgcttaaatataatttcttaatgtcacttgtgtagacttcagtgatagaagaaataagatttaaataaaactttaaccctctgtttagtgaataaattkatatgtatatttttatctttataattttaatgattcttgtaacgaattggtstttctttttcccctgctgaaacaatgtttgggctgggacacattggtctccttttcatcccctctgttttgcttgtctttggggactcctcacccctgtgtctcattctcctccatctcctgtccctccttggcagcaatggggtcaaggagactgaatgtggacctgacacatcctacagagaaaccacactttgtttccaggcaggatcagaagtacttgactaggcagcattttggttttgcagttccgaggcaaccccaacgctgcaaaggcatcttcacattggaagaggcacactcgaaggatgatttccttatcttcctggcagttgcctgaaatctcccttctagcactgtgatctatgagctctcacgcactcaatttattttctttgctaggaattgctagagccatggctgggtcaccctttgctttcctggcagctggcttcactctgaacttaatgaggttgcagagctgaggggccacggaagggtttcccccgttgraaggactctgctgcttgtccctattaaaagagtaaatgctgactgctgggtgactccaaggaagggcttttccagccagtttccatgtggtcagtgtctagggcacattccggagcccgcctgctcctccttttcttctctttggactttagtgtaaccagcagtgaacaaggaatgtattttaaatgacatgtagatgtaacttttggagtcgctgggattttctgtccctatccactggtccatttatcaaagtctgttggcaaacttgtgtagccatcccggatttcatgctacctaaggcctccctgcacctgattctctgcatttgagcttgctggttagttgttagagctgcgatattagcagaggggaatttgaaatgcttcattaccattctgagagttcaagtgttttttatttctgtttttagtaagtgcttaaaacacatattttagtttttttcccttacaatctagtgtataaaaatcttttaaacttaggcttcacattcttacagaagaaaaagcttatttatttttgtacttttattattaaacagataggaaaaaagtctacaattacatgcttcttaagctggatttcctccagaagtgtaatatattcaccaaactccacaaataccagagctccctttaagcatattgggaaccaacccaagagttctaaagttacgtttttcctgaaggatttttgttgcatacttggaaaaaaaaaaaaaaggtgcaggggaggtgaggtggggattcttgtatgggacctttatcctttcccccatctctatagtcttcttaacatgccctctgtcagactttttgatggtttgctctctagatattcaagatataaatttaaacagtgagatccactattcaatgccccacatttagttcacatttagtgaacttttactgaatgaatgagctcagaagcaccaaaggacatttgtttgtggacttgctttaagttaaggattttttttctttttctttctttttttttttttttttaggagaaagctgacctgagcaaggtggtgcatgcctgtagtctcagctacttgggaggctgtggcaggaggatcacttgaggccaggagttcaaggctaacctgggcaacataacaaagcccttttctctagatagctagatagcaatttatgcgccaactcagtacttgtatatatgactttagttttagagacacttggacctatataaatgttaagaaaccttagattttaattctcaactgctggcttttcctttttaagagaggaagggaatgccacaatgaaattttaaaagcaatttagaaatatttgagtgccctcgtgaatgaacaaacatcatacaagcacacatagatgactgtcttcagggagtgtaacatctagaaagcagagcaggactacagacatagtaattgtaacatctcctgctgacatggcttgccccttgtcctgttggaagggcttggcaggatgagagttatttgttttagggaggacgtgtacctggacattgcattttctcatctcagtgtattgatcaggactgtaaagcccatgacatttggaaactgtgtttttttccagccctgaaatgcttttttttcttttttggtagggatattttattcttttatagacttaggggtacaagtacagttgtattacatggatatattacatagtggtgaagtctctagccttgaaattctatgatgctctgagtcctttggcctcatgaaacattcttaaagatgatattgccttgtttttgttcttgtttttttgagattgawctcaattactggcctgtttwgcagacagccaagggcactgctgtcctgtcgcctgtaaagttctgcacaaatgcagggtgctggatggagtcactacaagctttgtgttgagttttctctgcccaaggcaaaagccttcattcctggcaatgcccttgtctccatgcagggtccagtacattgttgttaaagtaaaacagtgactaactagagccttttattaaccaggattccacttctgactcttctcacacttcatttttggagttagaacaggataaataaacaaattatgtcaataggtgaccatttactgagttcttcctgtgtgtcaagcactgtgctatgtgggtaaatggttatctcgattaatcctcacaacagggaggttagtgctgcttttattcccgttttgcatgtagggaagctgtacagtggtagcgtcactgcctgagcacctagaattctttgctaacagggttgtgtgtgaataatttaattcgtctcttaagatctcaacacactccctccctggcccctgctgtaaacatcctacactgattggaatagaatacatagttcttttcttccaacatggtgtgttctattgatacaagttgtgaattgtggcgacaaggccattttgtattgagaaccattctctttaacatttgttagtttggaaatgctaaacatccctaactctgtcaccttttattccattgtagtggttgatatcgtagtgtctttatttagttataataagcgtctttgagttctaaaggatttttcgacaccttttattttctgataattttatcttgtcatccaccaaggcaattgggcagaaaaaaagcttcactgtggacaaaagtggcaaaatgtgatttagggagtgtactcagaaaatcagattctctctcagcagtagtttttgctacccataagcaagagaatacaaatgtagaaactgtcacctatgattgctgccagcaaggcttctatggagttttcacagccaaatgagcagaacaagtttgctgggagctcctctcctgggcagagagggtatatatggttgaggcgtatttctttttttttttttggtcttataaaaagcactgggcaccactgcccctcttgtggcccaacccgctcacaggcagtcagcctgcatgctctctctgccccagggccccacctctacagtgcattctgcctgcttcagctggatcaatcactgtcttaacttgtttcttgctgcataacagaataccacagactgggtaatttatgaagagtagaagtttgtttggctcgcagttctggaggctgggaagtcctagattatggaggggtcgcatctggtgagggccctcttgctgcatcataacatggtggactcatccttttatgaggagcccactctggcagtaactaacccactctcttgataatgacagtaatctattcatgagggcagaggctttatgagctaatcacctcttaaaggtctacctcttaatattatcacaatggcaactagatttcaacatgagccctggaggagaccttcaaacctttgcaatcttgaatttgaaaacttctcttctgcagaactctccttggtttcatggcccaacagaatgtcattgcctggtattcaaggccattttgtggtctgtgtacaccatctacataatgttatttccatatactctgcaatacaaaccctttgcattaactgaattggacttgggtctattctgtgtgtgttctgtgctatgttctaaacattacctatgtgagaattgctttggaaactctagacactttgtgaggaaaacagtttgttaaaagcagaagacatggtagacaagtttttgtttgtttgttttgagacagggtctcattctgctacccatgctggagtgcaatggtagaatcatggctcactgcagcctcgaccacccaggctcaaaatcagtccccctgcgtcagcctcctgagtagctgggattacacgcatacggcaccatgcctggctaatttttatacttttgtagagatggggtttcaacgtgttgcttaggctggtctcaaactcctgggctcaagcgatccacccacctcgatctcccaaagtgctgggattacaggcatgagctgccacacgcaatgtggaagacgggttctgtatatcctggaggaagtggtaaagttaaaaaaaaagttttacatgtaaatgaagtgatacctagccagtaacatccatgagtattaactgtggggagaaagaggagactagttactttacttcttatggaaagttatgagaagattgtgctcttggggaaagaccggacatgtcacctcatgagggagagaaaggtgctgtaagctcttcaaaggagcactgaccgagactgttcttttaattagcttgaaaagactcacctctctatggtgggaatagaacatctgctgctactcagagaaaccacgtgaggagaaagtggttctgacccccgccccagatgctattgatgatgaggatcatgctgaaagcagctaaaatttattaagcattttccaacgttgtaataggcactggatgtactgaatcttatttaatcttcaccataatgctatgagattgatggctgttattattcccattttatagatgaggaaactgaggcttagcaaggttaactgactaaccacagaagacacatctagtaagcgtcagaacagcaactcaaatccaagttatactaagtctaggtatgttggtgggtgttgttgcttcctaaagtctgttagaaaattctgtaggtgatcttattcccttttaacttcccctaatgaagattttctataaagaaattgatatcatgagaactatgggctatttggtgcttttgtcagcatgtgcctgggtgtttcccaggtaagttgtgaagcttggcattctcttagctggaagattcctgcagtagagggcagtccatggatactcttccatgctgtttgtagtggctcatcagggtttcaagggttagccttatctctccaattagaatataaagtctctgagggcaagcaccatctcttatcttgattgataacttcaataattttattgccacagctggatgaaaaagcacccraagaggatccgtttgtctttgttttaggtctgtatattctccaagcaacctttgtacacaagagcatcttgctgcaggcagggactgttttgtgtctccttggctgggttcatgtggcaaagtggaaggagcctgggttgaggagccggagccaggacctgtattccagccttcccgcttgcttctgcaagacttttcaatgagccttctaacttttactgaagctcagtttctccattggcagaataggtgtagaaaccttactaggtgttctgaggattaaaaatgacatgatgtgtcaagtggctggttcacagtgagcatttaggaaatgaagagatggttctcctctgcttctgtagtgtgagcacagggccttgcacagaatgcatacacaatcagtgtgttttgataataatggtttggttctttggcacctgaacctaaggagggagcaactgtgaaggcttttaaaacatgatgcttttttatcaagaatgtccttcattgccagacttggcataggaaggcagacctggaaactgactgtttggttcttgaatcctgcttcagttcataaaacctgatgtttggtacaggtaagtattggtaatatcaacctcataatcagatatacaatgatcacattcattagtctgttaataaacaaaggataacaaagaatagacccaatacctttgctagaatacttttccttttataacacaacaatttacagtgtttcatatatacagttatctgtcagtatgctatagagattggtccaggaccccacgtatacccaaatctgagcagacttatgtcctgcagcgggccctgcagtactcacatataggaaaagttggccatccacatacgcagcttccacatcctacaaatgctatatttttgatccaagtttggttgaaaaaaatctacatataagtggaccctcacagctcaaatgtgtgttgttcaagggtcaactgtattttaaaatttaatcttaagaacaacttaatgggctgggcacggtggctcatgcctgtgatcccagcactttgggaggccgaggcgggtggatcacctgaggtcaggagttcgagaccagcctggccaacatggtgaaaccctgtctctactaaaaatacaaaaactagccaggcgtggtggcatgcacctgtaatcccagctactagggaggctgaggtagctgaattgcttgaacgtgggaggcggaggttgcagtgagccaagatcgtgccattatactccagcctgggcaacagagcaagactccatctcaaaaacaaaacaaaacaaaacaaaaaacaattaatgtaagtaggttttttgcttttgtttttgtttttttgagacagagtcttactctgtcacctaggctggactgcagtagcacaatcttggttcactgcaacctctgcctcccagattcaagagattctcatgcctcagcctcccaagtagctgggactacaggcatgcaccacaacacccggctaatttttgtatttttagtagagacagggtttcaccatgttgtccaggctggtctcaaacacctgacctcaagtaatccgcctgccttggcctctcatagtgctgggattataggtgtgagccaccatgcccggactaaagtagtatttttaatttccttttatggatgagtaaaccgaggctgacaaattaagggacttctcaatttgcacagccctgccaaagtttggattcaaattgagttcttcttacccggctttttgttgctttcctgcagccaccaggcacatatacaactcaagtcagaagtgtgtgccagatgccaactgagccagagtccttgtaagcctataatatagrcaaattgtgtgtgtgtgtgtttatatgtgtgtttgtgtaaatataaacacagagagactaatttttatatattaatatataaatgtataatgccaacctatttctaggtagtctggaagacaatatagatttaaaaaaatactttcattgaatttttgctgtgagcttgatattatgttgaatgttttagtggttttatcttggtttgaagaaaactcattacagaaatttgtattgtaatttcagtggttggatgttgtgcttttatacctgatatattcaaaaattgcctaaaattagggtaaaaataaacaaggatagataaaagtagctaatgtgatatgttcactggatgagtgatgggagccaaggtcttgcatttattacagtgaggtgctaatgatctgatttggtccatggcctcagagcctgtgctcagggcttattgattttgggcctgtatatatgtgttccacctcagttgttaaacaaatgccacygagaagagaggttttctcagaaaagatggtgtttgcagtgttttatattacctttttggtaggttagtatatattcagttacaagttcaaaacttcttaaggaaaataagcaattcctgaacaagccagtattatgaactgaagtatttaagttatgtgtttgctaaagacccaaagtctttttactgaatggagcctctgttccctcattcctgagcatggtatgggtctgtactgcagatgtctgtataatatatgatgtggtaaatacatagcctcagggattttgtggtttaaaagraaagttgagagggaactgtggactgtctgtaagagcagagacctctcctgccatatcaaacccaccctgctttcccattttcaagctctaacagactgcttttcagctttttaacattttttttcccagccatacacagtacttcttcatctcgtttacctatattgtggactatggccctaccttgattctcctgagaatccaaaatgctttcattcatggcctctcactggtagacattgtatagcgactgcttcagaagaaaaatggctctgtgtcctgggcttgtgtttattattttgaggttatatatttatgatttaaacagagttaagatgtcttgcttttatctcatgaatttcggaatctgccctattttgagttatctggattgtctaaggagaaggctccaaatgtgctgaatgccacaattagacagctttgttttggttctgtagacacaaccatatttgggaaacacgaataggctagtttttgcatttaagacttgtcttggttaactgcgtattttagaaactgtgtgtgcccagagttttacatataaaggatttgagaaggagttcagggctctggaatgccatgaagctgggttagaagcagggacttggcagtgagcaggcactgggagcaatgggggtagtttgtgtgttgtcacctggcagctcctgctgactattttaagatgaaatgttttggtgcgattgcttctttaggaaatctggctgaacagtygagtccgtttattgcccccttcatcctcctgaggaacttcatgggagtagtttggctttcattaaacaaaagcagtcactgatggtgaatgttagaatcccacaagttccgtggaagatggcatcaggtggctctgccatgttctaatggacatgactgtcagtggcrtttttagcttgtctcctagaattttttctttcaggttctaaatattacacaattgcatatcaaatgtcacgtaggagctaaaaaggatatttgtcattagcaaagaaatgtattataagcacattataaacagtttagaaaatagaaaaaagaagttacccataattctatgctaccacaatcactattagaatttggatatattttctttttactatatacatgcgttttgcctattatataattataaccacagagccgggcacagtggctcatgcttgtaatcccagcactttggkaggctgaggcaggcagatcacttgaggtcaagagtttgagactagcctggccaacatggtgaaaccctgtctctactaaaaatacaaaaattagccaggcgtggtggtgtgtgcgtgtagtcctagctactcaggaggctgaggcaggaggatcgcttgaacccaggaggcagaggttgcagtgagcagagatcgtgccactgcactccgcctaggcaacagagtgagactccatctcaaaaaaaaaaaaarytgtaatcacaaatgtcacacagacttataccctgctgtagtcacctaatcttacgagaagtcttttcccatgttgtatggtctatgttagttattctcataactgttcaacagtccccacagtgggtatgtggtcaggtaattagcccctgtgttattgaacaccagaggatttcaaggctttcactattactaataaagctatggtaaacatctctgtatgtatagcattattgtcattcaagcttctttctttagactagattctcctaaagcacagggatacgaggtgcatagctcttggtgtgtattgctgaagataatgataaaaatgtagtgtcattggctgtgtaggaaaaagccaatgtctttgcatttgcccacattgttagttttaaaaaatttttggactaatataagaagtagaaaaaatggttagtcattattttaatatattttttaactagttgggttaagtaaacgttttctcatagatttgtttattatttgcattttgtcttctgggaatcatttcttcacgtatctaaaaatatttttcttggcaattagtatgattacattagattaaggatattaacccgtctatcttgtttgctgcaagccatgcattttaatatgttagacaatgtaatatataattacaaattatcccctaaattctgttgtttgaagcacaaataatactgcatttataagacttgaaactgtttggggggctgaatttgcttattgggttggaagtcaacattttatatttatttaaaagctccactcaagtataaaaggtaaaaaaaaaaatgattgcagatttattggtggtgaatgttctagctccagatctgccccttctctggcatggacctggaacgagagtttgatattggtagtggagtttgggcatgggctttctgaatattgtgatcataaataggtcttattaaaatgagttcttggctgggtgtggtggctcacgcctgtaaatcccagcactttgggaggccgaggcgggtggatcacttgaggtcaggagttcaagaccagcctggccaacatggtgaaaccccatctttactaaaaatacaaaaagtagtcaaggtggcacgtgcttataatcccagctacttaggagactgaggcacgagaatcacttgaacccagggggtggaggttgcagtgaaccgagattgtgccactgcactccagcctggatgagggggcaagactctgtctccaaaataaaagagttcttcatcttcatgacttttaatagggatcaaaaccaaaactatttctagccagtgtaactacagaaaataaaataaaataaaaagtagatgaaaataaaaacctttagtttttgttgggccaatgcatctggctattgggattggccttaaatttggggagatgagggaaagggcattagtgggaagcaacaaggttaaaggcttagaaatgggaactcttgtcagaattcagtaggaatagcaagtgtggtacatgtggagtttagggctcatgggaggatgtgagggagatgagactggaaaaataactgggacatgatcctgcagggtcttatggcacattaaattaggacttgaatttttagatcagtgtttccaaaagtgtgacatttgaggtgattttagaaggtatgtcattgaacattggaaaattttggtatttattcattccttattctctctgtcatgcagaatttattccttttccttttgtgctcccatgacacttaagccagattgctagcagaagggttatcccattgtactatatttaaatggaccacatctgccaccctacagccctgtgttggcctcaaagacagcaatcctgtctgatcatgttggtctcccctgggccaagcactttcctgggtgcaaagtaggtactaaagaaatgtttttgagctgtatcatcaggcctgtgttttagatataatattctttccggaagccttgctgcctttcccttgcctgccatactgcccagccaacccctctgagtgtataggagccctgcggagtttttttccccattgaaatttgacccaggttgaattgaaagttggggagtgcataggtgggtgccagcacagtggctggagggggctcatggaacctccttccaacacagctggaaaaccaggaaaatgggctgggtaacctatatagatgcttctggttctaaagaagtgagcatgtagttggaacagaataaagaccagctgagggccctctggctccctaaactcctgaagaactgcagaggccctgttctagaaggatcctcatggcccagtgtaaatcagtttacagtgacacttagaaatcaagaccagaaagtgtggggaggaggaaggagttaactgtcttaaatgcagtggaaagatcagtgaagcctggaccagtgcagaaaccgttggacttggccatgcgtgtgcactggaagtctttctgaaggccatttcagataattggttagaacggaaactgagttggagggactccaggaggaaatgagaggatgtggaggatggcctttctgatgtgttttcctattgctccctctccagaaacattggtctttttacagaaacttcgtgcttgttgtgttctgagctcccaggagtgtcatgggattctagactgaagttaatgtcagggtcaagtttatcccactttcttccccttgaacrgaagtatcagcgactcagtgtttatcctttctggctttctgaagagccttctgcaccctttgcaataatgtagagggtgcatttgaagagaagtgacattaatagagattgagaagagaaggagctgttgaaaaattggagaaacgtggctctgctagtggatctgcaaagtacaaagaaataaggccaggcatttattctggggctctgtgcgctgtctctattcttttcaagctgttggaagtagctgtacgtatataaaatcaagtcccagattagattttttttttttttttaaatacagggtctcactctgttacccaggctagagtgcagtgagcaatcttggctcactgcaacctctgaggcctcctgggtccaagtgaccctcccacctcagcctccagagtagctgggactacaggcgtgcaccaccacacccagctaatttttgtatttttggtggagacagggcatccccatgttacctaggctggtcttgaactccagactcaagcagtctgcctgcctcagcctcccaagtgctgggattgcaggtacgagccatggcacccagtaccagactgggtttttttgtttttttttgtttgtttgtttttgtttttgagacagaggcttgttctgtcacccaggttggagtgcagtggtgcgagctcagctcactgcaacctccgcctcccgagttcaagtgattctcctgcctctgcctccagagcagctggaactacaggcgtccaccaccatgcccggctaatttttgtatttttagtagagatggggtttcaccatgttgtccaggctggtcttgaactcctgacctcaagcaccggcctcccaaggtgctgggattctaggtgtgagtcattgagcccggcccaagattagattttaaagctaaggcataaccagcattttgttcaagtggggagctggctcccttttaaggagccatggtggagttaaggaggctcttgattatcttgaaggtaagactctgaagttaggttccgaaggttaaacagaggcgagagcaaaggccgtgactgagcacctactgcatgtccagtgctgaggatgatgcagttttcctttccagatatttacaatctattgttggggatgggggagctatggaggcaaaacaccatagtgcataggagaagctggagcatgctggctaggagatttaaaggctgtttgttttccaagaacctttgcaggacmttgaattcatttttacagacatgctcaatttcttcctagtcatatatccctaaactacccatataaggaccttctttcctttcccagtaaccaacccatatttagttgattgtttttcagctggaagcatgagtataactttggctttttagtaattaatcactttgtgtcatcaaaacttatcttagaattatagggtcatggaattggcggggtaggggggacaatatggaatgattaattatctggatgctttcttaacaactctggccacttcacatcttgttcttctcgtggaatgtctgtgttgatgccatggtactttgaccaagtacggcaggtccaagcagctcaaagcgtggaatggcggtttgactccccgctggcacacccaagctgtgacactgcataggttcctgcaactcactaggggaatttactgcccacttgcagttgtgtcattttgccactagatggtacactgttggtccttttggcttttacccaaaggtgcctggctcatttggaggggacttgtaagaggcattccaaagacgtgccatcatgtactcaaccaaatcaggctctttacagcttagtttttaaataaatattaagtgttagaggtttttatgtaaaataaactctcaagttctcatctgattgtaatggcccatattatctctaaataaacagcagggactagactatgattttcaaagctttcagtgttccggtcaagctcaatttgtgtagtttcatggatgcgtcctcactgcccaggctctgagcacttaaggttgtagagacacaaccactgccgagccacttgggattcagatctggtcagcctcatgtcaggagagaggaatgaagattctcctcttcagatgaaaccttggggacttctccctcccatcttctgctggtcaaggttcttgggtggcagataaccagaaaccacctctggtgaactcaaactgaagagggatttattggcaagatcttgggtagttcacggagtttatggaaggttggagaactgcactcagaactggggcaggaattcyaggaggctgagctggctgggatcagagccagaatcaggccctggaatagtctggataggacgttgctgctgttgccacaacaggggaggactggatgcagggcactgtccttggcactgctgccgttgctgcagttccttttcttcagtcagcccattcatcctcagcacttttaattttattttaaactatcccttgtttgttagtatcacctgctgcagatttaatcaccagagtgagaacacacaacagaacctgctactcaaaaagtcctcgtgtgcaagagctggtactcacctgtgcattgtcattgtcacgtactatcgtcatactagctcttaaaatakcaaagtagtctsttaacacccagggtccattctccttctaccctctcagcatccagccattaaatggttaatagcaggcacagggaggggcctcccagagagtgctacaactggtgtctgctccagttggtagacatttgtggcaaaatgatggttaaatattttgaagattatccctgactgtgtctattttaggttagtttgtaagtaagggggctgacacttagaagttagtagtttctatattgagaratgtgaaatgtgcaaagggctacccgcatatgacggtgattacttatcatgtatgagttgaggtatcctttttgtttggttcacaagacatctccattcatttcttctccagcctaagaatgctgtgtgctttgtacttgttttttaaattaagacgaattaaactrtacaaagggaattggtaaatggattatggagtgttattacaatgaaatacagccattaaaatgatggatatgctgactatatagaatcccagaaaaatgttcatgaaatacttgatttaaaaattagaacacaaagctgtccagatattatgtttacaataatgtacttgctatttatgtatctaaaggctagaaaaaacttataaaagaatgaaaatagtttcagttaagatagcttcacagtggaaacaaaaagatttcttcaataatgctttaaaaattgaggaaaggccaggtgcagtagctcacacctataatccctgcactttcagagactgaggcaggaggatcgcttgaggccaggagttgaggccagcctgggcaatagagagaccccatctccacaaaataaaaattttaaaaattagccaggtgtggtggtgcatgactggtcccagctacttgggaggctgaggtgggaggatcgcttgagcccaggaggttgaggctgcagtgagccgtgatcacascagtgcactcaagcctgggtgatagtgcaagaccctgtctcaaaaacaaaaacaaaaataaaaataaaaataaggaataaaaaccttaatacaattgctcatgaaaattatttataaaataaaagcatttggatgctatcacaacaacacttttgatcctgggaggcaaactaaggtatcaaaaacttaggactggaaaacatgaggacatacagataacagcaggttgtgtgtttctcgattgaaagaacaaatgtttccacagcttagagaaccatctgtggggacagctattgaaggtcatagatagtctcagatgtatttgacagtgacagaggcaaagttcctgctgatttgggctgcagagatggactttgaatgatttcctcttcatccctagcattctactctcttaattacaaggacagtaaggcaaagcaaccatccagaaaggaaaccagtgtccaacttcagcttttttaaaagaaaaagctaaagcatgtctccttttgcagaccttcataccatatcttcatatccctattacagaattcgtgaaccggggtttttctctgtatcattgcttctcacaccttaaaatgcaaagggagcacctgggattttgttaaaatgcccattctgattcagtaggtacaggagtctgagcttctgcattttctttccttttattttttggagttggagtctcgctctgtcacccaggctggagtgcagtggcacacacgaacttggctcactgcaacttctgcctcccaggttcaagcaattctcctgcctcagcctcccgagtagctaggattacaggcacccaccaccacacccggctgctttttgtattttagtagagacagggtttcaccatgttggccagggtggtctcaaactcctgacctcaggtgatccgcccatcttggccttccaaagtgctggaattacaggtgtgactcaccacacccggccgcttctacgttttcagtaagctcccagctaatgtgaatgctgctggcctgtggaccacacttgaaatatcaaggttctacatatcccgaggacttgtttttcagattgtgtgaccttcagatgtgttcagtaagaccttattagtcgaggtatgtacaagacttgtactttgaaaaaactataaaacattaccaagagaaattaaagaagtcctggaaaaagggagagataggtcatactcatgaactggaagactcaatattgttaaaaatgttagttttccacagattgatctatagattcaacatgattccagtcaaaatctcaacagacttttttaggtagaaattgttaaggtggttttaaactttatatgaaaatgcaaaggatctaaaatagccaaaatgattttggaaaaaaactcaagttggaagactcactgtattaggccattcttgcacagctataaagaaataccagagactgggtcatttataaagaaaaggggtttaattggctcacagttctgtaagctaactgtacaggaagcatctgcttggcttctggggagcctcaggaagcttcccatcatggtggaaggcgaagggggagcaggcgtgtcacacgacaagagcataagtaagggtgcggggggggggtgccacatacttttaaatgaccaggtcttgtgagaactcgctattgcagagatagcaccaggccatgagatatccacccccatgatccaaacacctcccaccacgcccacctccaacatcggggattgcattttaatgtgagatttgggcagggacaaatatctaaactctatcactcatattacctgatttcaaggctatgtaaaactacagtaatcaagacagtgagttatcagataaagacagctcactgaaacagaaaagagtccagaaattgacccagccatatctaaccagttgcttttcagaagtgttatgctaaacgagagaagccagacacaaaggattacctgtactatgataccatttatataaaatcctggaaaaggtaaaacaatagtaacagaaagcagatcagtcgttaacagggacctgagatggtacttggctgtagagatacacatgggaactttttggggtgatggaaaggctgtatattgtgattgcggtggtggttataggatgtatatatttgtcaaaactcatcgaattgtacaattaaaatggatatttttggttatatgcaaactataactcaataaaagatctggatatatattagggcattgtcagtataatttcagctttctttgagaccctactaaattaaggggttatccatttgaacatcagggattggttcccacctccaggtggtagagcacagtgcataggaacttgggccagaaagtcaggctgtctgggttccagtatcagctcctccactgcagcaagcacacagcttcacctgtctgtgtctcggtttcctcatctgtgtaactaacctgayattagtggttacctcctagggttgtgagggtcaaatgcgttaatatattcaaagcatttagaacatttccttgtgcatagtaagctatatataagcattcagtatgatcagtaagttctcaaatcagtttgtgttgtgattttacctctttctcctaaaatgtgttttttcccctttcctttaccctctctttaaaccacgtgcactcgtgtagcttgaggtttttaatagaatgtttgaaagggatgtcggataacatcagcaccaaatatgggcaacaaaactgaaaccagtgaggttgagtgatgtgcccaaggtcacaataatatgtgggtgaccacaaaccagaagcctggccaggtgactcctggttcagctctgttttatcaagggttacagtgtttgcatttttaatactaaccattgggatttatcgcgaacctgccattcatcaattgcattgtgtggtgtttgtttttctacagagcagttcagagccccagttgcagacgacttgtcctgccaccaccatgagttctggtaagtcattttaaactcatctttctcttatctaccaaactgggcagtttacccagatttcccacgcaccctgaaggccccactctggcattttattttttattttttgccacctgggtgaatgccaaagctttgtcataagttgtcatcatcactctcatcaccttcatggttaatgattttttgagtgcctactactattgccaaagaactgtgctatacactttacatgcacattagccctctctttattgagatgtaactggcatactataaaccacagatatttttagtatacaatttgataaaatttgacatatgtgttacaccttcatggcatttcttaatctgggtgactgcagcaaaagtaaactgattggccataattgcccaaggatgtgaactaatctaatgcttccttcatctaggctagtagagyagtttgctccctcttttgctttgcctttggtagtaaaagtcaagacctaaagaaataatcagttttgagtatttttagttttgagctgaggtagaaaacgtgggttagggaagacagagatgggaacagatccctgctcatcatgcagctaagagctgtcagctttccaacccagaattggagcagagaagtttccatctggagattcagccccacctaggctactgagcatgccctggaccctcctgagacctgcaggtggggcaggctgtggggtgggaagatgatcatgtggatatctcattccggagtctcccaatcctgccgtatttcgtgagtgttgtcagtgacctctgtggattaaaaatcacccttttccatttatttgcatacaatgccgttttaggcaagttctgagtaggacagtatgtagttcagacctaggaaggctctgggctggaatagctgaggcccacaccctgacctcagtgtttactggctgcatagccttgggcctgtggtggacccttctcctctgcaaaatggacataataaaaacaccagttcattgggatttagtgaggattaagtgaggcaatgcttttatttatttatttttgagacagrgtctcgatctgtcacccaagctagagtgcagtggcgtgatcttggctcactccaatctctgcctcctgagttcaagtgattctcctgcctcagcctcccgagtagctgagattacaggtgcccatcaccacgcctggctaatatttttgtatttttaatagagacggggtttcaccatgttgaccatgttgaccaggtctcgaactcctgacctcaggtgatccgcccctctccgccaccgtgcctagctagcctaaggcagtgcttttaaagtgctgagctctgtgtccaaggcatagcaagtgcttcatctttgggctcttamtgttatgagctgagttcctccctgcaaagccagggacttggcttctcagcaattccttgagtgcttttgctgtgtgcgaagaggccgtgcaccttttcccctctaagcaggctcgggtactgccagtagctcctgcttcgtaactcattttttgttgtctccttggctttttgcttttgttgtcatttaaaataggccatgatgttttgctttattttgtttttaactttttctctgtagcctaaagctactttctcgtccagtggcagaactggcctcactttgctttactactcttggcatcaagggccagagaaggaggmagggaggggcctggaagaagggtatgggtgtggaaaagcccaggagactgctccccagaatctctctctcaggtsgggrgttggaaggaggcgttgcctaggaagagttcagaaattctggagcctttgacctgatgatcccactcttgggaatttctatcttaattccaaggaaacaaaaatatcaccyacatgaagggggggtatgagtaagtacgttatgtgtatttacttgatggaatattatgccgctgttaaaatggtcattaggagaaaagcagctacatgggaaatatttgttttaatcactggtggaaagagcagtgtaaaaatggtggattmttttaattccaagtttgggctgggctrccagtcactgggggaagtgctttacctgtgtgatattgttacattctcctggaaaaccctcacaggtggggcgtggtttgccaccctcattacacagatggaaaaactgaggccctgaggggttaataatatggctgggatcactcagctagtgtgtactgttgctgaatcaaactcaggaagctggacagcaacattgtgctgcagaggtttgagtttcaggagatggagttactaatttttaaatacctttccaaaatttcttcaagtttggttgttacatttaattaaaagaaaggaagaacatggggctgggcctgctggtagctcagaggctgccccacactagcctggggaggcctggagcaaggcctacagtcacagaaggaactagagcaggtacttggatttctggccttctcaccagcacccttcttccacccatctcagaaatcagagctcaagggagactcagacatctaggagaattagccttcacctataggtgggtgtgggcaattaacaggtcacagcctgtggggccagcatgcggaagcccaggcaccaggtggggcagtggccctgctcatgtgtggcccacaggcagcatccagactggcctgtcagtgtggtttatagcaggcgaccccccttttggaaggctgattgttaagggcctaggtaaggtgacttagtctcagcctaatgaattacaggggtgtgggactaagcttcagtcccagcatttggagaaatagaatatatatatgtatcaggaaacccaaatgtttatcccatttggggaggaagaagatgagctgtgagatgggcagaccagagttcaaatttcagcctagtgatcttgggcaggcctggaatcctctctgcctcagttttcttatctataaaataggcattcctaactcctagttctggaggtctgggtcttcaggataaaatgaggtgctaattatggaatgctaagcatggatcctcacaccaggcaagtcagtgtttaaaaacccatagctagtcatgattatgtttgtagcttggttaactctgggcttggaggggttcctccaagcacacatgtcccagggygacagggcctgccggccttccttccttggcgtgcctttatctattttgggatggggacctgggcggggcttaggctacaggggagcagggaggatcttagcttctgtaactgagcagaactcaggaaagtctcagccaacacagaggacatgacatccgaggggagcyccagggatgcgtggaatttccatcaggtgagaagggaggaggaggcattctcggcagagggcctcataggaaccaaggcctagaggtctgaaagtatctgggcaggacccctctgcttcctcctgattgtgaccccagcacctcctgccacacaggactcagtaagtgctggggcagcttactcacaaacctcatgctctctttctttcttgcagaatgtgatggtggttccaaagctgtgatgaatggcttggcacctggcagcaatgggcaagacaaaggtaaggttcttggagagaaatctggattggtactggarggcatttctaaaggtgcggagtatgtcaggccggggccatcccatctgcctggtgcaaacatcattggcctaaccaagccataaactggtgacctgttccctacactgattttctgagacctggagcctgttgttgcatttcgggagtctgaggctgccattttcccactgtgaggtattaaaaactttccctagctcacaaggatgctgtgaatgacagatcagatacgwggaccaaggcgtatttcatgcctggtacagatggcatttatcagcctgaaatatcccttgctcagccttttaccttcacctgtaataaacagtgatgtgttcacagtcctgtccctaaggcaagagcctaaatcattaaaataaattatttcagtggcattaatttaatgcacatcctctcatagtttcagtttttaaaatttttaggataaaagatttaaatgtgaaatgaatgatggatgcgatgacctttgaggtcctgcttagcctggagactttcatcctgacctcagtgtggctgcacagatagcctggctacggggctcgcggtgccacttttattgtgttgtgtgatggatgctgaagctggagtgacaaggcatgggttcaagtcccagctctgccactcatgaacaggacatcttgagaggccctttatctttgtgggtgtgggttcccttatctataagatgagggaatttatgatctgccgtatttatttctgcttcaaattcagaattggaatgaacgctcatcccagtaaattttctggtaaccaagaggaagggccagaatccttgcattgggcatttaagtcaagatgcatctcaaagaataattccaaacaatttggcattttgatctttgtaatttccatctgggtcaacaaagtgttccttttaagacaaggcaaagtgtgaaaggaaccagccgtagagggtatgtccagagactaggaggggctggggtacagggcccaggtggtgtgggggtgggttccttggtggccagaggggacctgccatgctcctgttcttgcctccctgcctggtcgcccctctgcacccacggtgtggggccctggacagtctcgaccaagttgcacttagggaactctgaggggcagtgcctgtggagtggctgtaggcatgtgtttagcatccagtgaggagcatggggaggggtgggggccctattagtttaaagcctgtggggtcatggaccccatccatgtgaaytcatttatacaagagacttaaggcgtgtgggggagggtggcaggtggagtgagtcccactctctccttggtgagactcacctttgtctgcaaacaagcaggcaggagtgactgaagggcatcagggtggcctgaggtcactgaaccagagctgggatagctgagctccagtctcagcctctccgcttgagaactgaatgagcctgagcagttcactgagcctcttgcttcttcctctgaaaatggttacaaaagtctcccccaagcccatctcccaggtggagcagacaggaggatgctgtgagagcacatttgtgtcttaatccatgcagcagcgtcattggcaayctagtcattgatggccaggcgccgtgtgactgccccatgccttatgaggtgagctgacagcgggatggactggaaggtgcactgtctctggccgacatgcctcccttctgttgccttgacaggctcaccagcacgatgctgactttgcagtggcggtcttgttcccagacagccctacccgctgtgtttctgtagatctgtggccacagtcgactctggcaccttcacacagagctcccatccctctttatgtgctgcccttgaaagagaggacgaggggaggcctcacaacaggctcggtgtgaggagagttagggaacgtgcctaccatgagattacagaatctgggcaggcagggagcccagagaccctgcagatagataagtttgagcacccaggatgttcgagcggtagccttcaccacgtcccaggcaggcattcctgctctgccttagctcagctgggcattggggtcctgggctgtgcacttgggtgctgcccagagactacatatgcacttggacacttggcacctcctgaccaggaaagggtgggtttgagcaaggccatctgccgtttaacagatgggggctttgatttgcttggggccagagggctacaattatcggagcaggcacaagaccccggaagttatgctatgggggaagtagctctgatggctgaagggaccagacaactcacgatcttgttccttcgttcttccactcatctggagcccatgggccacagccctcctcctcggaacccactccccagccttctcccaagaggccctgtggaccctgagtgctctccccttcttctgtttgccaggccatctgtgtgcctctgtaaatctttgtccagagctttggcaagctcctggtgtggtaggaggcaccggtcaacactgaccagctgtatttgggtgatagttagaggggaggggtctgttgtcttggcctagaactctaaagagagaaagcaggttatttttaattactgcatctactgccctttgtattgttcttgttgtgtgggcgacttcctcctattgtccctgcccagttcctcaactgcctgagtgtttcccaaatgttctttctggatgcaccatttacccttttgtgttttcagcaactgccgaccctttacgcgcacgctctatttctgctgttaaaatcattcctgtgaagacagtgaaaaacgcctcaggcctagttctccctacaggtatctccttgggtcggtcgattttctctaactgtgagcggatcatggcatggttttcctttcttcttttcttctaacacgcactttgagctgaatcgttgcatgtttaggaggcattccgtctcacttcctcagcttgcttccttacttcctctgtgtatgtgaatgtctgtgtgcgttttcctgagagccagcgaatgtggggaggaactgaggacagaggccttgcccctcttttctttaggagaagggtcagtccagaggctcagctttccctttgggatgggtctgcggtgcatggacatcctaggctctccctagaggtttccagcccccagtactttagcaaaaactgcagtctccctgagaattaacctggtctcacagagaacctctgaacttagctgaatttgaagcagctgcccttaggtgcccaacctagattcgcctctgatgctcaccgggccatcccagagcatcccctttgccttccccagttttacctgcagccacttcctgcctctcccctccagagggtgggggagtacagttcagatgtcagctctggctcatcgcttccttctgtacaaagtggggacacatgaggcctacacagtactttatccaatggcgctttcagaagtaactgggctgtgtgtccaggaacctatggatgggctgcatccatcagtgtgcctctcatccttttgaagtgactatgaaccagttttcccaatagtttggtgacatcagtcgcttagcctcttgatagagttggataagtcagatgctctccaaggctgatgcttgccctgacacattgtgcgtttcgtgcattgcgttcaatacaagaggtgctgacgaggcaggtccattctcttgtctaacgctaatgatcattctccctgagttgttggcagggggctgctggcgtggaaggaaaggaaagaagaggctttgcttctctctgccctcggaggggaatggggatgagctggatgtttgaactcacatcctgcccagacacacaccctgaatgtcaacctgtmatcctaactgtgacaattttaggtcagggatctaggctgtgagcaatttgaaaacaaaacaaaactgtggcgttctgcatagctcagctgcacataaagaaacactctgcgtgtgcctcccagaactgtgtggtctgccctggttccctgcctccgtgactgatttcctgcaggatggcattcagatcttttgaagcgtattttgaaatctttctcaaggaaactctaaaagttgacctgggtctgttattaggccctagtgaaactgtaggagacgccaggaccctgtgaagacagctgaggctcggtggacactgctcattgaaggatttagccttctgagtcgtttttgttgctgtgagttttctttgttatgtttggaaagtgagactgtcactcgtgagctttctcgccaggcagcatatccttctgtctcagcattttgggagtcttgacttgctgatccaaggagatttgcttttccttttcccactggaaaactgcaaaggggtagttgttctccatgggaccacccgcccccaccccccccaccgcccccacttccgtagttgccagcctggtcttcaatgagaagtatggtctggaagcttgaaacatctttcataaactctttcttgaactgtgccttactaactggtcagaagtctgctcatcaacctaaacttcatttaataaaaggaataaacctgctttcattttgaaatgttttcagctgatagtataactcatccatttactcagaactcaccattgccgccatgttyccctaacttcatgatgcacagtaaacctctgaaaacttgcccctytccaccacccacagattaatttcattgaccacaggtgttcaaagactkcgcatggckgtaaccaggttcatctcattccccggctgtaacaatttgctaaccaactgtcctttaatccttcaggagtcttggattcagtcttcaattttggaccttttcttttcagacatggatcytacaaaaatctgcactgggaagggagcggtgactctccgggcctcgtcttcctacagggaaaccccaagcagtagccctgcgagccctcaggaaacccggcaacacgaaagcaaaccaggtgcgcggaagctagggaaagctgttcaaagccacgtgggaagggcgggaggaggctctggtgtttttgctcaggagggtgtgagttcatcagatacctcttgggggggggggsggtgtgtgtgtgtgtgtgtgtgtctcttacggtcccctgggacagtcaaatcatttggatgggtagtggtcaaagcctcaaactgacagtcacatgctgcagatgaaggcacagcaataaccacactttatgttagctttgactgagcaggtcatcctgtgaccacagccagtgctctgcagactgctctcatgcagactgaaatagcttagggcatggggggtaagtaagcggtgcgatgggctagaggttgggcttctcagagctcatccctgcttcctakaggttcactgtgacctgtccaggctgggctggaggtgcagccaggggagactgagaagtgtggatgactcaatgatcttgctcctggaaaagcagaggtggggagggctcaggcctgggattggccactagccagctgcgggagcaggatcaggaaagtagctcaaaggcccagtgtaaactaggagcaaagggagatcaaagaagccacatgaagcccatctccccaccttaacccatcacttgggaaacctgaggtattgaggtttagaactgggacttcagaaccgggtagatctctgtgcacaccctgtccccaccacctgtcagctgtgcaactttggtcgagttattcactgtctctcaaccctgatgaactgtagaatggggttgataattgcatctgcctcaggattattgtgaggaagaagtgtatgaagtgctgtgtatcatgcctggtggcatggaatagactgttagatgttagctgctatttgattatgattagattattttggcctctccagggacgactttgcacagcccaagtattctggtagttggcaaatgctgactttgagatcaggcacagttagtttagggtgagacagcacctctccactctgtagggcagtgactttcacactttagctgcatcagaatcacttggagtaaaaaggtaggttgctgggccccagcctggagttttagaatgtagggttcccacttgcaggtctgaggtagggtctgaaggttcacatttctgacaggttcatgctgatgctgctagtgcaaggactgcatctgagagctgctgctgtaggggatgggagcttgctttcttgaaggaaagggagggagaaatggaatggaggggaggaccattcccttgggaccagagaggctaggcagtagggtatgcagacccctctggtgcagcgggagtggtgtgttgtgataagacagatatgatatgtaggatggaaatggccagacctagcatcctggaaactgattttcttccttcccagctacccataacaggtgccagggcacatgctggtggatgaggccaggctagggtttgagcacaaacccctttctggtgatgttggtccccgtgagggcttctttgtccttaggctgagggcaggcccgagcagcccacagccctaaaagtcaacagagtagcttcttggtcctgcatccctgagcccagccctgactcctgacccgctggaaaggtgggggtgaggagagaaggcaaagttattttattctaaggctaacctcatccagcctctccaagcctaactgggacgacccacttccaagctagagagcatttggagaagagagaatcctaagggatgatgcaaagagaaaggctttaatgtgcagtcccctggcccagtcaaataaccttacaaaccaactgtcccgtcctctggcagcaaatggaggtggtggagagggagcttggagctccctctagtggttacagtgtggcattgacgtagaacacaatgcccaccaggtgtacgcctgtgctaccagtaccgtgtgtggatttgtttttttttctgtttcgttttctttttttgagacagggtttactctgttgcccagcttggagtacagtgatgtaatcatggtttgctgcagcctcggcctcccgggctcaatctgtcctcccacctcagcctcccaagtagctgaggtgcacgccaccacacttggctaatttttgtattttttgtagagacaaagtttctccatgttgcccaggttgatgttgaacttgtaggctcaagtgatccacctgcctcggcctggcaaagtgctgggattacaggtgtaagccaccatgcccggccccgtgtgtggatttgaggcacttttggaaacactctcttgtcccagaatacttttgtgtcttacaaatttctaccagctaatttggtgaaaagaaatttcaccacatctttttcaccaaaccatcagcagattgttttaaaatgcaaatactgtactcggaagaattaagggatagttatcagtcattcacaccttacagtaagttcatctttgtaaattgagatcatcgaatccaaataagcatacattcattcagcattatctatgtgccaggtgctgcatgagtcacttggaattgtgatgagaaaggaggaaaagagagcaattctaggtgcattaggtgagggcaaaaggcagtatgttgcaacaggagtcaggtgtggacttgtagtcagccatcttcctttcgggctgtgggtaagtcctagtgactttgagcccatatcaagtatgaggaacttgggccagatgctttccaagcctttctagctccagaatgctctgcgaccttasgaagtttggaaattagcctaacaaatggaatccctttgattggtgataaatttaagatggtacaggagggcagtttggatgaaaaggaacaagctgggtttgagtagaggaaacaaagaaaaaatccacgtgctcattaagtatacaacgcagactagaataagttaacactggggagtgggcttaaaagaggatgtcagtaagccgggcgcagtggctcacacctgtaatcccagcgctttgggaggccgaggtgggcagatcagttggggccagaagttcgagaccagcctggccaacatggtgaaaccccgtctctactaaaaatacaaaaatcagccaagcatggtgttgcacgcctgtaatcccagctactcgggaggctgaggcaggagaattgcttgaacccgggaggtgaaagttgcagtgagtgagatcatgccactgcattccagcatggaagacagagcaagattccatctcaaaaagaaaaaaaaaatgaggatgtgagtataggtaattcagaaatggtaatcttgtccccttaccatgctacctattggctaacatcctgctggctcttgactctgacagtgtccatgtcaccctccggactgacaacttgctggcccataccagtctattgtcctatcctggggcctaggagcccctgggccttccctggcttcataaaaacagttttcagcagtatttgcagacagccaagcccagtctggactgggagcccaagtgtgaggtagtggatggctcttgccaaggattgcttcctactcccaatgcctttgcagatagctaatgtcagatggcgtctggctccctcccttctcaccagggacagcatttgtcccccagctgctctgcctgcttcctctctgacttgctccctgtttgccaccttcttcaatgcctataggtgtccaggttgttgattatttgcctggactggaaggtccagtccctacctggtcccctgatacccacatttcagcagtgccccctatttctagtccttgtcccaaccccctcacctgggagagatgatatagttctggtttcacacagttctctactgaggctgagcactgccacttactgtctttgcggtatggacaaattactccaccttacagggcttcagttgccttatttgtaaattggagatgaccataacagagttgttgagattaaatgagctctttcttcttcttctttttttttttttttttttgagatggagtctcactctgtcacccaggctggagtacagtggtatgatctcggctcgctgcaacctctgcctcctgrgttcaagcaattctcttgcctcagcctcccaagtagctgggactataggtgtctgccaccacattcggctaattttttttgtatttttagtagagaccaggtttcactgtgttggccaggctggtcttgaactcctgacctcatgatccacccgccttggcctcccaaagtgctgggattacaggcatgagccaccacacccagctaaatgagctctttcatgtcaagcatttggcacaggcccaaagcaagtgctttttaagagtaaccattctagttcctgcaggtcaagaggcttgttaaagatttgaaagaatttcagtttgaagccatgagggcctcacccctagcatggtggcaatgggagtgaagagcagaggctgaggtcaaagtgtcttttggagaatgaaatgaccagggctccttgtggtgtatttaaggaccacagagaggtaagactccatgtggcccaggagatgccttccctggttggctaggagagtaattgtggcactcatggagttggggggatttgtgaagagtgctggaaagaatgttgaattccatcttttgacatgtcaagtttcttggcaagggaaggacttccaggagaatgtttctaatgggaatttggaaatttggagtccaatgtgtggatttggaagccatctgcatccacatgaactttgagagaatggagacattctcggtggagtgacagagagagcccttgaaattgcccagttaacactcattctccagactcctccattcaagtggtggcttaactcaagatccctgaccacagcttcccgatcagcctcctcatctctgaatgtggaccttggtttttggatcagaaccatctgaaaggaatggcagtaatcttagtaccgactccctgcccccaggagaaacctcatcaccttatccctgcctcctgacctcattgccacaccaggtctgagcgttggccatgttggttcagagtgacttgatcatgtcccaggtcagggtgttttcactccagacagggagcctgagttggtggtgagtgtgatacaaagctttctgtctggtatagtctaaagatcttgtggcttgatatatcaattcctgtgttctgacttagatgccagggtccagttcagcccttatattttgttaattctgtaccagttggctccagtccttactgcctgattcttgaatgcaaagttagctttggacataaagattcttggacctgcagtccaattatttcctctggttttgactctcacatttgctctccaggaatggcagtagcaaaaaggtaccataagaaggttaacattgaagcagttgaaggtaccccgtacctccattaaattagagtctttttgatgagtacatgtgtgagaattagggccaactgagaagttggagggaaaagtcctcacaagagtgcaccctcccttctgacaccagctgcaagttcaggggattcacaaaaccactctcaggtttggtacaatgctggagggactcacacaacttactgaaagctgctacactccgggttatggtttattgtagggaaaggatacagattaaaaaaggcaagagaagatgcacgtaggctggagtctggaaaaggtaccaaatgcggagcttctgttgcctactctgcgtggagagtcaggacatattatttcccagcagtgatgtgtgacagtgttctcrgagcattttcaaccaggaaatgtacctgagcctttgtgttcagcctttttgccatgtctccattacataggcatgatccactgcccacagggcagttctcaatctccagtccaactttgtaatcgattgagctcctggtggctcaaagcccccaccccaagtcacataattggtgtgactcaaagccccagataaacaaagtcactcctatcaggcatgactttccaagagctcagagattacatcccagaagctgagggccaaggccagacctctttttggataaagttaaattctctactgtacagtgtgaatacaaaataaacacaaataagatttggaacacccttagacttactattaacacctgtcatctacctcttaaatactcttaccagaacacatcaagactcactcagtgaaaattatcctaagatgccaagaagaattgactgatcagcaaaaggctttaaaacaggtcaaaatgaaattagcatagaatgagatgagataaaataaaatatcaggaggctacagccacaggccagaaaagattgcaaataaagaacagctggaggaaaagataaggcaaagtaaattatgctgcttgcagaaagggtaggtctctcaggactgcaaaagctctctaggatccaactttccgaggcactccccccagcttgggagctctaaggtaacatttattgaaagaagcattttgacagtctcttcaatcaggagttaataatggatgatcatgtgtgcaaaatttcatacttctgcacataggcacaaatggccctgggctgctaccaaccttccaagttcagaagatgaggtaatagatgaaggatgataagatgtcagaaatatagctctcctttaacaaggaagagaggaacatttaagaggtcctgagaactgcctttttgggataggggaaggggaacagttttaaagacttggaatgagaagaaaaagtggatctatccctaaggatcttacgttcttaaagctatttatcacatggcagagatcaacaatgctcatttttttccatggttttttcccccttatgctttgaattctgattttgcaaagcacatgctttatgccaaatactttcatttagtcctcttgattcaaaagaggtagatattatctccatttcacagacgtggccaggtcatttgccacaggatatgcagttagcaagatagagactcagggctgaaactaggcaatctgatgtcacagtgatggtcccttcatgatacctggagatttagaagaacagttcacatttcagctttccgtgacatagctgtttgctagtgtcacttgaatagaaccaacccaactgagaaccagaaagtgggcaaaataatgtgtccccaattgcatgtacgaagtttacatccttcactagatagcccttcactcagaacctgttgacgttagtatatgcataaatctaataaatttgatagacttatttgacaaaggtggactagaaatagcaacttagtaaagaagatggaacggtaaaagtgatagctgtgagggaagaagtggaccattgtcatggcatgtcaccaggtgtttaagggcctgccaggtgtgaggggagctctgagccagggagccgtctggatgcgacagggagtgtggtgcactcagaggtattttcatgtacctgatctttgattctcaaagattctccarttcttcaattggagagaatcaargaatcatactccctgtgaggagtatggggtaaggcttatattttataggtgagaaaagtaaaatttagcatggctagtgaacttgctcctggtcatacaagccggtacattgcagtaatgtgagcaaaacacatgtcctgtatgtacctttcccaactacagttgtccctcagtatctgccagtgattggttccaggaccttcacggataccaaaatctgaggatgctcaagtcccttatataaaatggcattgtatttgtacataacctatgcagatctcctgtatattttaaataatctctagattacttgtaatacctaatataagtgctatgtaaatagttgttactctgtattttttaaatgttgtattattattgttttcttattttgtgttttttcccccaatatttgatccacggttggttgaattaacagatgcggaatccgtggatatggagggctgaccgcacgcagtttttgygggttggagaagacaaatggcagtgaattgtctgtaaggaagtggcagaaatgtaacaggcaacctgctaaaagaatatgtagctaaattttaaaactgttttaaaggggaaaaaataaaatggatacagctagttttccagaataaggacgtttttgagtgtacctctcatcagtggttctccaggtgtcggttacggactggcagtctcagcatcacctgcaaacttgttagaaatgcagattcttgggcctcacctcakacttactgcatcagaagtgccaggatccaggcccagccacctgtgtttcagcaagccctgatgcagctacaccactgctatacgtgaatgccaatcacttggaacctttaccctaccttgccttctgctccagctctttttggctcccaccacctctctgaagcatagcatccacttcatggccgatggggaggctggtggctgtgggggtggtaggcagagtgctaggtttggattctggagacttgggctgactgctttgtcacttcctggctgtgcgactttgggcaagtcatttggcctctctgtttcctcatccatgaaggagagtgattacctacttcacagagttgttgtgtacactgaactaaaactaaatgggcgtaacagtgactcacagtggcacttagagaggtgttcagtaaatgtctgtaaatctcaacttggcatctggaaagcccatgtctagcacctgagggacccacattgaaacggaggattgggcagtgagactgcagtgttagtccctctttctctacatggtgaggcaagaggaggcagcctgggaaaagaaggggttaaggcttggctagattagggattggcaaactgtggctgtgagcggaatctggcctgtgcctttttttgtacagccctcgagctaagaagggcttttacattttttaatggttgaaagaaaaatcaaaagaagaatggtattgtatgccacatgaaaattttatgaaattcagattttagtgtccataaataaaggtttattggaacacagccatgctcattcatttacatatcatctgtggctgcctttgtcctacaatagcagagccaagtagttgcatctgagaccatatggcccataaaacctaaaatatttactatctggccctctatagaaaaaagtctgtggacccctgggttagatcaaggacagagagtagagacaagagatgatacagaagatgataaatagcaaacattttctgagctttgccaggcactgtggtaggcattttgcatgcataaatgttcttattaacaacacttataaaacaggcatatcattatctccatttttcagatgggcaaactgaggcttataacttgcccagggtcatagaacccttaggtggtagacccaggatatgaattgaggcccagctgcctttccagtcgggcttgtaaccactgcactctgctgcctcatggtgctatgtgctatgtggatcagactagaggtttagggtctctgaaatgcatcaggcagtggctgggaaggctgaagggagacaggggtgctttgtgrtgtgatgaacactcaggaagggtgattagattttgaaatgtttatgtgcctcatttaatggaaagaagaaaagcaggcagggaggaaaaaaaagtctttatcgcagcagatacctcccagcttaagtcatgtgctgccccttagcccagcaccagcacccctggaaaaagtgtttatccacttctstctctcctgggcctgttagttggttgggagtggtcattctgagcccacagcaggctcaaggaaggggaatgagagtcagtgagtagggactggacagtagagaattctgttgcctttttgtctgtaaaataagaatgtcaagtaacaattgtttcttcatccctgtgaatgtgagccttgtgttttcaaaggtcagtgcctgtgagcacatcatggtttckagtgggttcctatggtaatcaggccatcgtgactgagggcattttgtgtcaaacaacggggtgctggattttcaaccttctatgcagtttcatgcttgtttcctgcaaatgtaaccatttctgtttttccccttttcttgttttcatcctttctgcaccacgtgtaggtctggagccagagccttcttcagcaggtatggcttctcttgcattctcacctttctggccttctaccaaggaccccggagttacaggggaaccagggagttattccctgtgagtgagrgattttttcctctctatttctcagatgagtggaggctttcttccagtgctgatgccaatggaaatgcccagccctcttcactcgctgccaagggctacagaagtgtgcatcccaaccttccttctgacaagtcccaggtaggcatgtgcccaagggcagggtggggactggtgagtggtacctgttcttgagtctcttaacttagactggtgacttcctgcttccccagttggataacggaataggtttcaagcttttggacaactctggataagctctgcaaggacctagctaagggaaagttggggtcaaggggagcagaggcatggaatgaggttggtctgtaccagggtgttggaaataggccttgatgcctatttaggtttgttctgtatgtagaagtgttctgaaagagggaattcatttagccttggatatgtaggaaaaaggtctgagacgtttttwaaaaaaattctttagagtgtaatattcaagagaagaatgcatcttgtgtttattccagttgttttctggagatggggctgtaagaactccagcaacagtatccttacagattaagatcaggtagctgtggccagaccctaagtccagcagcccaggaacaggcaaaatggcagtacagcccagctgtatcctacaaaagaaatcccccaaagctgtacaaattggagtaaggatacttttgcttaagtctttccccctaggtggctttcctgatcttttctttcttccctctcctgttgttactttgtcattttgatgatgggaatagaccatgttttaatttaggtgatctgtgatgaacatttttgcatacaggagccacatctgtggagtcgactactacttctctctctctctccccctctctctcccctctctctctttctctcttcctctctctttttttaagacagggtctctatctgttgcccaggccagagtgcaatggtgtcatcgtagcccactgaagcctccaacggctggcctcaagccattctcccaccttggcttcccaaagtgttgggattataggtgtgagacaccacacctagcctagtcctttctcttaaaggaagctgtgctgctcaaaaactatagcagaaatgtgttccttgtgtggtccgcttccctgtgccttccttctgtgaaggtgttccccgaactcacaaggagtccgcaaattctgcaggtccttcctagttcccaccccacttctccaatgatcctctggttcctgttgtgaggatgtaaaaatgcacttgctgctgaaatgaagctgaatcagagatgatgtttttctccctctctacagatgcttatcctcctcagcgtggaattggttgcttaattgtctgccttgtatgctgagcaacaaacacatttagcctttctgccacctgctatgacttgcctccctaggtacagccatatgcatcctgggtcactggttagaaccaggagctgcgaatgagcctggctttttgaagtcttcattagacagagggactggggaggtcacttgtccggtaaatgacttgccatggttttcccgtccctaaaccctttcacagtgtataaatgtgctgcctgtggcagacatacttcttttcaaccatctcaagaatggatgccatcagctctatgcagatcaagaaacagtgctgattaattcaaagcaaatgtagaagcatgtcctcttccactatcagtgacttagttcaaagggtaactcagtaattctttttggcttcttaagcagctcttttgaaaagacaattttaaaagcatgtgaagtaaataaaaattcttttaaaatttatttaacacagctttattgagcatctccgtggtgttcagatcactgtgtgaaacattgccctcaagaggtttataagggtgaacaccctataatatcttttacaaagtatgttttcttatctgtcactatccaagaattttctttctactggggttcccttttaagggaacytggtaaattgctcataaagaggttttatcctttatattcaatgtaaaatcagccattcaaatttcaggaacctttaggtcatgcattacctcttaggtgtgttttctgaatggaaacatgacttcttgtctatatagtgattgccagagctgtaagtatgcactggcttagaggagggaattggtagtttatagaactgtataaactataaacataccaggattttccagaagcctcatattttcactgacccaccttctgaaaagataaatagaatttcatttatagccaactgggcagaatgcagactgcctgtgtggttcctacaatgtttacaacaaaaagtagttccctgcatgtaaagtcactgtgcctatcccctttcttcttcaggactaaaagaagccccagggcaggagacctttggatctgagtgcactgttgatgctctggggaagcgtcctctctacagggtcaaagccctgggaaggctcatgcctgatgtaatgcaccatatatggcgagagccaaaataagttagaaactcactgaagctgatttctatctttggacaagaagaaatcacatatgggacatttgagctgaaagtaaaagtaaatctgagctcaaatcaaaatgatcttttgcttacctccctactgccattatcagcatacccgccagtccctttggtgcgtgctagcccacgtgttttgtttctagaatcgtttagtctgtaaacatgttcactgaaaccaagtgagttcacctgaaagcttttgctgttgctgaatactagagaggggctattcattttgttttttttttggctggtgcatattcactggcactgccatgggtgccctgtggaaaggataggcattgaattagtcaaggatatccaaatgagctgcttgtccaatgagcttatatgtgtgccttgaaaactgagtttaaggaataggttatttactatttctgggttgatgttctaatctggactcaaaaaactttttttttttttttgacagtcttgctctgtcacctaggctggagtgcagaggtgccatcacagcttactgcagccttgacctcctgggctcaagcaatcttcccttctcagcctccttagtagctggggctacaggtgtgtgccaccacacctggctatttcttttttaaattttttgtagagacagagtctcgctgtattgcccaggctggtctcagactcaagtggtccttctgccttggtcttccaaagtgctgggattacaggcttaaaccacagtgcccaacctataaaacttttaartatttttcacctattcaccctttctaacattctttcttcttgccacctgtatgccacaaatataagaatgaaataggccaggtgcagtggctcatgcctgtaatcccagcactttgggaggctgaggtgggtggatcgcctgaggtcaggagttcgagaccagtctggccaacatggtgaaaccctgtctttacttaaaaaaaatacaaaaattagccaggtgtgatggcaggcacctatgtataatcctagctactcagtaggctgaggcaggagaatagcttgaacctgggaggcggaggttgcagtgagccaagattgtgccattgcactccagctggggtgacaagagcgagacttagtctcaaaaaaaaaagaatgaaataaaattggccgggcgctgtggctgacgcctgtaatcccagcactttgggaggccaaggcgggcagatcacttgaggtcaggagttcaagaccagcctggccaacatggtgaaaactcgtctctactaaaaatacaaaaattagccgggtgtggtggcacaggcctatagtctcggctactcaggaggctgaggcaggagaattgcttgaacctgggagacggaggttgcagtgagccaaggtcacaccactgcactctagcctgcgcaacagggtgagactgcatctcggggaaaaaaaaaaaaaaagaatgaaataaaattaaaaataaattcaaaatagacccagatcttgcaccctccccatttttggtcaaaattcacttaccgatattgatcagactctaatatacttcacttgcgtaatttggaggaaagttctggttttcttctagaactgggatatctttaaaaataggagccattcacgcctgtaatcccagcactttgagaggccgaggcaggtggatcacaaggtcaggagctcaagaccatcctggccagcatggtgaaaccccgtctctactaaaaatacaaaaaattagctgggtgtggtgacatgggcttgtcccagctactcaggaggctgaggcaggagaattgcttgaacctgggaggcggaggttgtagtgagcctagattgtgccactgcactccagcctgggtgacagagtgggactatgtctcaaaaaaaaaaaaaaaaaggagccattaaagaaaacctaggctgggtgcagtggctcactcctgtaatcccagcactttgggaggctgaggtgggcagattatgaggtcaggagattgagaccatcctggctaacacggtgaaaccccgtctgtactaaaaatacaaaaaattagccaggcatggtggcatgtgcctatagtctcagctacttgggaggctgaggcaggagaatcacttgaacccaggaggcggaggttgcaatgagccgagatcgcgccactgcagtcccgcctgggtgacagagcgagattccatctcgaaacaaaataaaacaaaacaaaagaaaagaaaatctagcaaaatgcagtttcctcatctcatagtctaattcccagttgagccgcagattgccagatgactcttgttgacatgaggatcagactggagggtcatcccatttcctgaccctcttctccactgagacccaaagaggagcagtgttgagaagagagggatgctgtgtgagcctctggacctgcaaccagagctttgggcttaagctgtgaatctgaggctgatcatttacctctggggctgattccctttgtgtggtggtgggctgggtgagatgggcatggggctagattttgagaaactaggcacagtccaatccggtagaggccaattcagtccttcattgcctggtccccttttttgtgtacatcaaaaatgggagactgtgtgcttttaatctcatgcttgtcttccttctaataattagcttcatcaaattctttcctctgagaaaagagcacatgtgtattcaaaaatccttagcattctcttcttagggcacgttaatttgttatgcttatggaattgagtgctaaatctcagtgactcaattaagacatctgtctcctgtgaacacaaataaggacggttcttccagttctccttttcctaaaggaaaagaatgaaaggcactcaaaagagttccagtgaacataaacttctaaggccaaaggctcgaagataaatcttgagggaaggaggtttgagagggagttgggggctttggtgcttctcccactggtgtttagttcacttggctcccttcttgagtcaggatgtctaataaagatgcagtcagccaaggattggtgtcacaattgatgtagcatgtggcctgctacgggctgggctcagcctctctggatacaaaggagagtcaggcctacctctccaggtgagtgggattcagtctttggcttcacttagaattgtggatactaggaggagtctaacctgaggatgtgctgaaaaacgtgttaagaattgtttttgcttgaatcatgttatgctgtcgtttctaatgatcgtccttctttccatttcccctcctctttcttttttccctgtttgataacatatcttgaaaatattgctaaaggttctctctcccccacrccctcctctccctcaaaaggaccgctttgcatggcagtcccccaccatccacaatacctataaggattccctctacctgagctcaccaaagccttatgtcccactcggcacccccagacagcagaacccctcacaaccccagcctatctctgtcctcctggcagctggatcggctcccaaaggtgtggtgtgccctggttccttgcttccggactccacgttccccagtgcttcatcccaaccccagcagcgctatgcagccaccaggacagtttatcataagaatgtgagctctaacccatgtcatgaggcagttgggattaaaaaggtcagcagcttatatgtaccttgtttatccaataacatttgcctggcggcgtcagaaaactcctctcgtgttgcacgtgaccctgccgaaggcactcccttggaggctgcgggcacccgagcaccggctcccggccttgtctcccgcacagccggcacaggaaaaccaccccctgctcctcctcctgaccctcccaagctattctttgacatccgtaaagatgccgttaaccgtggcgagagtccttccctggggactcaggcttcgttcccagatgtgagaccacctgtgctaggcccccgggttacctctgatcccgaaaaccggaagagcaaagaatcttaccttttgcagccgagttatccagccaaggcaagaaattaggaatgtttgtgtgtcttctctactgtctctttcaaaactgatgcgagcagctcattgttcactgggctgccctaccctccctttcctcattaatgttgttgtggcttgagtcccgaattcttctgtctgaacctttcagcacagtactctctttgtctgtctctcttttctgtaaatgtgtaagtatgccggagcgtggaatccagagactaataacatggtgagaaactcattgttcatgttttattacaaggtgccaaagaaattgtatttactcccaagcttttaggctctatggtggtgttgtggggttaaacacagcctgcctgcctgttctgttcttctttctctctcataaagtgttaaaaggattcaaaaatagatggatgaaaagcggagttggatggggttccctctgtgtcatggagtgtcagaaggccagctggccagctccgactgtctcatgtactctgaggaaagggcactgattaaatatttctcagagtacctcactgcatgcccactctcaaccgtttaaatatggaattctttcctcgtatcatacccctttccataacgacccccttatttccacaggatgccacttcctccagtgcagcccagccggaggtaatagttgtccctctctacctggttaatactgacagagggcaagaaggcactgccagacctccaacacctctggggcctcttggctgcgtccccacaatcccagcgactgcctctgccgcctcacctctgaccttcccgactctagatgatttcattccccctcatctgcagaggtggccccaccacagccagccagcccgcgcctctggctcctttgcccccattagccagrcgccaccatccttctcaccaccacctccgctggtccctcctgcccyggaggacctccgcagagtctcrgagcctgacctcacrggagctgtttcgagtaccgtaagcttgctggactcccctcctcrcggcttttctgaatgtctcctcccagcagtcacattccctttctcactgaagcactgagcyctgaggacagcactggctgccgctgtgcctgtgtgatgactggagccgtgtcccctgtcactagcgtgcatgcttcccgtgtgtcttccctgggtctctcggggctgttccccatctctgcagtgcctcatctgctctgtcctgttgggaatgcacatctttctccctcagaagacaacatctgtggcctttatgttgactggccatgcttttcacaggccaggtcgggggtcgtgtggtgagctgaggaaagctaagaattatgggggaaagcaacggcaggcgtggtgggtgctacttaccagggagcggggagatctcggggaggaagcgattctctgattctcttgttgacctagtgagtaaataaactctctgtagtatacagaaatgacagagactaggattttttttttttttttttttttttttttttttttgtgagagagttgggtttaagtgagcaagtgggtctgaaagccctgtacaaatgttaggacttttacctcaaaaggcaggcaattgctagggcccctgaggagaaggtcccaggagcctctgtgacaaaacagtgccccagtggtcacaggaagtcaaagggccctgctgcctcaggtcccatcctgtgggtgggggaatgagttcccatcacagccgggaaagcccaactgcttagagaaaaagctgagtcaaagtgcttgggtctcctttttccttaggagccctgggaattgagagaatctgataacttcattgcgagttgtaatatgggaatacgtgaatctactcacagggcttcgggttcagtaggatcgagtgtaaaagttcctgttatggagcttgacatagagaaggtgcctagtgaatgttagctatgttgctgaggacttgccctggcaaatgagggccagggtcactcaaaagcaagtaactggttagttaacaattcatcattgagtttctgccgtggtctaggcattctgctaagtaccctgggtacaaccatgagtcagggtcttgttctcaaagggatttttggagtaggaggtcacttctcaagctttgtgtacatgggatcatctgagggtcagggaggcttgtttaaatcgtcaccctcaggttatactcctagaatttctgactgagtgggtctggagaagagcctaggaatctcacttggtagcaagtgctcaggggtttcagatgctggggtccacaccctacattttgagatacagtcatgtagtgggtcatgcaattggctgatggaactaagcgtttactgacatccctttgtgtaaagatgtatgcctgcaaaactgttccaaatggcttgttaagctgaagccagtcatgcagaaatcaggaaggaaacttttcatttggcttattagataaattataatgaggcatcaaacacatcaaagctgggaaccgttacatcctgagctggggcctgttctgaaatctctagtgctgtgcagtgtagttaggtcagcaccaggcccaatgtgacccacggccttggatatccttctagctttgaatttcrcagctcagtcccattgragaaaaatgctagatgtttccctggtctattcccgtctaccttcagctgaacttagaatttagaagccactcttgttttggggagttcaagcatcttccctttgacacagattatgtttgcctggagtagcaggtaaggtgtcttatgtttagtgtcctcatagaccattgtgagtagtttgattgtgtattctataatttatttgtgtagacctaggttttcatatcgagttggttttaggtgtaccaggacagattcgttgggacagggtcctcagtttctcaaacctgactaatcagcctggtgtagacctcccagaaggacctcagtttggcctgatagcttcgggtttggccctgggtaacagaggtgaaaaaggaaactacttggattcctcttcctcctctgtcaagaggaggagcctctgtggatggtgtctgagctgtgagctgatgcctgctccatctgtagctagttgagagaaagaaggaagaataaaagtcatgttaattgatttgagttattttaatcratagctgtttttgtgatgttccagaaataagacacaaaataaaatctgtaaagtgcttaatgctcatatgatccacccaaacatcacattaggcatttatactttaaagagctgtatgcctgatattttgtgtttcttggatgcattcaggcagtttttaatgatatgtcatttatcataattatatcactttggagataaattargaaaagtgtagttatttttcactttctaaatggaggaatcaaggtgaggcacttttgtataaaatcatactgtgcttctcaagtcttgagaaaaggttttattcatgacattgagctgcccctcataactaaatagcggcggctatttagtggactttcagaagagatagactgacctaggcagtgttgtgaagttcctactgtgtgttgggagctgtcctgggtgctgatgcccatatcctcttttgataagcatttgttttcttgctacaaacatttgctcagacacaacattgctgaaagatcccacctgtcagtcacgtgrcatttactagcacctgctatctgcagggcattgggctaggtgtgagtgagggggtggccctcatcttgtgggtacgttcacaggagttgatctttgattaytgcttcaagataattattgcctcaaaagtaactatttaaaatcttgttcttaaagccttttaagaagagcatcctcaatttatggtttataaactcaaaaatagaaatgtatagatatcatgaaggaaactgtctaaatattcttagtaccttttggggtcttattttgttttaaaagactggcattatccccaatatgcagattataatgttagtattaataattttattggtatttctggcagagacctcaggtttttaaagtcaggattctcacaagtcttarggatctttgtcactttaatattagagtgaaaaaaatgtcacagtaggataggataatctccaaatctcagaagcaagcatcagtaaaattgctyggtgatgctgatgctaagagtagctttctgaaaaaactgttgctcaactcctccctgttcttacattgatgtcttcttgtcctcacattgtcttacatttctctgtacagtgtactaaacttccctgatttttcccaattaaaccagctcttgttcttggatcgcatttggaattgcatgggttttgcatgttattctacttggatttgaatttggtttttcagtaaccagattgacccacaactgttaacaggtggacctaatgaatgatgttgctgagacttgcagtaacattcaccttctctctctcctccgccccatactaataccaacaaagaggataagcattccggcttaaacttctaactggaattaatgatacgatgtatctcattgattgcatttctttttataattaagatcattgtaaagctttaaatttcttctttttaaaaaacattaacactagctttttatatttacagttagttacattgtttgtttgttcgtttcaggattccagtcctctactaaatgaagtttcttcttcccttattggaactgattcccaagcctttccatcagttagcaagccttcatccgcctatccctccacaacgattgtcaatcctactattgtgctcttgcaacacaatcgaggtaagagaggcttgtgccccactmccagcccactggaatcaacatagctattccatgatacttgggtcagaaattctgttatttcacagaaattttcacaaatcccattgtttcccaaggccatttgccccrgtttactcactctcatggcccataaaataaatcccagcagacagacagaggcccctgatctgaggtgatatcaggtgtctgaataagtaagctgggttcgttccacttcttgggtgttcatgattgtcttcttcaaatcgtaacaccaaaaaaaaggagaaaggaaaaagtttgtgtctcttgatggtaatagagatttaacttcgaaaatctaggtacaataatacctcttttaagtagtatcttaaatgatttatttttttgacataatgaaatttagagagagcagaattttgagtatcaaatttaaaaaagaaaacatattgtgtagacaattttctggaatgtaaaacacgtttttgtaccttgaaaacagagactattgaatttttcttgaagactcactggccttcattcttgccagctgtttgtctctgtactatgtggctctaggcagctctgcttagagttttcatgtttgttttctgtagtgtctctgactgcttctggttggtttttctgcttctctgaaaagcagagaagctttgagttggggtgaagcggaagttctttgggtatatgttgacccttctgctttaaaattccagacgatgattctaaatcccaagttttcctttttggaattccatacaggaataaactttgtctttacaaaagtcctttgcagcatgaaatgtaaagttttcaagctgtttcctcatgtagaaagggcttgttagtctgaatttctgataacagtggaggtttaattattttgttcagagctcacrtcttccttttgactctgtgctctctgacttcacagttttcctccactcctccccctcccccttcctctctgcattaatttgaatgagaatgggactggagtctatttttaattgttttccttactaaatagagtttttctgtttcctgcttctaacttgaaaagcagatgaataaaacattttctttcacttcagatctttccactaaaatcttaaggttgttttagtagttttgtatttttttcactatgtgtggctcctgtattaattttcacccatgaatctgggttcttaataaaaagggccccagctcccacacggaaccatgcrggagcccattctccttcagcggtgccatgccccttactggcagtggctctccttgcccagaaagtgtctgtaatgtgggacaaagtgaaattttgtttctctgaacttccttgtgactcatatttaaaaaaaaaaaaattcagtcaaacagaattaagttagttcccagaaggacaggcagtttctttaaaaatgggatttattcccaaggcaacttggtttttgggaaatgccaagtgtaatgtcagctgcttctgccaagtccctctgatgacacctagtgagacatctttgggcacagaaatgcctrtagttcctttttgtttcttccttgaatagatggattccttttatttacccaaatgcctttggttcttgcctttctctgttgtccaagtcctgcccttgggtttaaaaatcagaattgtgcagcctgagacacacatccttcagaaaaggatacaagtaatgacattcattttttggaattaaatgatagatttccataaagagcaaaaccatatgttcactaagcaggtggggcaggaagcatcaggaagaagagaagagcctcactggcccagccccgtattactaatcataaatggggtttaggtcaagtgtttttggcattgctttggaatttgcctaacctggcagctctgctttgcttcataaacagtacccataaaaataatttcttaattattgcaaagtctcctgagggaataactttactccacttctggaattctagttttgtcatcctaaaaaatgcctccctccctgccccccccccyttttttttttttttttttttttgcctagactgtcccagggcatagtgtggcaataatcctgtctctccaagccagcttacccctactagaaacagaggggcactgagcctctggcctggtactgatggttgtgaacaacacagccctttccccttctttcctgagttttcacaccacatgggtatgaagacaaatygcttaccatctgtctgggagggaggctttgaatcagaaaactctcaggatgaaaagaggtgcgtgggtccccttgcttagggcttctcagtctatgtgcgtcggatcctgagagtcttgttaacttgcaggttcagcctcaagaggtttggggtggaggagacgagattctacattttcagcaagcttgctaggcataccagtgccactggcccaccgaccacattgagaactagagctcagaggttcccagacttacggacacatgaagcagtctagggatcaccctagggtttttcattctaatgctttaaaataacaccactagaaagtggccactgttacctgtgttgcatgtcatcctatgaaagaaaggctatttcacacctcaaaactggagacaacatagtcttttttttttttttttttttttttgagacaaggtctcactctgttgttgaggctagagtgcagtggtgcagtcatggctcacttcatcctcaacctcccaggctcaggtgattctcccacctcagcctctcgatgccagtagytgggaccacaggcgtgtgccaccacacctggataattttaaaatattttttgtagagacggggttttaccatgttgcctaggctagtcctgatcccctgggctcaagggatctgcctgcctcggcctcccaaagtgctgggattataggcatgagccaccgtgcctggccaacgtggtctttttcatttatttatttatttattttttgaggcagggtctttctatgtcacccaggctggagttcagtggcacgatcttggctcactgcaacctctgcctcccaggttcaagtaattctcatgcctcagcctctggagtagctgggattataggcgtgtgccaccacgcctggctaatttttgtattttttagtagaaatggggtttcgccatgttggcaacatgatcttttaagtggaatacattcacttctgccagctggagctcagcagccttcagtgtagtgtgtgggaaccgtaggtccccttagtaccaatagggccctttgacataacagacaaggaaactgaggccgagaggtttagtgaattggccattgtcatctgaaagttgctggcagagctgaggccagagctgcactgggcttctgcatgttcagccagtacgaacctcatccatgtggcagaggtggccaggcaccgcttcccaggctgtgagctcctgagctgctcgctgtttacttctggttcacactgattgtagcaggagggtgggaacgcagccaaggggaatgatgacagtacccacgggttggcaaatgttctatttttatctatgtggctgctttatatttagcggctgtggaaggtaaaggtcatttttgtactctcatctcatagcacgtacacattaggactccacaaaggagatgtggcttcccttccacatgagtgcccaggatggtgagaaaccaataacccttcaatgccaaggaccagcaaggtcttgatsactagaattggaatgaactctggactaggagtcagggatccaggttctagatccagctgattttcagtgttatcttgggcgatttgtgccccttatctgaagtttctcggccattgctgattttttaaggatttttcttgtactccggacaagccagattactatagtgactaaggccaggctttcgtttcctcctctgtacaatgggaaagaataatcgtacccaactactagagttgttgcaaagtttacaagtgttatttgcaaaagcgctaaaacagygcctggcatttagcaagctctcaggagacggtcactgtcatggttgtgattataattacatttccctcaaaaggtaccaagactggggtcatataaggccttgctcacttgaagctggagggttggatggattcccttctatgatggaatcatcttgagataagatgtaaacagctagaaaattgtggcagtcccctgaatcctggtgtagatctggaagcggggcrggctgggagacaccacactggcataatgggagccacgctaatacccctgcagtcagctggctgcatgcacattgtaccatctaagtccagaggacagtgaggactcagggttgakmtcctaacgagttatgccagggcttcttsgtcttactatgtgctgtataaatcttacttacactgtgtgttcttttatcacagaacagcaaaaacgactcagtagcctttcaggtaggtgagaaatatttatttatgtgttaatccctgttcctgttgaaaccgtcttccggtcacygcccgatattcaatcagcaatatcttccaagatcctctgatgtcttggggagactctttgttgctggactaccaagatgatgaaaataggcatagttcctgcctccctggagcttgcagggtggtggacagaccagaccagtgagccacactagtaaacatgtcccatggaactgtgataagggccttgatggataagaacaggatgttctgggttaaaaagaaccaggagtccagctttagatgcagtgttcatggcaggcctctctgaagaggtcatctttctgctgcttctgtctcccttctggatgtgaggagtcaggggttgggagatatgggcaagttctctcctttttgggtggcaagcccaaatgccagtagatgcccctggggtggtgggtccaggtgagaaccttccgaccagcagtgcccagaagacagtgtgagaaaactgcttcttgaatttgagcaggcatcagaaattcctggagagcttgtcgaaactcagattcctaggccatccccctagagatttggatttaatggtgggtatgagtaagaatttgcatttctttttcttcccttttcttttcttttcttttttttttttgatacagcatcttgctctgtcacccagactggagtgcagtggcacaatcatagcttactgcagccttgaactgctgggctcatgtgatcctcctacctcagcctcctgagtagctgggactacaggtgtgcaccaccatgcccagctagttttttttttaaagtttttttgtagagctggagtctcactatgttgccaaggctggtgtcaaatcctgacytcaagcaatcctcctccctcagcctcctaaagttctgggattataggcaccagctactgtgcctggccaagagaatgtgcatttctgcccagctccctggtgatgccaatgctgccctctgtgctgaccgcacttgagtgtggcaggtggcaagagttgacaatggtggggagtgactgcaaatataatcagacatatacaaatataattagctcaccccttgataaagtgtgtaggattgggaccatgtcagagtagggagggaacccaggaaggggaatgtgtagctatttccttgtggcttcctgtagccattctgctttgaatcctgggtctggtgctgcctcaggcaggttatctaagtctctgggcttcagttttcttactatcaagtgaggaaagctgtagtgcctcccaggttgtatgacgatcagatgagattccgctcattaacagmtcagcactgagctgctgcttaatagatgcatgacttaatagatgtgcattcctgttaccaggcggcgctctgtgggttcacttaccattgtattcagggcttcctttgtaccctgcactgcacggggctctgaggctacatcagggaactgtgctgcccttgagctgctaatagtgtggcgcaagagtgtgtaacttttctttgttaatggactccttgagagaagctattgaaggcaatagattgattctaaaaaaaaaaaaaaaaaagccacacgtgtaaacatgtgcacatgatttctgtggatttgcacacactcatgaatttcagggttcagaatcactgattggtggataacaaaagccactgttttctgaacagctgctacatgatttctgtgcaacttcatgccactgctgttctgtgattggtggcgagcctgggtggggaggacatggggttctcacaccctctcagccttatcaggacttggctctgagaccaagacaggctgtggttgacctcaaggtgtccttggctgtccctcctccagctgccactctccagcccacctcattctctggccccagccgaggttgctaagagtggtggctctgaaaaaaaaaggtggctcctgtgggctccttcctgttggtgggaatttgaaagaagggtagaatagataaaaaaggcctccagccatacgttaggagatgcagagtttggtcctagctccttcttcttggagctgtgtgtttctgtgtgagtgacttcatccctctaagccagtttcctcatatgggaaacaagggtggtaatccttgccccagcctggaggaggtgttattgtgacaggaatggggaggatgttttgtgcattgagaaaagacatgtaaaaatttgagggtgggccggacgcagtggttcatgcctgtaatcccagcacttagggaggctgaggcaggtggatcacaacgtcaagagatggagaccatcctggccaacatggtgaaaacccgtctctactaaaaatacaaaaattagctggacatggtggcacgtgcctgtagtcccagctacttgggaggctgaggcaggagaatcgcttgaaacagggaggcgaaggttgcagtgagctgagatcgtgccactgcactccagcctggtgacagagtaagactctgtctcaaaaaaaaaaaaaaacaaatgagggtggctccaccgtgctggcagctcaggcttattccttggctctaaaataagactgatgctatcgctttctctgagttttgggacagatctgctgatgatgtttgatagagtggggcctaaagtaggtgctcactaaatattagtttatgctttaaaagaagtagtacagctttgttcaggagctcctgaaagagagagggctggctgggttggcactctctagtctcttagagcaagtaaggcttagccatcacctgtggggacgggactccagggctgccagcctccctctctgtagcagatttttgttgagtctccatgaggcttgatgttcagggagagtcatctgggaatgaagcctacatggtgttctcaggtacctctcagtccccttggggagatggatgggataataagataagggctgggagagagaggctggcatagggtgtagagaggccatcgttcttctgcagagaagtgtgagcattgctgtaatcctcagtcaccagctctcagtgtgaagaaaagggaagctatcccacctccttcaaacagaggccccatctgaggttatcaatattgtcatttatttagtggcccagaaccttccattttaaagcacagtataaaactagaaggaggctagatttgcagtggctcacacttgtaatcccaacattttggaaggccaagatgggcagattgcttgagctcaggactttgagaccagcctgggcaacatggtgaaaccccgtctctataaaaaaaaaaatacaaaaaattagctggggccaggcgcagtgactcacacctgtaatcccaacactttgggaggcagaggcaggcagttgggaggcagaggtgggcagattccttgagcccaggagtttgagaccagcttgggcaatatggcaaaatcccatttccacagaaatacaaaaaaactagccagatgtggtggcgcacacctgtagtcccagctacttgggaggcaaaggtgggaggatcacctgagctcagggaggtcaaggctgcagtgagccatgatcatgccactgcacttcagcctgggtaagagaataagaccctgtgtaattagaaaaaaaaaaaaaaaaagactaagaggaaatgcccccaggatgtcatgtgaaggatcagcattttcctactgagaaaatagcaagccctcattgtaatatggatgtcaatacctggccctgtcacctgcatggtacagttaagtgtcactttgggttttcattatgtaaagtgacactttttcttcaggggctctctgtatattgaaatccactcagtgatgagtcacatgaccacaagctttcaagtaaaacaattcagggctaaattttgtagatcaaaaggacactggcagctttaggagaaatccatggactatcagcctgattttttcagtcaagtgtgattgttgttagagtcacctgccttgaccctgagtatggcatgtctgtgatcctcaccatgatcttaaagcaccatgtaagactgagcttgaactcagcctcatctgctcctttctgctcacattcaacagaaggcctttccaggtgggaggagaatgttcagcagagccacattaagggtagacttgggtaactcaaaatccctctacacttccaggcttcctgccaaatccttggccttgcattgcaattttctgggagcatgagaactcattccataaagccaatctgttcttaacatcctttgacattgatggtgatgatgccagggatcaggctttctgaagcacttaccaagccttgaaatcatytggatgtgggcagtcacgaccccatggaggagaatgaaagttgtaaaacctgagcatgctggagtcattgtttcccccacttctacagcgtctcctccacttacagacatctctgactttgtcacaactttgcatgtgtcctcacattcttccttttcacccgagtgtagtcccccagccagcagtctgcacctgttcctttcttaaagacgagaacctgtccatagtcaatcaataagcaggttttaactgagcaattactaattgccacagcacatcttgatgcccttcatccttacctcatgggcctcattctcactgacaggattttaggctcccttggcctaaacttttttttttttttttttttttgagacagagtcttgctttattgctgaggctggagtgtagtggcatgatcatggcttactgtagcttcgaactcccaggctcaggagatcctcccaacttagcctcccaagagctgaagcaacaggcatgtgcctggctaattttttaattttttgtagcgatggggtctcgctatgttgcccaggctggtcttgaactcctaggttcaagcaatcctcctgcctcagcctcctgatatgttgagaggcatgagccacggcacccagccagcttaaacctttttgtccctaatcctttgacctcttgaattaccatctagtacattccttcctctgtgctgaactccccactcactcccccaacttcctgcttacaccttcaaccctctgtgcaatctggcacccacccccactgccctcctgaagttgctccctcagagtgttcctgtgacttctctcttgcctaatctaatgccgcctcctcctctgcttcaatttctggggtttttttttttttttcttttgagacatttaaccacccacttcttggarttctgtcttccctggttcagtggcaccttgtgtacttttctggttcatctcctgtccctcggatkactttgcatcactttggggattcttttgccttgcagctataactgtggtgyccttccatgcatgactttagcgctttactctggccttgcttctgtccaccactgagctctgccatctccctggcgtcagccatcacttttgggctgatgcctccaaagttgcactcctgttagggtgtctcacctgggccccttcatagttcctctagggatctctagggcattcctacttgagtatcttgctgtcttctcaaagttaccatagtccatatggaagcagccatttctccctcccattcctaacccaattctaacttctccatttggcttaggccaggcttccagacttgaaaccttggtaccatctttgaaagaggcaagacaggatgtggttcagagaggactgctagagtcaggtggacattaggccacatcacagcttggctatgagctggttgtgtggccgcaggcagggtactttaacttctctgtgtattgatcctttaactattaaaaaaaaaaggtgataatagtttcttcctcatagatctttgggaggataaaatgagagaacgtaaatgaagagtttattgcattgcttggcacataattagctcagtagtccagaggcccccaagcatttatttaagctgttcctctggagcacccttygcttcctgtgagtctgattggcttctcttctgagaatcggcctttgtcaccctgcattctcattgctggctcacttggtttttctgcccactagactgtaagctccctgaaggctaagattctggaatrctcaccttcatgtccacaaggcagagcrcaatgtctgcccaataaataaatgtcatagcttggaagccagattctattaagtaattttataatcttaggtcatatgtggtatctttgttagtgctctatatcttccagtcttgaacaaaaataatctataatgtatacttagcaatgtacagcttcctgaacactttggcataagttatcctgataagtcctctcaccacattgctgtgagcttgccaatagaagtgttatccctgtttttggataggaaaactgaggcatggaaaagttaagtgacttcctcaagaggaatcgaaaactttcaagtaatgttagccccatcctgtggttctacctgttccttaatttctagaacagtcagaactactcagttgaccagagcacgatgtgcatacctctgcaaagctctgatcacactgttggcaaggcttttttttttttttaaggaccagatgataaatattttagactttgcaggccatatggtttctgtcacagctactcaactcggccatcgtagtgcaaaagcacccataaataatatgtaaaggaattggcatggttgtgttccagtaaaatcagcccatgggccaaagtttgctgacccctgctctaaacagaactaattccagttgagaattagcagacacgcttccccccagctagcctgttcaggagcgttttgttttgcagctaccaaaagagcttcagctaacaattgcttttcatttccagatcctgtctcagaaagaagagtgggagagcaggactcagcaccaacccaggaaaaacccacctcacctggcaaggctattgaaaaaagagcaaaggatgacagtaggcgggtggtgaagagcactcaggacttaagcgatgtttccatggatgaagtgggcatcccactccgggtatgtatattgayttagaggtccttcttaggcttcatcttaagctgtgacaagtgtacaytctgagtacatgtgaaccccatcacaccatcgtctctgtaagccccatgagtgccagatcccccagaagctatgctccagacttggtgtacaacagcttttcccaaagtgggtgttggatgttataagtcctatgaataaagggtttcgtggtcaagtaaatgtgaggaaaagctgggtggaccaagtcagagagatttctctgctgtagaacttttcagaggctttgagtatgtgagtgttctagggacaatgttatgggcagtcttcattattgttctgtgtggagcatgttgagaaattcctggtccagggtaagagaatcctggggagagtgtgaggcccaaggtcccttttgacaggttcaggaagatctccctggatgggagatcacatgtcatccaaagtgagtagggaacactaagggaacctcagaatggattccgccagccaagcctccaggacagagcaggtctcatggcatccctgacccagctctccccggcagcacaggcctgccagtcctgcaggccctaaggaattccagggaacaggctccaatgggcaagaaacatttaacataaagctaggcaacttttggaactggatttgggtgaattccattcttttccatgtgtctactagaccattgcctgcaatatgttccactgtgatttccatttaacaaatatgtccctttggaagaggccaatagaaaccacagtggactaagcctcaaaataactcttctctggttctaagtagtaatatagaaggagagttattcctaagagaaatcacagctaccatttgctgagtacattatctcatttaagcatcactcatccaagtgagtaatggatactaatatcatttccatcttatagatgaggaaatggggactcagggatttgttactcatccaagattgcacagcttgtgggtgacagaatggtctgtctgactcccaaacccttacccctaaccgtcacgttggatggcccttccactcaccttctcatcagctctgtgactttgggcagtttgctttgtcattctgtatctcatttcctcttctgtaaagtgggagtgaaaatatctagccacctatctgtcaccttccttgttttatttttatcttaaaaaaaaagcccaaccattccaactttgtggttagggtgaaaactctggcagtggatgctataacgagttatgttttaatgtatgcattctaaatctggccctatgcaaggtgactcggatacattgctgttgaataatctagaatggttgggggcacagcatgataagcaaatatcctttgtctcttatatttctaggagactttccttcagtttggcacagtctatatatggagagattctatctaaaagtgaaattttaaaaatttaaaaatggatacctttcaagtgtatcctcatccactgttttcaaaatctgtatcctttcagccaaatattaccctgtagattgaggtttgggactcttggtttttctctttctaaaaagttttgcctttttaaaaaagataaatgtggctgagttttgaattcagatattgttactttccattttgattttgaaatcataggaggtctgaaatgtgtcaagatagtcatttaattttgctctttrcctttgtttttctacagaacactgagagatcaaaagactggtacaagactatgtttaaacagatccacaaactgaacagaggtactgattttcatttgtagaagctgtgctgtgctatgtgccaatacacgttttgtgggcctgaactcrctttgctaggatgccagaagactgggtcctgcagttggacctcattaggtactggtctgcctgagcccagccatgcaccttcagagcacaggagggaggaagcacttgtgtgcctgcctcagaggtrgaatttgagatctgctctcaaatccttcctcccagatgtggaatgcagcaggctgagcccagcactctgcctgtgctccagcatctgtctgcctgggatgtgagcagctccatcacccacctgcttccagctttaggtacatctccctgtgtcagcccatgactgccttgtgggcagagtgagttgagaatgcactgaactgggaattaagaacactgttctctggccgggcgcggtggctcaagcctgtaatcccaggactttgggaggctgaggcgggtggatcacctgaagttaggagttygagaccagcctgaccaatgtggagaaaccccatctctactaaaaatacaaaattagctgggcgtggtgccacatgcctgtaatcccagctacttggaggctgaggcaggagaatcacttgaacccgggaggcggaggttgcggtgagccaagattgcgccattgcactccagcttgggcaacaagagtgaaactctgtctcaaaaaaaaaaaaaaatgttctcacctggattgagtcccccaagcactcgggtaaccttggaccaatcatgtacctttctgtgtttgttctgcttcctttcctccggagaatgtcacaggtctaaaggagaacacatttggccttgtgaagtagaatgcatagtacgcctctcaggctgtgttaatacgaacaataatctgccccagctgagagccagcccttggcaggtagccctgagagtcagtcaggagctgacacaccaaagcccgctcaagctgaaagagcagcacttccaaatcagatgccggctgggctatcagcaggtgacccagcatggagaaccgcaggccagtgcttgggcaggacatgaccccaccggctcccatcgctgcctgtgccgccagtcagctgataggcgggatgcagctgcactgtgggaagggtaccacttctcccacaggcagagcatcctgcccttccccttacccacatccagtctggctgcctgtcatggatgacacatgaaggcaaagagaaagtgttctggtcagtgttcccacctaagtgcaatctctctgatgagctgcggatgccagctaacatcactgttaattaactcctgctgggttcaaagtgaacctgggtgtgcccctgttcaaactgtttctaaatatcgaagtgctctaaatattgaggcgtttagcatttccaatgaagagtaaatccgctgtggttgggtggatgagcgtggtcacagtggtgaaactaaatgcttggatttctgtgatcagatggggtcatctccactcatcacttcctgaagtcactgcccatttcgtcttgcaatctgtgactctcacctttagwcccagctttggaagcctaactgcagagacattaatgcatgtaaatgtgcaaaatatgtaattttgccccacaggcagctttggtgttctcatgttatagttcttaatctaaattgtaggtgctaaacaaaactacctgccttaatggtaggcagaggtatttgaaaaattaatgatctacttgtttgctgaatgtccacaatacaagctttgatttaaaaaaatcatgttaggatagcatgtttattacatactatttattatcatacttaatatttcttgcctatcaaaagtaaaaacctgatgctttatgttaaatgtttcttgcccattggagcctgttcatggcaattctttgtccaagaagagtaatggtattgtctctttctatgtgtctcggtaattcaggcaaaaggactggatttttaaaagcagtttgaatttctttcatatcactagtgaagcttagtatgttccagaattcaaggagcctaaattgtatgtggattcctactcgtttattctctccatttgtatcttcctctattctctctcccaaacctgctcctctgcctagacactcctgaagaaaacccttatttccctacgtacaaattccctgaacttcctgaaatccagcaaacttccgaaggtaccataaacttagacagcatatctgttgtccgagctttaaattaattcttatagttccattgtaggcataagatttgggcttttagattttattttcatagtcatttttggctggtgaaaattttatttcactcatttgcatgatgtgctatgttaaaataactaaatcctttctaattcattaatctatttttaagtgtgatgcctgtgtgctttaataacactaaaataggtaatcagtcattcgaaagagtcaattgggatttgtcacttcctctacttcctggtggatagtttcaaaatccactgcttttctctgctacagaggacaatccttacactcccacctaccagtttcctgcatctactcctagtcctaaatctgaaggtaattaaaggaaaattgtgtgcctctccgtactggtgctgctactttcttttttaccttggggtttttcctggtggctaagggctgtttcccagtcatttgcttccctctaaccttgtgttttgtggtggtgtctcactccttgctgactgtatcaccggagtctatccagatggtattttagtcctattcccctagggtttacatgattaacggggtagccagtgttagcttagttacaatgttttgaacatgtggggctctggtcaaagctgcctttacccaactacccaaggctttgtacctgaggtggtcacctgatgctggtggttgagcagtgactcagggaagctgagtcattatagcgggtgggcaggaggtagatctgtaaccgtcaacaggaaaattacccagttctcatgcctgcaactaactcttttcatgggccctcagggtatctctctttggtagggaattcctaaagaggtatccaggtataagattcagtcatagtgggagatgacatttcttgaaaataagggttttagctaagctggaaaacatttaatgaaagagctggataggaatttgtacctgctggggaagacagtcacatttgtgtctaagaaatattatttctggggaaaaagtctaaatgtcaaggaagtttctaaaatgtgagttaggggcaacatcttgagaattatcctaatagcagggattatctgatctttggatgagtaatccagatgagggtgaatagatacggtatggaggaggaagttttgttaaatactgttctaggatgagatgttgagtgctctgaacttcattcattcaagtagtattgaacacttgctgtgtgccaggcactgtcgttggaagtaatgccatgaataggacatgtaccccatcctcagaagttcccatctggcagagagttcagcaaggtcacttcagctgactgagtccagtgtgggggcagttgtgagagcgtgtgtccagaacgccacagaaaaccttgccggcacacagtgggccctcagcaatacctggaaaacarcgatgatgaaggctttggactgtggagccagagttctttcttagggatgaatgccagtgccaccatcttgatgcttctctactctaatctgctcagcagaccatccctctcagcccttctcatcattggtaaagttgttcattcaatcattcaccaaactcttactgatcagtcatatatgagatgacacactgggatgtgttggatacagttaaaataccataggccatttttggtctctcatatgccccagtaattggtttccaaccatttcatacctggggcctattttgaatgaaaagaaaggtctaccaaacaaacccagacttacagaactaaaagctgataatttaattctgatcagtgtcttcctcaaggccaagaagagtctatttggtgtagagagcgcagtctttctgtctcatgataytgattaccacacaaaagcattggtgaagaaacaactgactgagttgagttagggagttttttcagagtaattttgactagttgcaattttcgatttgtgctttatttagacttgcaaacccagccaaactcgtaagataagagtttccttcaaggcaacaagcacagagcatgcagaaggcacagtatcccacggacacaggcaaaggaaggcccacttgaagaaatcctgtggagaggaacagtggctcccatcagactggaagactgccttaggcctgccacaggcagcacccacagcttccacagtcagcttggctgttggtccaaagacagggtttcatggccgcacagccagagctcctgtgtcatcagccaccatacctagcaacccctgctgacgatcacgtctgatttttggcatgcatcaagtccagcatatggggaactggatttattttgcatagaggcataaacagtaagggatgtcatgataacttatcacatataatttagaagcaaaccttactatttttttattttcagagaccgaaaggaagaaatagtcttaaagaataaaaaggaaaaaattaggttggatataaaaaaattaatagcaaagatgattagactttaacacaagtttctaaaaagacatcctccctggagatcttttaaaaatagggtaaattccatctcacgcccccactcctgcctagatgacatatccgggcatagatcactgatgtattcaattagatcaaggcttcttacaagtgatggaaacatttgagctagatcatttaaaataatcacagggtttttggttttgaggtttttttttttttttttaaaccatttcaagagagtctctggatttcttgatccttgatttgtggttttcatgttgtctgtgagctccagcagggcctcatcagccctgtccgtggtgctgctccagctctgtgctccccgataggtggccctgcgctctatgcacatccttcttaacataggaaagatgtatgcctttcaaagaaaggcattcaagacagatcagcaccaagtggaggctctacccacagatgttaatgtgcattaagaaacagcgttactgagaaatctgagccatcattccagagtctctctcctggggagaagtttgtttttactgctgggtttttttgtttggttttaattcagaatttggaactagaattatttgtaataaacctatcaaagcctagcctaagggctgccatctctgtctaaattctagttgtttatacagtataaaaaagacatttctaaagctctcaaagctgatcctcctcaatagtaagggactgtgtgaaagtttgtttatgctggcttagcaaccttcttttttcccccagctacagtgaaaaagcaaacttytggccagacttttagactataaatagagttatcatgtctcagtcaatgagggttaaaatgttctttttaaaaaaagaaaactttggaaattccaagaaggggcagtcacttttaatcattttgtaatcttggagactgctgtctacgggatggaagagatgttagcagaagggagggggcaaactgtgcagaaacagcttcagaaatgcagtcccccactttcttccctgctgctttaaggaacagcagtgtggtggccaacatctcagcagcccagagtggtaatcctattaataataatagtcttataatgacataaccaccacctcagtgactatgtggctgtcattaattgagcccttgccacatacaagtttctgtgctgaatatatcactattgttatctcattttcattctcccagcagccccatgaagtaactcttcattttatcaatgaggagtatgaggttcagagagattaagtaatatatgcaagattacacagtaagtagcagaaccaggattcaaacctaggtgtttggggctccattaacacaggcttttactcaacgctgctatactgccctgcagattcctttccccttcctgactctgtgttcttgcttgtccccttcttgtccagaggctctctggtatctgactgcaggcattcagcttcccctgagtcagtcctgcctcagtctgctaagccagtacctcccagatggtgcctggaaatatatagttagggacccagcacggtggctcatgcctgtaatttcagcactttgggaggccgaggtgggcagatcacctgaggtcaagagttcgagaccagcctggccaacatagtgaaacsctgtctttactaaaaatacaaaaaaaaaaattagccagtgggcgtgatggcaggcgcctgtaatcccagctacttgggaggctgaggcaagagaatcacttgaatctgggatgcagaggttgcagtgagccgagatcgcaccactgcactccaccatgggcaacagagtgagtctctgtctcaaaaaaaaaaaaaaaaaaaaaaagaatatatagttaggaaaactcctcaagtgattgacagacaggattgagaaccactgggatggggaaataccactcttcccagcccccaaaaagagatgaagaaaattggccagatgcagttttgggaatatggatataggatgagaatggagaatgcagattttatagaattagcgccccctactctgaacacgcccaaatgatgttggctcacttggcacatttgatgtcaagaagagggaaaatattttcaaataatggctcagaatttgcagcaaaaccagataactggtatgttacttcatggtccgtggcttctcctgactttccgtgacctgtgaggacctcctggaccatgtcagtgrgaaggcgagtccaggtgaagccccagagaccagcttttttcccatgctttgtgatgcctcttctaccacttcaggctggtggtggccactgccacctctcggtgatgtcactcaagacaccacctctaggcatccccaggttgtggtgtcaaaatggtctgtctcagtgcttcttcctcattcctagaagagattgcactaaggcaaggatttaaagaggtgcatcttctcaggcacagctgtagttgagttaaaataattctctactggccttacaggatttgtaagaatagctttgttttgtttgagttcaagcaaataattctattgtgaagatgcttggccgggatctgtgcctcctgccccagactccagccagtactgcccaggggagagtctgagtcgttctcctaatgagagcttcccaggagatctccgcctagcaagtgcaaaaggcattgactggcctgtgggacagttaagaaacggtagcagttactccctttccaccttcacggcccaggagttcgatagcagatgaagacggtgagtcttcttctaaccctatggttctcccaaactttctcctttaacttattttttgccccacctcattctcttcttcagagttctatttttttctctgtgtcttctataactactgtacaccctatcctggtctttttttttgcattctttagaacttgattgccacatctgtaatcccagctactcaggaggtcagggcagggggatcacttgagcccaggattttgaggctgcagtgagctacgatcacaccactgtactccctccagtctgggcaacaaagtgaaaccctgtctcttaaaaaaaaaaagaacttgatggcctttaactaaaacatagacagctttgtaatgctttcccccaagctctctgggcttcctgacgtccttgcccttttgtttgttcttcctttcccaccccacccagactcagtacccaactctacatctgtgtcttttcccctgactactatttttgttcatgggggtcatgtatgactatctttacccttttatcctttctcttcctaagtgtggggggtaaagccagaggaggatttaggttgagcagtggaagaaagattgtgtcaaaaatgagccattaatatttggaaaattgttttaagtttaaaggcctgagaaatgcataaaattgaaatttaattgatataggcaagtggttatgcaaatgatttttgcccatcctcccattttagtcaggcaattttttagaacaactttcaacmastactttcttcagttgtctttgagatttttataaattaaagaaaaagaaacaggaaaaaaaagtgatttggaagctcatttaaagtcactgtggttgaaaaggcaattatgtggctcctggcagttgtaggagagtggctgtccccaaatcgagctaccaaggacagaytgccaaagcccaagaagaatcattgtgtaaacattagagctcagctggaccttcagaggcctaagtgagttgtttaccctgtgtaaatcccatgcagtgttacagcttcctgcaaatcactggcataggaaggtctgagtgttgctgccaaggtttgatgtctgctgcttggagctctgaggagcacaattagcatgtggttccaccatgagcagaaaccacaagatttctgcacagctgagcccactctagcattgttttaaagggcctttggagaaatactgaaggccgagcttcaggtgctaggtaatagacaatttgagaaacatttcatttaatgtgtcttaactatattgagcacacttgtcccatttggctggctctagtgtggagaaatgcagacatgctccttacactgttttcccattccttggtatttctaactgcatacccatcatccccagtgttgacttagcctcccaggagaaggcagcaaggaacagcaactattaatagaaggtgtagaggccgggcagtggctcatgcctgtaatctcagctctttgggaggctgatgcgggtggatcacctgcggtcaggagttcgagaccagcttgacaaatatggtgaaaccccatctctactaaaaatacaaaaacaagctgggcgtggtggcaggagcttgtagtcccagctactcgggaggctgtgacaggagaactgcttgaacccgggaggcaaatgttgcagtgagccaagatcgcaccactgcactccagcctgggcaacagagtgagactctgtctcaaaaaaaaaaaaaaaagaaaagatgtagcaagagtgactcaatgttatccattgtccctggagaccagcaagaggaaaactagaaatgtgaggcaactcagaaaacttgcttaaacatcactgagggcgaggggatgcaaaaatcgggcaaaggcttcaggggctggaaattggcctggccagcagtgcagtgcatgccttgagtttcaagacagcatctttctctgcctcttccataataacatggtaatagaatagccagtctttcagctttcccaggattgggcagatgaagctggggtgaaagaacacagtaggcatctctgtcacggggctactagatgacatagggaagtggaatctgaaagaccttaaatccatttctgctttgtctgtctcactctgcagctaagggcaaatcttctcaacctacttgggctttcatttccttgtctgtaaaatgaggtatttagttcctcttggagttttttgcaagggtgaagtgagatgacgttagtaaattaccagccattgttagtcacttaatactgggagctacaattattatttttattcataagctgaggtaaaatatccttccattagatttacaagacaagcatcgaaaattaaaataatggattttacaagccctagaacttgtcctgtgttatagttgttcagatgaatctgtatgacttgtttgtcctgttaaaagttcatgagctgaaatccacatatcagaacctgtggaccctttgggagaaatgaaaacttgttcacagatactctcctgccctgtgttagcctggcgtgggtgagatttctctactgacactgaataagaaacaagtgttttttgttttttttttctttagagacaaagtcttgctctgtcatgtcacccaggctggagtgcagtggtacagtcatakctcactgcagcctcaaactcctagactcaagcaatcctcccacctcagcctcccaagtagctgggactgcaggtgtgtgctgccatgcatggctaattttttaaaaawttttttgtagagatgggatctcgctatgttgcccaggctggtcttgggtttctggcctcaagcaatcttcccgccccagcctcccaaagcactggggttatagatgtgagccaccaggcccgtccaagaaaggagctttaagcacattcagttcttcagacgcctctgttacctgcatcccccaactccaactttcctgcttctccctctccttttcaaagtacatacattgttaaacttcccaagtagtgctgtttttttccscatcttataagaactatttctcattttcttcttcttactttttttttttcttttcaagacagagtctcactccatcagccaggctggagtacaggggcacaatcttggctcaccccaacctctgcctctggggttcaagcaattcttctgccttagcctcccaagtagctgggactacaggtacatgccaccacgcctggctaatttttgtatttttaatagagacggggtttcaccatgttggtcaggctggtctcaaactcctgacctcaagcgatacacccacctcagcctcccaaagtgctggggttacaggcatgtgccaccacgctcaaccagtatttctcattttcttctaataaaccttctagagttccacattagaaagctctagatagaaacattttttaaagagctcaggcttaaaaaaaaaaaacaaaaaaacctgaatatttaaatgccactcctctccacccagtgaaaactttgcttcttacttcatgaaccaggtaatagttataaattaaccttcatcttatcatctactgataagctataatttctccatgattcagagatgtacagggttttgagctaaaatgctaggctacgttttaagcagtgcatacatcagcttctaactagctaacttttcatttgggcattttcattgcagcattttttctaatcaagtccctgtaatcaaagctcatttttagttttctttgacatcatggcattttgtcagtataatcagacgttctgtttaaaaaaacaactgtcaacacacaatttttcagaataatctttcaaaaaatctttttctggatcccactttatctctttcccctgttctattttcagaagataacataaataagcttacacactcaatttaaaatagtgaaaggcttggctatgttggtagaaaaaaaccttaagccctgttcaaccttgatattgataaattcttgaaagtgagggaaggaagtaggggaaaaggtaccttggtacccgatgcctgtcccttatgtgggccaagggagacctgagacaaataaaaatggggaaaagaggggacaagaaggagtgattgttagagaggctgtctgaataatgctttatcaaaataatagcaatgttagcttatttatatttcataaaatattctggccttgtctcttctgaaacttaaaatgatttgcatagaaacaaggacttgattaacacgaagtcaccaccatacagtggattctttgacttgtctttgcaggttagttcatgtgctttcctaaagttgtcatgaactttagggaaggaattgggtcttcattccatgtatgtgaattttgaatccagattagcaagatgttagaaatgggaaaggctaactatttcagactaactctttttggtgtagtgctttggagggaccatcatggatgtagtgactagataaagtgcattttcaggacagtcccactttaaaaacctgttcccatcaatgtgcctgtggtctgatttttagttcagaagatacagccacttccacaagggcttcaggtcttgtataggttctgcaagttttagaacccagtgtctagcctacgtaggratgtgtgtcatgcctttggagagccacctcccaccatagagacacgcgtgagtttgatttgctccagagatgcagtttagatactcactccgagtagtacctttgcagaggaagccgtttgacgatgggtctgttgtgttcccaggaaacaaatctactcagggaaccagattgaggtggaatcaaaacaaattttgatgagggttttctcaaattcttctcttagctgcagaacttctttgttaatgatgtgtatgaaagcttaccatataaaacaggtcaaagctgaggcaagaagctagaaaacccaccctctgggcctctccttcccacccaatagcagcccgaggccccggtaagaggcctttcaagacactgttgaactcggtgagcttaaccgtacactgagctggtgcagccggggatccatctcagcccctgcttcccactcagccagacccagaccctgcattccagctttggttgtgtggattctctagagaaggacccttggctgtttgtccccatgcatttcttgatgtcaggcagcagcatctgccagttgtgactgtcctgcctggactacaggtttggttgggtgtgccctacaaaccttgctcctctcaaacgtgctctgccgtggtgtagcttctggcgcttcactcttctgtccgctgggatccctaggggggctggatgctcgtaccagactgtggaaatggggaacatacaacttggttctcttaccttagccagacttctcctgactacattttgttttgttcaatagatgatgattcagatctgtactctcccagatactcattttctgaagacagtaagtgacttcaaataacctggttgtgggggcggaagggaaagtggtggatgagggaagataattgccctgttctcagttttcatgagttttaagtcttttgtctgcactgtctttctccagcaaaatctcccctttctgtgcctcgstcaaaaagtgagatgagctrcattgatggtgagaaggtagtcaagaggtcggccacactacccctcccagcccgctcttcctcactgaagtcaagctcagaaaggtaagtgcccgcttgtctctcattcattcagcctgggccttgttgttcattgagacctaggagcctccattcttaggaatgtggaatttgagtctgtcccttgtcacctattagcagtgacttatttcttagcctcaatgtcctcctctgtaaaatggggataaaaatagcatgattcctagtaaggatagtgcaaggttaaaatgagataatacctgtaaacattcctggtagcacttagctcctagtatgggagccaagttaagagtatgggcttaattaatattgactatcattatcataactttttgcattttcacaagagaaatcttaactgcaagatttgtcacatgttgtcatattctttttgcatactgtgttcacatattcatagcaatgactataacttaaaaagaagccacactttttaatgtccatttactcatgcaacatgtattattgagacataagccttggacttgttctagtgacagcattaataaatctcttaaaatgcctgcagcaaacaaaacagttttctttttcttgagttttttttttttttttttgagacggagttttgctctgtcatccaggctggagtacagtggtgtgatctcggctcactgcaccctctgcctcccaggttcaagcagttctcatgcctcaggctcccgagtagctaggactgcaggtgcacacaccactcacggttaatttttgtatttttttagtagagacagggtttcgccgtgttggctaggctggtcccaaacacctgacttgagttcttatctctaaaaatgccctctgaagcaatctcctcatgctatttggacaggagttccatgcatcttctagccccaacttacaccacttctcaacacacaaaaggctctggccaaacaaaattatttacttcttccttaaatacacatccaatttcacacctctaccttttccaacctcacagacaaattaatggctgtttttaaaagcaccacacgaacttaagtggcctctacctgaggagtttgataattaatttgaaaagaaacctgggtatacccacaaatcctttatagttgccttcatccagaacccactgggtgtattccctgcagatttaaccatatatcatggaaggatataggtatatataaatcattgtctctgccttcaagaagtttacagccttgcatgaaaaacttaatcacagtgcaaagtacggtaatgcacaaataaaaaatttgcaaactagagcttatagtaaacaaaacagcttggtactagcataaaaacagacatatagaccaatggaacagaatagagaacccaaaaacaaatccacacacctattgtgaacttattttccacaaaggtgccaagaacatacattgggagaaagacagacccttcaataaatggtgctgggaaaactggttatgcagaagggtgaagctagacccccatctctcaccatatacaaaaatcaaaccaaaatcaattactgacttgaatctaaggtctcaacccacagttacctcttccctattccagtgtggaacagggaagaatgcaattatggtagcaactgacatttattgtgtggttactatgggcctggcactttgctcagtgattacatgtgctgtctcatgtaaattgtttagtccttacaacaaccccatttttcagatgaggaaactgagataccaagaggtgaaatacttgtctaagatcacctagttagcaaggggtgtggcaggatttgaaccacagtcaactggctccaggacctgtgttctctctcactgctctagtgtgaatgggaagtacaggcatgtctgtggaatgaaaagcccatagagcgaagcaaggtgaaagatttttccagagccagctttgctgctgccgcctctgttcctgttgctttgtccactccccttcctggtgcctggttttgagcacaggacatctcaagccttgtgagaagcgaacaccaaactttaactggttgttttgagaagcaaaccaacacaactaaattgttcaccctgactccgatgttatgctttggatataacagttctttgattacactacagccatccaaagtcagaccgtgtcggaagctaatgccagttgtcatgaaaatagctctaatagaattttctttctgcagaaatgactgggaacccccagataagaaagtagayacaagaaaatatcgtgcagagcccaagagcatttaygaatatcagcctggcaagtcttccgttctgaccaacgaaaagatggtaatgtgcatattaaagttattttgtctcaccgtgcccatgttctttaatcagaatgcattgtgcagttggattacattctttccccttgagatagacttaactttgttttgaagataatgacaaaaatgaagtacttttacccttttcatttttgcaggtgttcataaaataagtcccgcgagtctgcttttaaaaaaccctcttattgtggctctgttgctttttttgtgcatggttttaactaatattaatttttctactaacataaagattgattttgctgctgtctttttttgaatgtctaagtgttcatttatcaggcttgtcattaagtggactgaagtccagttttttttaagtgactctgaacaggcataaattttgtacaagttactagaatgtcattaaaagctacataactaataggatgttgtgacttggaaaaaaggcccaggctgttagaatatatcctttaggtcttccttttttgacaagtgcaatattgaggacaaatttcatattcgacctggtttatgattccctatacaagtttacatctctaagcaattatgagtggggaaaatggtttgtatgcatatagcagaccaccctggaaaagcggcctcttctgtgaaacaggaagaattcttacacattgattagtttcatacctgccaatcatgcatccttttattaacccttcattgggaaaagctgttttggaattgtgatcctggttaaggggttctccaaagctccataaacattgcagtcctccagcaggacagcaggatggaattattatgctggagttyggtttttattaaaatacggtcaccacaatgtctacagaataagcaggcctctgaaatgcaggctcaaattatgttccctccgcctcatcggctctacatgttttgaaagaagaatcgatttgacttctactgagataaaaatgtgacatctctaaaagcactgaaggataagtcattttaattaggaaaaaaggtcaacaggtcacagaaatacttagagttgtcattcttcagcgttcactatgcaccagttatttcaagcagaaagttcagagaggagcacagaatttcgccttctccccactactgcccttctttggaggttctctgctgttagaagatactgtacgtaagaaacatagaaggtaaccttgcacccaggtgctcctgcaaagaaagtcgtgctccttgggtttatttccaacactgggacccaccattacatattaatacatttaaatgatttcagggactctgtagacctttgagtgtttttgttttggcagtattaccattcatagattttcatggctcttaccgaaggctcccttttcttaatttctcctttgtttccagctcctttccctggttcttagtcatttaaccactactcagaactaggaaaaacaacatagtttagtttttctcattgataccgcaatagtttacsaggatcttccataccacagttcttgggatcatttacgttgtttttacaaaccctgaaaagtaacacatagtgccccacggggccttcttggagaatggtggtgagcacgyacatggattgcaaagctcctctgtgtagtaccaagccctaagccaagccactaatggggcatgaacaccaaaggcaggccaaggaggagtaggaatgtccaatagtttcacccagtttagctctgttcctccaaagagaagttttagttgaatcttaatcttttgacagtctgcccttcacagtagttgaattcatcctttatgtttgattttgtttcctgctgtttttatcacatggacagaaaaggtgaagtgtgagtttcagcatgtgagtcttggcttttggtatctagtatctggtttgccagaatttgagcatacacccccatcgccccaaaacacacacttccgttgttaactgtgggtaagtatactaactagtgacagatgtagaatgtaagtctgctctcagatatgcactacctcattttaggagaaaaaatgctttttccatttgaggtacttacgtctgcttaactctggcaatttaaattgtgacttcataggcacatctatgcatggttagcaggagaggttgccctagagctcaccttgccctggagcatactctaaatcattccagaaagatgaaagaaacactgtactgccttcaaaaccccctacagaagacttacaaacttgatgacctagtcatctatttgaaagactcatatgaaggtctttttttttttttttttttttttgttgagatagggtctcactctatcacccaggctggagtacagtggtgtgatgatggctcactgaagccttgacctcccaggctcaggcagtcctctcacctcagcctcccaagtagctggggctacaggcacgcaccaccatgcycggctaatttttgtatttttagtagagatggggtttcaccatgttggccaggctggtcttgaactcctggcctcaaatgatccacccacctctgcctcccaaagtgtgggattacagccatgagcccgtgcctggcccagctaattttttattttttgtagagatggggtttcaccatgttgcccaggctggtctcaaactccttggctcaagcaatctgcccctcttggcctcccaaactgctgggactacaggcttgagcgaccaaacctggcacgtatgtgggtctttatctctacttggtcccctcttatcatagtaggatacttttttctcttctagccttggaattggagatctattggtcagtccttgctttgtcagaaatggcctttttcaggactcattcttttataccttcctctaagtctcttacagaagttcagttcagttaaatatatacatacatacatacacacacacacacacacacacacacatatatgtagtaggacggacagatattaaaagagggattacagacacagtgtacattttagaagtgtaaaacaaggggatttccccagcttggtttcttcccagttcatcctcactttgtgttcctttcctggcttttcagcatggtcatttagccctgctttagcttggtgtcatcgcaaacttagtgggcctgcccccctgtcatgtggaatatgaaaaggggaatatggtatagtgtaaagaacactggactaggaattggaagatggggtgggtcaaatgtgataatatgggtacaataactgaatattatgaagtgctacacagacataccacattcaggcgacttacttaattggaatttgaagctggtctctggcttccattcaagaagcaaaactgtctttgaggagaagttggcatttttctggtgagttacctgcccttttccaaggattttttttgagctgggagaatagcctgtggtactaaagaactttgccaggcattatggaatttttccctgtctgccaggccagagttcctgctctgtgtccagaaggatgtttttctattggtctgttccataacaggatccacagctgagttatacttggcaaaatcaaatgcagatgtgagggctgtgtggtatcacctttttagctttatctctgggcagctcaaaggactgaggctggttgctctcacccatcgctgtttgacataacctcctgattctattattgtcacagcattaacctccacagtaaaacgatctgcagacaacctttgggaataaaataagttaattacttcaggatcatgagtaccaaaactttcaggcagttccccgaaagagctggtacattttatttaagaaaaaaaaaaaaaaagcctaaccattcccagagggcagtttataaatagtctttgtaaaaataacaaacatgaaatagattcatgaaaccccatcatattaggatctagaaactcccaatgtctaaattgccactactgagtagttgtgtttttgtaggtattgtacctcctttcactgaattgaataaatatagaatccatttactamagggagggcaaggcttctccttcaggatttaaaccgtaagtccctaaagacatttggaggaagtcttatctggatgcaggaggacagaccttgtgtttcagtatgattttccctccgatttcaacctagcttggtttcagttaaaagaaggttccctgccatatttccatagtcctctacctgtagcaaaagtgaaagtaatgctaaagattcttttaaagatcttagaaaaagggatggtaaaggtcactaagaaagttagcagccatttttctacaagctgcaaaggggatgttaactgygttgtaagtaaagtacaagaagagctgctttgtgaagcactagcattaaagacctgcacaccacacatggcaaccccctccctcaggtgttatagcccagaagtagtgaagtttgttgtgcagtgttttcaatctcagtagaaagtgtatgcattttatatttcaggttattgtagaaaatcaccccaactctctttttgcgattatcaatgttttttgaaacatatatacatacttaattagtcatgaacctcaaacacttttccctgatgtaaacatttctccaatttatgaaggggaaaacatgatttgctttgcacacattcattttccaactagttatttccagaaacacgtgttattccatgaaataaggtgccagaactttatacttatttggttaaatattatatcccatgaaatcaaattatcagtctattgatacctcatagtgttatataaagtgagaaatctaacttatttttgtcatataacccagaagtttttttcccctttgttctgttatctgtcttgtctagcttttctttcactttattttttcccaattctttaacatttatttgttaaaacacgaagtatattctgtctgtattcatccgccatggatacttgtttaaaatgttttttcactgtgtcctctgtctttacttatatcatttttcactttcactttactgtgtacgggacatggtttcctacctactcatgtgccattaaagatgcagtattaaccaattggcttttataaagtgtcaatatttgtgtttatttcraaaaccttaaggcagctttgcaaataagtactaaagttgtactagcccataaaaatcagctctactcaactggcatagatggctaaatgtttggtgtgctcaccaggtmatttgctcataactaatagttctttgtaaagggctttcttttcttccacattactgaaaattattgcagaatgctgttatgcccagattcagacttgttgtgtaggcagcagtgtggtgcagagttgtccatctatagtccattttcctctgccttagggctgagaatgattcacttactgttccctgcctcaatttccctgtttttataaacccatcctctccctcctgtttttgctgttgtcagtaaaaacagatgattgctgctgttgaatgcagctcctgtatatacctggaaaccactgcatctctactggcctgttcctatgtaatctttgcataatgttatccttctctttcttccatttctctatcaccaacccctatagagtcgggatataagcccagaagagatagatttaaagaatgaaccttggtataaattcttttcggaattggagtttgggaaaccggtaagtttaatagcttcagtggttatacaccttttaaactaatgctgtggatgcgttgttgctgctaaagaatcagatgtttgtaaggaattcagaaagtggggagcagtcatgttggttgtccgtagtgggattgtctcttctcactacaacctctgagctttcttttgccttacttcactgagaaaggatagtgagctctggaagtatatcttgctggaatatcccagagaaacacaaataatcattgcttgtcttagacctccccccactaacaacaagtaccacatgccttgcggatggcattatttcagccattgttttcacttccttgaccaaagtctttatggtctgtgaaagacaagctgaaaatgtgttacacactgagaagaccagcattgtctctgctttaaatagcatttttaaaagcacatatgtaaatgaagtcccagagcaggccaacaaggacctctttgtgcagatgtgacccacaaatgcaaccccattataggtgacttttagggaatgatttctatgatgtaggatatttcccaaagtttgaaatgggagtaaggaattctagcatctttagtattcagcctacagttgccccatgatatctctgaattggctttggtacaaattgacttttggcacttaaaggaggattttcttagccttgcacccaaaggaatataaaatagaagggagaattgagctcatccttcctctagagataacgaaactgactttaaaactctagttattttaaagtcttaattattacagctgcaaaaagaatttacaggtagaggagttaagtgtataaacacattttattcaatgattgtatgagactttatgcattggatccagcttttgagtttctgtggtctgggatgatagttttatttgcagacaggaatgtattttatagttgagtaaataaaatgttttaaaattttttattaaaacaaagacaaagagaaattaagttggtgcttaggaattgctctttgatttggcagtgctgagctttgaaagttcaggcatcttctgagttaagagcaccagacttgcaaacagcctgcttgttcctctcttctggtccctcctagacactgtctcccgatagcagctgagctgtcctggatgaacagcgccacctagtgaccagtggagagggacgcatctgacccaaagtctgcaccctccttctcccctccccaaagcattggtgcacacctcatttcttctcctttctctcctttctttttttcgcctctgctgttcaccattcagacatcagttaaatctacctcaggcaatcttttccacgtgcagtatttaacagtatcctaaccctttctcttttctccttttcttaaaacctggtcaattatgtcaccgaaaaaagcttttgctgtgtgtagttgtctccccacccccaaaacagaccatgattggtatatgaaacaataatgccatactttagtcaaggaaagcaaaagctattaagttatgtttaatagagtccatgccgttgatttttcaagtctgtttcagaatccacacatttctgcccatctcatctgccaaacaactaaattagttttatctaaaatattagctttcaggaaaaatggtggaattttttccctaattagttgtgattgttttactaaatctatcattacaaataatttttgaggataatatatagtattttaataccagcatacatttaaatagtctccatgcatagcttgataaattaacagtattgctgccaaaaacttcactccaggtaccacacagctaacttcaaacaaatgttgagaacacagtccagttgtatactggggcyttcctytagcttgtctccccaccccattgctctaacaacctcttaattatttaaagactcagagatgctttttcaaagtagcattttctctgaagccacatgcattctttgcacaggcctcagagttcttctaatgagactgcttctttttgtgtaggtcttactttaaaagataatacttgtgaagacttgccaaattaactaaatcaatgcccatatcctgaggaacagtcctgaaatgaacagctccttatggtctgaggcatcctaatggtgggcttattacctagttgaactaacagggtttgggaggaaggtgtggtaaggataaattttttcttcacttcctactgcaaccactctgccacaaaagagtaagagacataaataaaagtggcataaaccatggaagctgttttggaaagcttttcagccattcagaagcagaatcaaaatcctaccagatcatgggaatcagcatttctactttttttttttctcacaccaactggggaccactttccccagtaaagcctgccagaactttgacactagacatttaccctgaactccttgcttcctccaccccttcgctttagccacccaaaatgaactgaaatttcagcaagatcctgactaaaaagatacctttttagctccaacaagttgttagaatagcaaatagttcaagactccagggaccatttttggacagattatttaaaaccagtttaatttgtaaacactgccctgtttattgcagtaaagaaatgatcgtaagtcattaggctttaaaaagtctacttctgcagatgaacagtccaagtgtattaagtgcttaaagatgaatggtaattggtaatatcacttactttatgaaatgcggaatatacatgtgcagagatgacattactgacctgttgctgtcagtggtgaacacaccttggaatcagattacttctcatttgcagatttattacaaagagcctgggaatcagttttttttctgagttgttttcctctaatttctatagaaattgacatgatttctatatgtaagagcaagtcaaaatttcacaatgtaaaccaatttgaatgcttccatggagttggctataatgaaatttgcacaaaattttaggagctattaatgatctcctatttcttatcaccctaggggtcattatgtaagaaaattcaagtctaaatagacagaacaagtagaagagaggatccagagttagaagtcacctgtaacctctgaatgttccacccgctggactcttccctcattaaacttacaacaatcttttggcaaatttctgtcttaggaatgcagctgtaaatctgacttgaagagttaaaagacaaaacaaaaataaccttacagtcccctctttaaattctgggtttaaactctgttctctaagggggatgaaaagtatgtttctaccactatcaaggtctagttaaactgtaaaaggaggttttaaaactactggtatgaaattgtctagtgtactatttaacacccattttatatatgaatttctttgctacaaaccacagaaagtaaatttggttcagtctgttgaccaaacctctagattcacacatgtgttaatacacaatgaattttacagcagaagactgcctcaaaaatgtggaatcttcagtgtcaatcttagtttgaagagaacaatgaggaatttaaaagtttctgtttttgttcaaatttgttaatgctttttttttcttttttcccccccgtcttttcttaagttttcaatatttagaatccaacgatgatttgctcttgaaacatagacatagaaacagacttcctaggtaacagtcccagctcccaaatcctcaggcttccgctccagcaggcagccttgtgtccgtaggcagcacccactccccttgcttttgagttcacctttctgtgttgatacagttctcccagtgtacccctccttgtttgagccagtctccatgtttgtctttatgtctttatgctcatttcttcatttcctcctctgcttcccgtcagcctcccaaaaagatatgggattatactcctggagactgctctatccttcctagagaggatagaaaggtaattccgctgtgcctcctccgttggactgtgtgtgctctctagccttggttagtgtgagtgtgttgtgggtttgtttgtttgtttgtttgttttcttaaatcacttttgaaaaaacttgatgcttttttttttttggttaggtaataaaactatgtaacaaattctctaagacatatactaatgtttagaggtttttaaagcaattacgtattcttctgacatatagtatttgtcactgtcaccacactctgaaaaaagagaaaataggcatttccttaaaggtaggtttttgtagttctccgtagcaagtagaatagctttttgaagctctgatgacttcaggatttctgctttatatgcctaatgttacattctctgttttcatgtcttcaactaatttccagtgagctcttgtgttttaatcatgctatcttggccgtatgaaagtataacactaagaaaaaaattcatttttttcaaacgtaaccttccattctttctccctttcctctaaactaaaaccttctttcccatcttttctttcttgaaccagactaatctagacaaagatctcagcctctgccagacagagttagaggcagatttagaaaaaatggagacgcttaataaagcacccagtgcaaacgtgccacaggtatttcctagtttttctcatgccatcagttccttttcaagctgtgctttgttttcttctttgttctatggtttttgatgtagttgaggtgacggatggtgatgctggctattttaggctgcatggctttctgactactgttttagactccttcccccacacctacccrgttcatttttgcttggttttcttttgagcttggcatcttccttaaaggggattcttcaaatatatgcagagaggctgctgattgaaactactctcccaccttattctcttcctctgctttccaggggcgaccttttaagttcccttcctttgcctctgtctgccttctctgaattttcagggagccatttttggcagtttccatgtcttttttgcagccctgggagataccaacctcaaagatcagtttcaaaaactcagcagcagtgctttgggtaccctttctgtgcatggtgctctcagagtagtagtgtttgtcattttaaagttcagaaagttctcaatgaaaaatgcactcagaggtcagatggcctggacacacaaaaaaagtgtttgaaactgagtctgccatgatattttaaagggagctatgtcaaaatgtggtttattaaagggtatacgagrgagagtaagagagagagagaaagacatcatggtaagtaggtttccaaggaggaaaaaaccaaatgttcatagaactgcctggagggctccctgacaaaacaaaagagactcttaaaaggaaaaggtatctttagagaaggtacaaaaggaggccgggcgcggtggctcacgcctgtaatcccagcaatttgggaggccgaggcaagtggatcacttgaggtcaggagttcaagaccagcgtggccaacatgatgaaacccagtctctactaaaaatacaaaaattagccaggcatggtggcaggcctctgtattcccagctatttgggaggctgaggcaggagaatcgcttgaattcgggaggcagagctgagatcacacctctgcactccagcctgggtgacagagcgagactccgtctcaggaaaaaaaaaaaaaaaagatacaaaaggaatatggagctgaggaggccaggaaggtccacaaaccatgacaggaaaagtggaaactgctgatggacccatgccacacttaavcagaaccaagacagatctccagccccagtgacttgggcacaaaagtcatgagagcagcagagactcaaaccagggaaggggtgaagagaccggggatttggtctggggtaagagagtcaggagccaaggagctgcaggttgcttgagggtgttaggaattggggatccagagacagcagagcatgaggaagccagcagggccaggggttaggctcaagctctccctcagcacttgaaggagccaccagaggcactgcacacatgggtgaggcagacaggtgatgggtggggcaggtggggtggggttaggggctgagtttccaattagggtgaaggaaccagattagccactgtggaattgaaggtcccaggtgagaagagatcacaactagccctggagtgagaatggtgactgtggctgtggtgagagcccttgctgggtgtgccagcatgcagtgaggagggcagatgcaagccaggtcactgaggatgttgcagtgggatagtttaattaactggtgtaaagagcaaagaattgggggatgggattaagacaaagacaaccttaaggttttggccaggcagatggaagaatgaggatgtgagcacgtcacagaggacagctgggaagaagatcagggcagaggcaaggtgagggagttggctttaggtaattgacctttgaggtgttggttgggtgtcatataggtaatatccggtaggcagttggaactctaaaactagagttcttggaagaggcatgggcttaagatggggattggagtcacctgaggagaggcgatggttgaagccctggggatagaagaagayacccaactagggagtagatgaaagactgaagaggggattgtgttgagagaaaggatgtgaaaccaagaactacccatggggacgttgggtgatgtggaacaggagaaggggagagggagagaaaggagagttcacagaggcggagggaaaagcgaatgatggagcaagaggagaaagcatgagatcttcccagatgtccagaaaggtggactcccaggaaggtcagtggatgtgatgactaagatgtttccaaaggctttggaggttgctgggtgagtagttcttgggagttagagtatatggcaaagaatctggagcctgcagaggtacagcactgagtgaaaagatgtggccgtgggaggaaggaagggaggggagtgttcccagaggactctacagggtcaaagttttttcaaggtggaagactggacaggacaggtgttcagagataggagactcaagaaggagaggatgggcaggcaagacagtgcagccaaaagggctggaggatggatgtgaaggtaagaggggtgtgctctctgaggaataattggggtggcgtggggtacagtcctcatcccagagcagaggtgccctcagaaatgaaagcatacaagcccaacaggtttcagcaggcagggggctagtgggtgagtttgcctctccttccctgtcatttccttttctctctttcacaatctcttccttttctttctgtcctttccttaaatgtctcttctccaaatagctagtttttcttaaaatggtcattattagagataaggccattatttaaggtagaagtatctttaaaattaacctttgcattgatttattcaactactcccttatttttaaaaacaagcatatcaaagcatttgcatttttctctccaagacaacagaaaccctaaactacagaattatgttgctttttctctgcatgtagctcttggttgttttcttccttttgcgtggtgcctggtaattttataaagcattcccttattcatgctgaagtgatcattaatgtagttggtgaaattgcatttctccccatttctgcactcctaaatttgcaggcatacacaagttatctaaatacagtgtggtattttaaagtatgcttttgtacatgctggacctaaagtgttgggtgaccctctctctggatgtggcatttggggtgcatgaagggctctgcattgggctcagaggggggtctgagggctgtggagaagctggtggaggatgtgctgtccatgtcactaaagcatgttggcccacggtgggccattgcccagtgacctgtgacagaagatgagtatgagccaggaggccttctcctgacccacccagagggccttggctgcatccactggaaggcaaaagaccaggagtaggagagcccacctgcccatacattctccttccagagaaagagcaccaccctccaccagcaccgaagaccttttccttccagcccccctgacttccagaggtcctggtctaaactaggaaaaagaaattgacctctctctttttcctcttggcttgaaacatatgagtcaaaataaatcatctacattatttttttcttcttttttttcttttttggacatktacagagctcagccatcagccctactccggaaatttcttcagagactcctggatagtaagttgccattttattttgtttacattgcttactatgttaaatgtcagaaatgggaagagagaagtttatattttggacccagagtgtgttttgtttgtatcagcctaatggctctgaatgatgtacagtttggtgataaraagtgatctaattatagtcttcaaattatttttcttctgttctgtcctcctcttccaaattaattttgtgatgatttgtattaccttttataaagttttccccattttagcatcttcacctttagaatgggagtttatttgtctaagtttagaatccaagttcttgcctggcatggtggcttatgcctgtaatctcagcactttgggaggctaaggcaggaggatcacttgagcccaggagttcaagaccagcctgggcaacatagaccctgtctctacccaaaaaaaaaaaaggaaaagctgggtatggtgctatgcatctatagttccagctacttgggaggctgaggcaggaggatctcttgagcccaggagactgaggctgcagtgagctgagattgtaccactgcactccagtctgagtgaaagagccagactgtgtcccaaaaaagaaagaaaaaaaatctcatttgctggttcttatggggaggggagtgtgactgagacaggccacatctggtgtaaagattgtgggagggggctgggtgcagtggcttacacctgtaatcccagcactttgggaggctgaggcaagcagatcacctgaggtmaggagtttgagaccagcctggccaacatggtgaaatcctgtctttactaaaaatgcaaaaaatagctgggcatggtcctagctacttgggaggctgaggcaggagaatcacttgaacctgggaggcggaaggtgcagtgagctgagatcgcaccactgcaccccagctcgggtgacagagtgagactccatctaaaaaaaaaaaaaaaatagacggggggagggaggtgccgagaaggggctaatttacctgattctcacatagatgggcatctgttttcctctgtcagttcttaggactctggatgatgcatgcataccccactcctttgtggggtgccaccagcctcttcccctgccaaaccatcctgaatcctatagcagattgcctttctcagcactttgctgtgaagctgttatcccagctgaaaatgttcagtgctaccctcacctcctgttctatatgtgataaatagcaaacattttagcttatatagataggccctcgtggagccttcctgtacccaggctcacgttagtacctctgtggtccttacttctgttgctgtatacctgacatatactcttgtatttttataattgctagtgtattataaactcctcaagggcaaggccccagtcttcacagtgcctggggcacccagtgaatttaggaaaggagcttgttctggtaggagcttttcttattttgtcaccatcgcatctgtgtcttgttctttgaaatatgacaatgaggggaagacacacctattacctatkctagtagggttggataaatccacaatgagcagagttgctgagtgtataaggtttttttttgacagatattgtggtctctgggacatatcctacctacattgctggagaatgtgctttacaggaagagtttcatttgaaagtcagcagggatttgggtattttggtggaaaaatggaaaaatttaatctatttagggtagtgatcaaaagctctagctagatccatcatgttaatttttcttctataaatatgtgtgtttcatgattaatatacccaggagcataagaagaaattaagaagacatattaagacagcagctagagaaggactgccttaggggacagttcccaccttggagaaggactggtgtaaagtctcttgcattcactgtggggttggtgactcagtcgccaatatgacaggtgtcagggctcaggtgtagcatcacaacccgtgtctcctactctggctttgcagctcactcccttttaaagagcttccaattgagccgggscttcagctctaaaaatgacaataagtcacaggtcctctaggtcctaggatgtgccttcagagatgaagcccaccagatgaccctaggctacctgcagataaagggtgtcctcaaggccacagctccgagcaagctctccttggtcccccaggccacctctttattctcagcttgtcactttggcagtcctgactgcccgtgttaaccctgctgcctgctctcctcgtttacctcctcacctccatccccctaaactgcacaagacggaaagggcttcatgggacagctggcagagtgaattccctagctctactggatccaaggcactaagctctgtattctaataggaatgtagatatagtcccttaatagttttgggacaaaacacacacacacacacacacacacacacacacacacacacacacacacacacacacayaaggttagtaaatgaaaaggccaagtggcaaatgctaccacaggcagtcaggataaaggagcacaggtatcgaataacatcattttaacaatttatcaggcatttactacgtgccaggtcctgtgcttggtattttatctaccttacctcatttaatcctctgaacattccaagatgaggcattatttttaatccccattttatagatgaggaaataggcacatcaaagcagtgtaatgccatagttcctcagcaggttcagggyagagccatatccagattaggaacggtgaagctctaggccaagggactagggttggcagtaaactctcatctgccccatactgattcaaaattttgtaataagttagcagaagatatactaaggtttaatgttttcaagctattaaaaaacaatttagacctggcgtggtggctcacgtctgtaatcccaacactttgggaggccaaggttgggggatcacttgaggccagagttcaagaccagtctgggcaacatggcaaaacttcctctttacaaaaaatactttaaaaattagctgggcttggtggtgcacgtctgtagtcccagctactcagcaggctgaggtggaggattgcttccccgggaagcggaggttgcagtgagccragatcgcaccactgtactccagtctgagtgacagagcgagactctgtctcaagaaaaacaaaaagcaaacacccccccccacacacacacaatttaagcaactatttatgatattgggttagcaggattggagggtactaatgtaagctgactaaaagagcaaattgttttcagacactgtgaatgtgcgtgaagatattcaatctgttaatttaccaagaattcttatttatatcactgaaaataggtcttcaaagcctctgtttttcagctctcatgaaatacttggcaggaataaatgagttttttcctcctgctagtctaccatttggggatttttcagtaatcgggcttggttttcccccagtttatccaaatgaataagattttttyatatctggaattggtgaggaaccagcctaaatggggtgcctgacacaaaggaaagcatacagtaaatgtttgctcaatgaatggatggatcygtaaatcttaatcaactgaaatccaacttggttagcactgaggcaggcagcttgtaagttgaacctagtgcctttcactggttggacaggaatgatgtgtaggcagaaacattggcaggacttgaccttaacccaaagaatgaaggaggaggagtcacaggtggcccaggttcacagttttgtggcaactggagaagtgatggtgttgttttaagtccactttaataaattggacagacttcaattgataattttattaactaacactgattacatatgataatattaaaagaactgggaacagagaggaattcacccatagtcccaatatccaatacaactacaagtccttgccttcaatatatatattttttataattaacatcacagtgtgtgtccagttttgtactttattttcctagcatttcagatctataaatcagtagtggtaactactcattactttcatttcaatgtatttcagcattgattaaccttctttgcctaaccaaagagctttactctatttgaccagcaggtggcactcaagaacaagctgttcttccctatatggtgatggtagactagcaaacgctttttccccttaatctgatttgagaacaaaacacagatcataacctgaagaactatatgaaacagtagaggtcctccgggactttacaaatgtgtcagaaatctgtatgcatgtaggcatttaattttatagaatcatttattccattaatatttattgaacaaccatgcaaggcaccagatatgcaaggattaagaagataaactttctgccctcaaggggttccaggtgtaataggggagacagatttgtaaataaccagagtccagtggggtaaatgcaatgatggggcccaggagggaggagtgagcacctattgttttgtggaggaagaaaggttaagctttatggaggaggtgcaaataaaatgtgaataacaatatcagtatagatataatttttttcatgcagtacaaaaggctataaaatgaaacttctagaggattatctagactccttcctgcaaagccacagttaacaacagttaggttttttttcttcttcttcttcttgaaataactaaattattttgaatggtgaatgtaagctttatgaggctggaactttttgtccgttctgttgcctgttgaatcttcacctaggagagcgattgacacttaatagatgctcagtaaatatttgttgaccgaataaatgagcartagaatgacatgatgagatcttttctagacagagatgactggagggcatcagggctggagactgggggagcaatgcgtgtttgttgtacagttgtaggtgagcaatgataaggcgggaggtggagagtaaagggaytaatgtgagctgtgtcaaagatagggaagaagcaggacttggtgactgattaggcttaaggagcaaggagagagagagaaggggaccgatttcctgagctttctgggttgtgtgatggaagatggtttgggacacgttgagtttaagatgcctgagaarcattcaggtggatgtctagaaggcggttgaatgtatgtgtctggagctcaaaagaagggtctgtgtacataacagatttgcaggtgggtttcttgtacaatctccccatgcctattagttttgcaagtgaaagaaattgaggccaagagaaacagactgttcgcaagtttttaaacaagagtgggtttgcctctactgatccacattccttgttggagtcaggtgggaatcccagtctccaggactctgtccactgcctccggaacctgcccrttagcacaattggaaacagttggccctaggatgattgctctgttctctcactttactcttccagtgagtgtgtttttgttgaatccccttgaaactcagcagccagctctgcatcttagccagaggctgaattctctgtgctagctcttcttgcttgctcttcctgaaccaaaatctgggttaatcaaggctgctcagagctgagcttctgaacttaacttgttttgttaagtactcagctgctattcctgattggacctttctcaaccagctgaggggataaggctgcttctctcatcctctctggtacacttggacagagcaagtactctgtgaccttgggcaaatgcctttgacattctggtcttcagtttccccttttgtacagtgaaacaaatggtctctcttcaacattagaagatctgatggatatgatacacttaaaaacactgttgtggctgggcatggtggctcatgcctgtaatcccagcactttgggaggccaaggcgggaggatcatgaggtcaggagctcaagaccagcctggccaacataatgaaaccctgtctctactaaaactacaaaaaaaaaaaaaaattagccaggcttggtggcaggcacctgtagtcccagctacttgggaggctgaggcrggagaatcacttgaacgtgggaggcggaggttgcagtgagctgagatcactccactgcactccagcctgggcgacacagcattgttgtagagctcttgggtattgtttttaaacaaggagtgcctcagtttcaaaatgttacccatctggaaaaagcatgttttgttagctttggtatcagaaaaaaaacaattggcttggcaaatccattctgagagatttcctgagtgctagtttatcattctggtaggaagcaggaaaaaacggtgataatgggtggaataaggccagagagtgaggtggctgaggggttggggtggggtgagatctgactgttggtgaggtagagcagagatgtgaggtcaggcagccagttatggtcaagagtcatgacagaacaaagttattaggaacttaggaagatggcttagaagttctggacaggctgggcatggtgattcacttctgtaatcccagcactttgggaggtcaaggtgggtggatcacctgaggataggagtttgagatcagcctgaccaacatgatgaaaccctgtctctactaaaagtacaaaaattagccgggtgtggtggcgcatgcctgtagtcccagctactaggaaggctgaggcaggagaatcacttgaacccgggaggcagaggttgcagtgagccaagatggcaccactgcactccagcctgggcgacagaatgagattctgtctcaaaaaaaaaaagttctggccaaagctgaggcaattcaaaggatagcaggcacagcagaatggaagctgctgtcagtcactctgttaaaagaaaaactttagacaaattaaatttagcagatttatttaaggcatagaaggatttatgttcaggcagcccttagaaccaggggcagttcagagagcttcacccagcaacatgggcaggcagcatttataaacaacaaaagacagcaagtacagctacagctggattggttgcagctccacagttgcctatttgggcatttatatagatgtgggctgatcagttggcagcctgggattggctgaagcttggctgctgtgattggctgagactcagctacttgttataagagcatactcttagattgtactttgtttacatagttaggttgcagaagaataggaactcaaagtatggatgcagcctcaagcccaatttagtttactgatctccaatgcttaaggaggtgtggtagccccaaaccaaggtgggaggggcttcagacaccataccttcaaaagagacctcagtcaccacagctgttggtcagcaaagataaaggacatctattcatggatgtttttgctgttgaagttatacaaaaaagaggaaacatagcattaaactgaagggcaaaatcagaaaatgcaaccaaagggaagagggtggataatgaataggaaatttagaaaagggacatatttatttttaattaggaaattcaaaattataagccagtttagatcaactcacatttatttaaattggcatatggtgccacagccttgcaagctaccctcaggttcttccatctcctctaagtaaagaggaaaagcatttgacctccacatccaggccagagtgaattaagagggtcctgggggagctctgacccccaccctcggcagtcccctgaaatagggtatataaagcccttagccccaggtgggtacaaggtgaggctcagtgagtggcagctctgcgaggggattaccagtgccagaagcaatagtattgctcaggggactttattattctaaggtggagatgtcgcggtattctaccagagtccccacctcttttccatttctgactcctgtgtctggtgccgcttatcttaggggtgtattcatggtgagtaacactcagcagtgatggtgtatacggagctggagcatccctgagctccctctggttcctgtggtgtgcaagccactgcctcctcagttgtaggaaaatgttgtatctattaataaaacagcagctgaaggttgggcacagtggctcatgcctgtaatcccagcacttttagagggcaacgtgggaggattacttgaggctaggagttcaagaccagcctgggcaacatagtaagaccctgtcccaacaaaaaaataaattaatgagcagtaaaataaaacaggagctgagagagaatactatccgtgtagtgctcaatggcctagttcaagttccagccctgccattctgctaacctgcctactttgacaarttactgaatctctcagtgccttgtttcctcatctaaaaaatggcagaagtaggaatgttaggattgaagtgataatgatcaataggcacggtgcctgccacataggacgcctcaccaagaggtgtgtagagttgtttttgctgtcattaccagtgaccatggggactcagaggctgcaattatgcacagaaagaaaggccagtttcccggaatgtaaaagcatcacattattgatcgttgctggttgagtagaggaaaatatagctggacagatgtgtgatcaagcagtcacagtttgtggcccccgtagaagctaggtggggggaatatgggtgttcactctgtaattctttaagctgttctatatgttagttgatgttcacaatgaaacagagggatgaaggaattccacctagcaatgggtcttcagagctgaaaaatctattttgataccagtaacctgagttgggtaggaataaaagaagctcagcagaagcctatgtggttctgcaggataggagtcattcacttaactgagaaatatgtgtgtgtgtgtgtgtgtgtgtgtgtgtgcgcgcgcgcgcgcgtctgtgcatgtgcgtgtctgtgtgtgtgtgtgtgaatgacagtgtgttagtggcaggcatagaaaagtgggattaggagaagggagggactcagtgagtaagtacccttgatttttttttctgtgcctcacctcattccaaaaggaatttgtggtaacttgcagaaatacctcgatgttaacaagataaaaataaatggaggctataaaggagcaattgtttatgcttatactacatgtcaggtcataatcttctgaacacaaactttgaaagaagtgagtgcaaatgtggctgtgatactaagagcccatagaatcccaggttccaatttcacttggtcactgatttttctggagacccaagacagttgggcttccccctttcattgatgattttatattccaaatgcttacgaagaataaccaagaaaaataatccaggtagtggacttgaagtagctgacactgcctggctacgtgacagaggcacgtctgacagagagcttgactgcaccatcttgcgtgcagccattgggtcctcctgccctcccctatgtgtgatcctccccctgttctcccctatccttcctccaacccttcttccccaggcagcgttccacagaatttttcttttaaagcacaaatgtagccattccaattagagaactttgctgtttggtcaagattcctgagcattcagggctccatgggcctgtctgtagaaatgtctgtctaaataagagcactctttagaaaggacagttcttgattaggataccaggtgtatttcttgtcctcagcaggtaatgtgctgtttgaaaaatgttaaaagcactaactcctattcttatctttattttttcccttttctctctttctttcaaaattacctgttcatagtatatattcttccaacttccatgcagtgaagagggaatcagacggggctcctggggatctcacyagcttggagaatgagagacaaatttataaaagtgtcttggaaggtggtgacatccctcttcagggcctgagtgggctcaagcgaccatccagctctgcttccactaaaggtaattaactgggtgaagcctgcaggcctctgtctcccatccacctccattcactgagcgtcggccgtggtgaacctccagcaatggggataagtcctgccttgttcagacccacattcaggcctcagagccctcttaaattccctcccctattttcttaccggccatttttctttctggttttaatagtttctgttcctttgaccccccaaccttgttctccttcaagatttctctctctctctctctctctttctctctttctctctctctctcattctaattaccttttcttagaaattagctgagctttagccattcctaactctagcagggtagccattttttttgttgttgcatccttgcacctgctttgcagcacagattattttgcttccggacctcgactggaaattttttaaaagcccttatgacaaatgagcatgttacctctcctttttctttttagcagctttcagctttaacctaatgggtctatttattttattctgcatgcttaccagtggatcgtaaaggtgggaatgctcacatgatttcttcatcttcagtccatagccgaacgtttaacactagcaatgcgttaggccctgtgtgtaagcacaagaagcccctgtcagctgcgaaggcctgcatttcggaaatccttccatccaaattcaaacccaggctctctgctcccagygctcttttgcaggaacagaagagtatcctcttgccctcagagaaggctcaaagctgtgagaacctttgtgtttctggttctttaaatgattccaaaagaggcctccccctccaagtgggagggagcattgagaacctgctcatgcgctcccgacgggattatgacagcaagtcgagcagtaccatgagcctccaggagtacagcaccagcggcaggaggccctgtcctctctcaagaaaggctgggatgcagttcaccatgctttatcgggacatgcaccagatcaaccgatctggcctcttcctgggctccatctcctcctcctcgagtgtgcgggatcttgcctcccactttgaaaagagtagcctggcattgtccaggggtgagctgggccccagccaggagggctcggaacacatccccaagcacaccgtctcttcccgcatcaccgcttttgagcagctrattcagcggtcccgttccatgccatccctggacctgtccggaaggctgagcaagtctcccacacctgtgctgtcccgkggcagcctgacctcagcccgctcggccgagtccctacttgagtcaaccaagctccrtcccaaggagatggatgggatgaactccagtggggtctatgcttccccaacatgtagcaatatggcacaccatgccttgagcttcaggggccttgtgccttctgagcctctctccacctgctctgatgacgtggaccgctgttcaaatatctccactgacagcagagaaggcagtggcggcagtgttcatggagatttccccaaacatcgcctcaacaagtgcaagggcacctgcccggcctcatacacccgcttcaccaccatccggaagcatgagcagcagcagacctctagacagyctgagtggcgcctggatgccagaggggacaagagcaccctcctcaggaacatctacctaatgagcccccttcctttccggctgaaaaagcccctccaccaccaccccagacaaccttcccctggtgactcctcaggcctcctggtgggccagaagccagacctccccagtcagccccatcaggaccagcccccttctggggggaagcccgtggttcccacacgcctgtcttcccgacacaccatggccaggcttagccgcagctcagagccctctcaggagagacccacggccctggaggactacccaagggccattaataatggaaactccgtgccatactcagaccacagcctggacaggaacaacaacccacaaagtgaactggcaccatcccgtggaggtggcattttgtgtgtttgcctagtctcacctgcccgtccctccactttgcttgcattatcccgtcctcctctgtgcccttggtgctcattttctggtctgtcctttgttttctgtttgttttgcttggcaattaatcatggctcgtagtggctgcacttctttaaaaacaaagcccccatgtcatttagactaaycaccaaactgtgtttygaaagaaaaattggccgtttagctcaactgagaaatgtgttcatttgaactcttgaaccccttgctgtttgcaccaatccccaacataccccatggttttttgagaggcagcctctctcaatggccctatatgtgtgtgagtgtgtgccttgtccctataaggtcctgcacgcctctttgtagggacactttacaaagaaagttctctcattttgctcaccttttgccttytgagtagttttctttgcattaaactagttcacaaataaatccaaaaaatggggtggggggtggaatttttttttccttcagaattcgaccattgatcattaatcaagaatgacttcaaaattttgmtatttataatagatgaaaggtgaactcttttcgcaagctggtttccagcgaaatctttgcctgttttaactctactttgttgttttaaagattcagaatcgccaagacattttataccagctgattacttggaatccacggaagaatttattcgaagacgtcatgatgataaagaggtaaatcccatcttttaaatccattagtttttgcttggaaaaatgtatgaagcaagtacagattcttgacatctatcaragaggtgacatgatctagcaattagaggcaaaaattgaggctttcacaagtgattttttcatatgacataggctcaatcatgcctcttttagtggacttttccaaaaagtaggactgatttscccacaggcactagcttataaatgccaagtccagccagcactgctgcatgggagatacagagattgtccactgctgcacttaatgccctgtaagctagaaaccagagtttgctctttcatccccgctcaaccccacccttgataatccctaaagaaatccacctgcatatttctccaatactgcccacccctctgttggcacaaagcattgttcaaattgagaagggtgcaacaggagaaagaggaaaatgaaaaatagtaatgaccttgatacattttataaaacaatttgaggaagttgcctataactctcttgctttcaattcagaagaaggcagatacaccaagaaatgctggaaaaccccagccaagaacttcaaaatgtgtatattttcttgtagctactgaaatgcctgtcctgccatggggtgactgtcagggcctgagaaagagccccttttcttggggatttgggaagaggaagttcttcatatcagccaaatgggcaaaatcacaagcttctgctgggataaagcattgtgatgatacatgctttctgggcctcacatccccaagaaaaagagtcctagagattaaacaagctcccaagcccatattcctgaaatgaattaagagctggaaaaatcaccttgacctggtagcagtgggggagggtgtgcgtgtgtgcacaactctgtcctggtcacgttcaagtctgaagccctttttctctgttgttctgctttgttgagtagttccagagtttaggtggggtttcccgaaggatttaggataaggctgacttggggatgagtaggatgatgataattattgccaccagatggtgaaacaaaagacaaaaataaaaccaccgtggccaggtgcagtggctcaagcctgtaatcccagcactttgggaggccaaggcaggtggatcacttacttggtcaggagtttgagaccatcctggctaacacagtgaaaccccatctccactaaaaaatacaaaaaaattagccgggcatggtggtgggtgcctgtaatcctagctactcaggaggctgaggcaggagaattgcttgaacctgggagatgcaggttgcagtgagccgagatggcgccattacacaccagcccaggtgacagtgcgagactccgtctcaaaaaaaaaaaaatgaaaccaytatacctctccccatctccaggcacaattgaacagtactcagtaagaaacttgcacctgtccatggaaagaaacaagaggaagcatttgatgtatagttattatttgtaataactcactaatgatgagtgtccatcaggccatagagcagattcatttctatagctctttgttaaccatttcctgccacaagatataagattcccatgtakgtaggccagggctgctatgatgaaggaaggtgaaattccattttagtaatataagccctagtctctgacctagaaggttttatgggacaattcttgcctaccacatgggaggtgtagtttatctagtggtttagcaattgatatattagaagttacataagaaggygagcagttgtctcctraataacactggctcatagattcttaaaagttttgtgtctttatccatggtttttggcttatatggttaaactacagggctgagggacttactaaggtgagattcaagtactagattgggagctttaccccattcgatgtccayttccactgattatgtttaactccagccagaacacaaggggccttgagtaagaactgtggcagtttcaagcatcactccattcccgtggctacagaaacagctcacactccccagctcatggggtgtcagtcaggccctccccattgcaaatactttatcattgacatggattttcagaaaatgagacatatcagacttggcaggaacattagtggtcatgtagtgaagcccctggtttagtccaggaagggaccacagcaaggtagtaacttgcccagggctggatagtaagttaacttataccaatagcagagctagaaaccagggctccagatgcctggaccagcactctttctatggcactgggcttcgcagaggactttctcatgtcttttctaatttaatctttacaacttatttgagtactggaaatcccacagccatttgatgagttgtcacttcgttatttgtagtctttggagaaaaatcgggcccaccctcctttaggggtgcaagtcacatgaggcatttaattgcctgctggacgaagcctactgtcttccaatgctaagaattatccattctaattcatgctttcctacaaggaaagttaatcccaggaaagtaagattgtttagtatcagaaaacacattaaaattctattccatggggtcattttaatgggcattgagggcatttggtaaaaagcaacattgtttgatttttcaaagaagcctttaaaaatagaaatagatgactttttccttactctaagagagaatatttcttctaatcccaggtagcrttattcttagggtttttttttaatatttatattctctgtcattccctttaactcagcttcatttcacccagtgaagaagtcattcagtaaaaaagtaagtgatgctgtcagccacataattagcctttggtgcatatcctaaggccttctaaaaattgtgcctaggggaagagttggctgcctagaaggggcatcatcctttctgaaatgggcaagaacatattagagtaakagatacaggaagcacaaaaatgacctggtgccatagacttcactagcagaagcctatagcaggtttaataggcctgaggtgggtaggaggaattggccagccctggtcctgccaggggaatatgctgtaggaatatatccctgcctaaaaacagggtagagatggcacttccagcctcctgctgccagcccagcatggttgggaatgccctggatgtgccccctggctcacctggccttttgctgccagaagcaagaggctttgggctgagccgggggtaggtagtttgctggacagtgtaatcatgtggaatcatccttcccctatcccggcttttccagtgaagtgctgcctcctttctacagtgcttggagggtggttatgatgggagtgtaatagttgtggctctacagccgttctgacagctgagtcttaaagcttctgccccattcacccagtacctccttccctaattacttttgttggcagttttctaatatgctggaacagatgattcactgcccattttatgcaattttatggcagaaacttttagcggaccagagacgacttaaacgcgagcaagaagaggctgatattgcagctcgacgccacacaggcgtcattccgacgcaccatcagtttatcactaatgagcgctttggggacctcctcaatatagacgatactgcaaaaaggaaatctgggtcagaggtctgttttggtcacctcaatctgctgcttgacccaaagcaatatttgcctatttgcctcccctcagcattgtcctctgtaggccartttagttctccaaacagcatctgtcatcctggcctcccttaggcttgctttggcttcttgcggctggtaaatagacatgaccccattatgtcctgtgctctgtatgttcaagcatgcctggctgggggaccgggatctgctggcacatgcccctgttgcatgccttagaccattggctgccttcatgagtccagccctccacatcctgcattttatcatgctactgtgttgcctgtgcattctgcttagaaaccttatacctgagtccatatgcattggtagctatggtgtggacagttacacaattcttctttgaaaagatggttaatgaaactttacgaaagttagcttaacaataatttatgccatttacaaaggcctccaaatttagtgacattaattttgaaatatagaacagtgctgctgctcacatgtaggtggatgaattgtgtgaagtgttcagcagtgctgcagtagtgcgcctcactaaagaattttgaagcccaaagacttttgcagttaggaaaaacccacagagggtaagagagttctccaagggacgtttcatttgttcttttagttttgacatttccaagcctagattatgaaagcttaatattataagaggaaagagaagaacaaactttgaagtgatttttatccagatcttggcctcctgcactaaggtcaacatgtcgaaattctcatgctagccaaatgctgtatcttgcgtaagagtttatgctttgccatgtaacccttaagtagcgctgctgaagatgatctcttttagggaaaatgggtaagtctgggatttagggtgggagctaggggaatgggggaataacacccaaagtatgtactgttttataacctttcagtacagtagattaatatttgtttctatcttttttattttattttttatttatttttctatctagagtatcattgcctatcttttttattttagaaatatgactgggcatagtggcttacacctgtaatcccagtactttgggaagtcaaggtgggagaattgcttgagcccaggagttcgacaccagcttgggcaacatagtaagacccccatctctaattaattaattaattagatagattggtagatagccaggtgtggtggcacatgtctgtagtccaaactactgaggaggctgaggcaggagggttgcttgagtctgggagctcaaggctgcagtgagtcatgatcatgccgctgcactccagcctgagcaacagagcaagaccctgtctcaaaaaaaaaaaaaaaaatgtgtctgggaagaagagatagtgaaaagagggaaccaaattaaaagaaagaaagctggctgggtttagtggctcaagtctataatcccagcactatgagaagctgagccagtaggatcacttacggccaggagttcgaaactagcctttgcaccatagggagaccttgtctttacaaaaaaatgtatatatatagaaaaattagccaggcttggtggcacacgcctatagtcatagccacttgggaggctgaggtgggaggatcacttgaccccaaaagttcaagactgcaatgagctatgaacacatcactccaccatggatggcagagtgagatcytgtctcaaatttaaagaaatttgaggctgtctcaaattaaaagaaaaaggaaagctggggaagagaaggagactctaaaatgatggagagaaagaaaatctatcaaggaagaagcaaaagttagcgaatgttaattgcaagggaaagatagcccttgagccctcaacattccagctcctcctcaaaaaggcccttctcagaaggctctgggcatggtttgtcctcacygacagtcctgcctgcttgtaggtagaagaagatgggaacaggtgaaggcactacggctgcacacttacacatgtacatgatacatgcaaacagaaatgcaccgtgggtggaataaccacagacagaggcaggcaaactcagctcagtgagcctgcctcccttctagagcaatgcttctcaaactctgacaagtgcgttagcatcccctggagggcttggtaaaatacagaccctgggtcctatctgcaaagtttctgattctgcagtggggcctgaaaatttacatttttaacaatttcccaggtgatattgattataccagtttagggaccacattttgagaatcactgccctagaggttgactgtggactagaaaaagtagagaccaacacatcccaggtgcaccacrctgtgtcaatgcacttcaatcccattcggtaggacttgggtgaccacaggttctgtgtaagaccctatgggaggcagaaagaactcagtctgtgcccttggggagctgatagtggaagtctccctcttatacagttatctctgtcctgtagtaagtaatacaatactgtgaaagccagaggagggaaagatggatttagccttgggagctatagrgagataaagarggagaggatgttgctttgtataaccatcgatgactcacatacacgtctcaagagttcaatggaatcagtgaattttaacaggtctttaatgaaaaaaatctcaccaccccacattattaacctaagtctgcttacaaagtaaccataaactacacagctatataattatattgatttaattgataggagatattgttttgacagaactcagttaccaaagtgtgaatgctgtgctgctttggtatacattttttaaagttcacacagctctacagctgggtgacatgaggtaacctacttccttgtgtttttctattgaaatcactgtgaaattcgtatccttataattttggtcatttagttttctcttgtgaacttgtcatttatcattaaccccacatccattmttttcttgttcacctgcaactgtgaaattatgccctttggttacagacacaaacacaggtattgaaattgtgtggctttaactagattataaggtgatcattcacttggcccccgtacgtttggtatagatgggtagatagatgaaaacatcaatgtgaaaatgcagactttaaaaatgcctgtggaaggctaggcacagtggctcacacctgtaatcccagcactttgggaggccaaggcaggaggaccgcttggacccaggaatctgagaccagcctgggcaacattgtgggaccctatctgtataaaagttacccaggcgtggtggtgcatgcctgtagtcccagctactcaggaggctgaggtgggaagatcacctgagcctggggagtcaagactgcagtgagccatgattgtgccactgccctccatcctgggcaacagggcaagacgctgtctcaaaaaaaagaaagaaattccacagccgggcgtagtggttcacacctgtaatcccagcactttgggaggccaaagtgggtggatcacttgaggccaggagttagagaccagcctggccaacatggtgaaacccagtctctaccgagaaatacaaaaattagcctggcgtggtggcacatgcctgtagtcccagctactcgggaggctaaagcaggagaattgcttgaacctgggaggcagaggttacagtgagctgagatcgtgccactgcactccagcctgggagacagagtaagacactgtctcaaaaaaaaaaagaaattccagatagaggagagggtaggagggggttcagctgaggtgtagcaaatagatttgactggaacaggaacagtgtagtagagataaaggcaattcygtaagagtagggagaaactacccaaaggccttcacctatggcaggaattgagatttgaactgrgggaaagttgagagcagcagccaacttcaaagcaaggaagagatgtgaggaagaatgttaggaatgttatttgtgctcctgggtgacagattagagtgaagagaatgtgaaatcaaaggaagctttgtgtcaatggaaactagatgtcagctttgagcaacagggttgtggagggatggaggtgtggagggaggtccctcctgacttaatgacacacttgatcaggaagtggagaaggggcagaggctgacttggacctgggcatctgggaacagagggctacccaacaggattggaagtcttggcaggagtcatttgagctcagggaccactttatctggctttttggatgatgtcacagaccgtaagaaatatatggagttggagatgatgtgagaagtgaatcggcatttcacctacttgcatatcataatttaagcaagtagatgtctctaaggaataagacagtagataaggaacatcttaggacttctggctgactttgtctttttgtttgtttgtytttttaatagccatggttcacatgttttgaggaactgttacctcagytttgggacctttctaaccatctcttccccagatctggctgtttttagggggattctcatgaatgacatacatagttgactaaacatttatctagtgttctactaaggtcagacaaatgcaattttgcccagatttctacactagaacaaactggctagagtgratttttctgctttgctttctagaaatttgtgaaaatgtgtccttgttgtccatgaatcctgattttaacttgtcattgtttcttatgttcagatgagacctgccagagccaaatttgactttaaagctcagacactraagtaagtgccaccagttatatttatttgtctttttagctgcctttttgaaacacagcagtttgtttgtagagttggagaaataacaattataaaaattgttgttaaaaaaaaaagaacaaaacagtagttcataragtttgctatgtgccaaacactattcagagtactttgcttatgttaattccttatggagtgggtgctgtgatgatccccactgttcaaatgaagagaccaagagactatraggttaaggaacctgctcaagctggtgtgatagagttggaattcaaacctaggcagaggttggggtcttataccctgccccaccctgcctcctcctatgtagtggctctatttgctcaagtggtggcttgatctgacccatcttttctgtggaaggatctagaccagtctctagggagataactttacccattttgctacaacatcccaagagattaaaatcttacatgaacccacaggagactggcgtttctcttaagtgtgttcttcagagtgctagccctgtaaaatttttctcaaaaagagagttctgttgtagaatgagttgggaaacactgcatgctmtatctatacctcccacccactttgaagagatactttgttgatgacatattaatagctccagaagtctttcaagaaaggaacctgaaacacgatttgggagatgctaccaaagactgggttccataaggaaacagctggctttttatctaatwatggatttaaatagtccatgagttctcattggcagctaaaagtacaatggtcagtggccaccccattgtcctgcagatggatggttgtgcatctggtgatcagagggagagctccctgtccttagatgctgggaaatgctgtgtggagctaaccaaccatggttctgatctcctggatcacaaaatgagtgaccaggccacagtgtctagagcctaggcacaaatctggtatagttgggtttgtgtgtattactccagtcctttagttggtcagctaaaggaggtggctrtgtaatatactgcaaagattgtgggctttagagtcaggaagccctgtgttcaaatcctgactatgccacttactatctttgtgactgtagtgaagttatcaacttctcccccactcaattttctttatctgcgagataggggtaaaaatgcctctcttgcagggaagctggggtaatacctgtaaaacattttgcatagtgaccaaaatttaatactcaaaatatgtcatcctcttcccccccttttttttttaaaccagaaaggataacagagatatataaattaatttgcaatttaattaatacacttatttctttgaattgaggmgtctttgtaagatttattaaatggtatagtgatgataatattacattttcccagatttcataaagagtcttaaaacaatttttttttagagcaaccctgtcaaatagaacaggtgagaaagcttagatccacagaaattgtcaccttttatcaacattgctaatgccggagagagggctccttcctcctaactcagtgttttcatcacgacatgctgcctccaaaaaaatgtccacaaaatttagtgaaaaaagtaaattctagctccatggtcttttaagcccttcagtcacttggttttacatttcsccatagtcaattactcaaaaaagcatgctgtcrgggccaggcgtggtagctcacacctgtaatcccagcactttgggaggctgaggctggcagatcacttgtggtcaggagttcaagaccagcctggccaacatggcgaaaccctgtctctaccaaaaaatacaaaaattagcygggtgtggtggcaagtgcctgtaattccagctactcaggagtctaaggcatgagaattgcttgaacccaggaggcggaggttgcagtaagccaagatcatgccactgcattccagcctgggggacagagtgagtctccatctaaaaaaaaaaatagcatgttatggaatacttggttcaacaaagttaaacaagtttctttccccctggccttctcagggcctctgctgtgctgatgtacaccgtgatgctccaaaaaagatctaaagcgaatcatatttctcaaaccctctcaccagcagtggttctttgggagctaggggtatagtccacagcagtggaagaatggggccccaggtttcccatggtagtcttccatcagctacaactacagacccctcagttcgtctctcacacacaagtgggtcctttgcttaatagtaggaccattatgctcccatccccctccacagctgcgagatacttagtatagcagaatcaggagcctgcagatctccataggggtgaatatgctgagggtcttgctcatctatgtgcctgtggttggggatgaagggagggggaattcrtaatgccccccaaagagggctgtggcaaaaatgtggcccgagacattccttctcacagagacaaatgtccatatcccctttacggacctcttgagagttagaatcctgtctgctaatgtgagacccacaaaggttgccttgtgcttttattcagcacagaactgactttctgtagttttccagatgtgccctcattgttcggccagcacycctcacataccgtgggacttcctggcatcctgcaaagtgagcacaccccttccaagttacaattggagacctttccatcctattggtttgactcaaatgaaaaagatctaggtcattttttttttaattcaagaaaatgttacaattttaaaattatttaattcaagaaaaagttataagggccaggcgcggtggctcacacctataatcccagcactttgggagtccgaggcgggcggatcacctcaggtcgggagtttgagaccatcctgaccaacttggagaaacaccgtctctactaaaaatacaaaattagccgggcctggtggcgcatgtctgtaatcccagctactggggaggctgaggcaggaaaatcgcctgaacccgggaggcggaggttgcggtgagctgagatcacaccattgcactccagcctgggcaacagaagcgaaactctgtctcaaaaaaaaaaaaagaaaagaaaaaaaagaaaaggttataatttttatccttcttttttcattttgtttaaaatttgcctttgtctcatttttttttttaaagagtcctggttaaaaattaacataatctgggccaggcacggtggctcacacctgtaatcccagcactttgggaggtcaagtggatcttgaggtcaggagttcgagaccagcctgaccaacatggtgaaaccccgtctctactaaaaaaaacacacacacaaaattagccaggcgtggcgcctgtactcccagctacttgggaagctgaggcaggagaattgcttgaacctgggaggtagaggttgcagtgagctgagattgtgccactgcactccagcctggtgacagagtgagacatcgtctcaaaaaaaaaaaaaaaaataataataataataataacatcatcattattgaggcaagcaaaggaatggatatggaaacgttgcaaaggggtacaaagagcatttgaaggaaaatctacttttctttccaacatcacttttccatgtttaaaagcaaaggaattaggccaggcgtggtgactacatgcctataatctcagcattttgggagactgaggcaggaggatcacttgagcccaggagttcaagaccagcctgggcaacatagcaaaaccccatctctacaaaaagatacataacaattggccaggcatggtggtgcatgcctgtagtcccagctactcaggaggctgaggtaggaggatcacttgcacccaggcggttgaggctgcaatgagctgtgatcatgccacttgcattccagcctgggcagcagaatgagaccgtctcatgaaaaaaagtaatggaattaacatttattgagtgttacctacctgtacaacaggcaccatcctagctgtttatttttaatttgttgaagcattctccagcaactctgagttagctccaagttcagctaaagaaacagtgtctcagattaagtattgtgtccaaggtcccagagctactaaatttcagaactggattttggaccagatctgcctaacttcagaacctttctactgcatgatgatacaaagatagatggtaaaatggatgggtggacaaatggtgaaattgatggaatgatagaaggatatcaatatatcacaaataatttgagggcaatttaaagcaacgaaggcatgccctgctagggcgtagaagaggatagtgaaggtatccaggagacgttttgtttaacaaacatcagttaaggcagctgagtgcattgctctgtgttgcataaatwttctgagcataagacaacattcacaaaaaatgcatttagaaaaccacaacaaattaataaggcctctgagcactttcaagggctagtcaatttgaatgttaacatccatcctgcaaaagagtggaaaaatgccaaatgtgatgtaatttcctgaatagtggggttcttacttccaaatatggaggcccctctctggaatttgtaccctttgaycccacttaaaagtctccttttgctacaaaactgaagtgtcttaatcttacacatattgaaacatctgctaaaatgccgttgaccttctgtcaacagggagcttcctctgcagaagggagatattgtttacatttataagcaaattgatcagaactggtatgaaggagaacaccacggccgggtgggaatcttcccacgcacctacatcgaggtaccgcagcctcttttctttctaaggaaaagcctgacagtgcccaaagcaccatttatttaccaaatgcttatgttttgtttcctccttttcctcttgtttccctgctttcttctcttcccttrttctcttttacctctttccctttctcagcttcttcctcctgctgagaaggcacagcccaaaaagttgacaccagtgcaggttttggaatatggagaagctattgctaagtttaactttaatggtgatacacaagtagaaatgtccttcagaaaggtaagstgcacttctcatgccttgctttggggctctcttggatggcgcagctatgtggggaagcgtggtgttgctatcacaccccagtctgggggtgctgtctgtacccttaagagaagtatgccaatcaataattgcattaagggctgggcacggtggctcatgcctgtaatcccagcactttgggaggccgaggtgggtagatcacttgaggtcaggcgtttgagactagcctggccaacatggtgaaaccccgtctctactaaaaatacaaaaattagctgggcatggtagtgggttcctgtaatcccagctattcaggaggctgagrcaggagaatcatttgaacctgggagacagaggttgcagtgagctgagatcgctccactgcactccagcctgggcaataggtctccaaaaaaaaaaaaaagaattgcattaaggcctgtaatcccagcactttgggaaaccaaggcaggaggctcgcttaaggccaggggttcaagaccagcctgagcaacgtagcaaggccccatctctactgaagaaaaaaaaaaaaagaattgcattaagggcaattggagaattttctgaggtaaggtatttttaaaataaaccctaggctaatatcagggtttaactatattgagctcactgattaaacatagtatttctggagtcttagacatcttttataagctgttttcaaccaacacttaccaactaatgatgtcataatgcattgtgttggggactgggttttacaatatattggtgtgacctagtggaaaaaacaggtccattgataccaggagaagtttgaaaagctttgaacccaaaaggcacaaaccaactacgcagaatgtgggagttaaatactttttccaagccaccattttcttatagaaaaaaaatgaagatagatggctctctcctaggtggttgtaagaggcttcggtgaaacaacttatgtgaagcccccagcatgacacatggtatcttgttggtgcttagtaaacaggagatgccagtattattattatcaccatcatgcttattcagaacataattacattgtgcagagaagttgttctttccagaatccaaacactctacatggcaaaattctctggcttgctaaagttactaagttactgattttattgaggcttgagggaagtgagcacattgttagaaaaagcactggaagcaacccagttgcccaacagcaggggatcagtaattaaatcattatatgtgtgtgcgacagaataccctgcagtggtccattaagctatgcaatgccattaaaaatctagaattctatttcttgataaagaaggaggtttactatgtgctattaagtattttttaaaaagcaagttggaaaagggaaacacagttcatactcaatttttataagaaaaaatatgtgcaggtttaattcacatgcatagaagtaaatctggggagtccatatgccaaatattaagtgtttatccccaaatgactatgtgatgggtgatgattgttttctgctttacgtttgtgttctgatttttctataatgatayattrtaagtatctataatgctacaaaagaaagaaaaagtgaaaccccccaaaatctttgccttagaaatgaagattgggtatctgtttcacattaaatgagtcaaaaacactacatttgttccctggcttagggacacaaatctgatgttctcctttactaaaatacttaaagaaccaagctgaacttcccagcatcaagatagctcctctgccattagcatcctcatcccagtggtgttaattccctccaggttcagcagggaaggtttttcctgagctaaggatgtgataaacaatgcaggacattgaagcatgcaggcagaggccccaggcatgcagaggcatgctaggacaaggaccctctctttgctgtgtcttccagggtgagaggatcacactgctccggcaggtagatgagaactggtacgaagggaggatcccggggacatcccgacaaggcatcttccccatcacctacgtggatgtgatcaagcgaccactggtgaaaaaccctgtggattacatggacctgcctttctcctcctccccaagtcgcagtgccactgcaagcccacaggtatctaagcttctcgtcactggttttcatactcagcatgtgaatttttgtagtcaacagtgctgatggcacacagcctctctgrggaggtttttgagcactgcaattaaaaactgtctgcaggaggccgggtgtggtggctcatgcctgtaatcccagcactttgggaggccgaggygggtgaatcacctgaggtcaggagttcaagatcagcctggcaacatggtgaaaccccatctctaccaaaaattcaaaaattagccaggcgtggtggcgggcgcctgtagtcccagctactcgggaggttgaggcaggagaatcgcttaaacctgggaggcagaggttgcagtgagccgagatcatgccactgcactccagcctggacgacagagcgagactccatctcaaaaaaaaaaaaactgcaggaaagcagactgtacactggactttgtctttatgcatacaaatggccttttccagtgcttggttgcagatatatctcaagggaaaaggaatagtcaagtaattgctctgggaataaggtgactagggaaagagaaacagagaaacaagagcctttatcagttggcccctcttgggtgaagctgttggtgtgggtaccaccactgtgtcataaatcccatggtccaaatgcggtcctcagtcatcttggccaaagttgacctgcagaagacaaaggctgaaagagagacttacaccttctcatcagccatatagaccagatccaaagtattatttgcattcactggaaccaggtgattggaacaagtaacttacagcatctcagtctctgtgggctgaaaggatataggtttataggcgtaataagatgttggctttcccaaacattaattatgaacaaacttgtttagaaatataaactattcctaactgatccccactttcccaaagccaagaaaatgtcagaaccttgagttcagggtgacacggtgggggtgacatccctgtgaaagagcctggacaaaccaccatgtatgttgtaaggaggttggcagaggaacaagagtaggacctgggggcccaggttgaccctgagatggtgcctcttgtctggtcctctaattgtttcctcctctgccacctgctcatcactgaccccagtagagggttcttggcagaaagcattaaacgggctgacccagggcttcctggacagtgatagccgcatcctgttgtcttataggacagagtgtgtgactggagtgggacattcttctttgtaaggatgcagggaactcaactacatttttcacttgactagccaagagtgattgtaaaacaaaactagtacactactcatactcctctctggaagactctgctgagctcccagagaaaataaaaccccagggaagggccatggcagtgtggggccacctttccccgtatggttccgggtcagggatctggatgcacaggggctgggttggctgggatggggagcttccaatgtgtccctttgaaaatctgattctgcaaagcagggcggcctcatccgtcactactctgacgggaacctctccccatctccacacctctcactgcttcctccaccccctgcctgcacacatcaggatcacgctcgcacatgctcaaacgcacactcacccatcctggtttctccccagatgtaacctgaggatttcctttttggacaccagagtgtccttgctcatcctctccatttcattcctctttatataccccttgtgattattttccttctttttcctttatgctgacacttgtaccttttgcttctttcttttgttttcctctcttttcttctttttaagttttccagtcacagcaagctcatcacgccagccccctcatctctgccccactcccgccgagccctgtcccccgagatgcacgctgtcacctctgagtggatctcactgactgtgggggtcccaggcaggcgttctctggccctgaccccacccttgcctcctctgccagaggcttctatctataacactgaccacctcgccttgtcaccaagggccagtccctccctgtctctcagcctcccccatttgagttggtcagatcgtcccaccccacgatcagtagcttctccactggccctaccttccccacacaaaacctactccctagcacctacttcccaggcctcccttcacatgaatggagacggtggtgtccacacgccatcttcaggcatccaccaagatagcttcttgcagctgccgctggggagctctgatagtgtcatctcccagcttagtgatgcctttagcagccagagcaagaggcagccatggcgcgaagagagtggacaatatgagaggaaagcagagaggggggcaggcgaaagaggccctggtggacccaagatctctaagaagagctgcttgaagccttcagacgtggtcaggtgcctgagtactgaacagagactctcagatctcaacacccctgaggagagccggcccggcaagcccctgggtagcgcttttccaggaagtgaggctgagcagacagagcggcatagaggtggcgagcaggcggggaggaaagctgctcggagaggtgggagccaggtaggactgcagcatgccgcgtgtgcacttggcgtctcacttggcagggtgggctgcacgtctcgcccctggtccatctacggaggccaagtgaatgctggtgagaccatttgcttgcctcaggagcaaagagatggccccagagggaatgggaggacatgaattcaggtgccaggactggatacagttggagggaaaggacaggctatatctggccacttgaggtcatttggaagttatctctactttgaatgcctcctggcctgctgcaagggcctctgagaaggcagaccttcctcacatcccatgtatgccttagagatgaccctcagtttgctttgactaacacagctgagaacaccaggctttggtgtggtgtggtttgcttttatgtaagatgcactttgtttccataacccatggtgctctgctagtgctcggctctgtcaggtctttgtcctgtctcgtgtttgtgtgggagygcrgggcctttgtttgcyatgaaacaaaggtgttttggttctggagaggagaatgcaggtctcctggggccctgactgacatggggtatcctcgaatagccatgccaggttttggggtgagtgtaccatcttctctctgggtcagctacaaagacccagagagcatttggacaaaggtagccttagggtgttttgagacctgaaaatttttttggagaaatgaacttagcaactaaacaaatcacaattctgattttggctatgctgttgactactgcgaaagtcaaagactttcggcaacttctcagaagcaaccaggtttgaatgccagctccacctcttacagtctagtgacttgggagttgcttcccctgtctgagactcagtttcctcatctgtaaaatggagatgatagcacctacctcaaagagtggttgattacaagggcttatgatcctgggaacatggtcagcactttataaacrgaagctatagagccaccatcttgggtgatctagaactgcttctagaactgagaatatttttagaacttccttagacccagattgagttcctgaagatgtctccaagccatttattaagtatctagtatgtctgatgtccacagtaaatagtgcttaacccttaggcttgcaacctcagtttccctttgaggctgtagttattcagtctatgaataaggcctgcaggtaccagcctctgggcagaatacaaaggtcatttgtctctcctcttgagaaccctaagttcaaggctcctcaaaacaaggaggagcctagcaatatcaccagggcaataatagaggcatgcttgggggacacaggagcacagaggcttgagacacactaggccagacttccagctccagccaagcacatgtgggcccatgggtgggccagcacatcaggagtggggatcactgagggtgagccggcatggggcagtttataagaaatcaggcttagccttttgctagaaagccacttaacctctcacatgctaagcaggagtggaagcagtccatcccttgtagggcagtcataaggattcagtgaggtaattcatggaagtcggtgcttggcatgtgccaaggctccatatgtggggtcacccgctgctgtggagggctgtaggaaagcagtaatacctggcaaaggctttgcctggccctggaacaggttgaggaaggaatagaagagatggtgaagtggctagttgaaaagaattaaacgtttctgacacaggaacaattctataaacattctaagtcaacccaaggcacccggggacatccttatcgtcagtgttgagtcatcatcccggcccaattccaggatcctgtgtgtataggaagtgcgcacggtgccggatctccgagtaaggttaggggtatacgcttcctgcttcctaaggcaggataggaggggagtagctggcaacactgaagattatgttgattggaaagccaggcttgttgaaacttggtgttcctttcttggtgggcctccagaccccaagtgtaccacttcctgtcccctcccttcctcctgccctcctggcacaagccccttctccatgggtgtgcacaggctgtggcctggggctcgctcccccttgagagctggcatttgtgtgaaaagggctgctgcccacacctccccttcagccccctcactttcccctcctgtggctggagcaggagctgacaactctggaaacggggtccttcagaaggggctcctgtgtcttgggccccctttgggtgacagacatgctaaaaatgggaaggacttgtatgacaactgttctctggcagccccatcaggatgacgtgaccacaggctgtgttgcttatttggaaaaatgcattccagaccagtttgtgtatcaagaaaattgtcagccattattctccttgctgaactaaagagctgaaacaaaagttcacttttattgtaggtattggggaggtaggttgagaatctgaccaataatgggagggaattttacctgagaaccttaaatgaaaagatattctgaaatgttatgatcatttattctttgaagcatttaggatattccaggtacttagctgcaagagatagagaggggtgaacatcatcagggcttccatttagatgtaacttctaggaagctgttggggccaagggaaagtttccctcttatccttgaagtttccctaaaaattactgacaagaagcaaaaatttttttctttctttttttttttttgagacagggtctcactctgtcacccaggctggagtgcagtggcacaatctcattgcaacctctgcccccaggttcaagaytccttcaacctcagcctcctcaagtagctgggactacaggcacatgccaccatgcccaggtaatttttgtattgtttggtagagacggggtttcaccatgttggccaggctggtctcatactcctgacctcaggtgatcctcccgcctcggcctcctcggattacaggcatgagccaccacgcccggccargaagcaaattaataggagaaaaggcatacagatttattcgatcatagttttatgtgacacgggagccttcagaatgaagacccaaccaatggggtgcagaagcttataccatcttgaggttacagaagagtgggggctcagaggatggccaaagacaggttatggtggtaaatcagattttaagcagcaagacacgttatgggagggagaaaagcaaggcttggctagcaaaggggtcttgttatttagatgaaagctcacaggtagcagcctcggagagaatagatggtaaatgttccttttaggcctttaaaggtgtcagactgccagttaatcttttctagatctagacaagggaaagcctcagagaaaacctggctgcatcaatgcagatttttctctacaaatacaaatctcctgcacaaaagacagctttgcagagctacctctttttgctggctctctgacagccatgtcaaaatatgtcaaaaaaatatattttggggtaaaatattctgatttcctttaacacctttcctgacagcctcccccacccctgcatgagtggattagtgctctgactttgggctgccatagcccctgcaatggtctgtgtgagcctctctcagccccctttgcttccctgtgttcccatacagtatcagtgctccaaaggcgggaccgtgatacctaatgtatggaaggcacttcagtgaatgtttgttgaatgaaagaaaaggcaagccagacayggtggcttacacctgtaatcccagcactttgggagcctgaggcaggcggatcacttgaggtcaggagttcaagaccagccagcatgacgaaaccccatctcttctaaaaatacaaaaatctcttctaaaaaaatacaaaaatcagctgagtgtggtggtgcatgcctgtaatcctagctacttggtaggctgaggtgggagaatcacttgaacccaggaagcggaggttgcagtgagcagagatagggccactgcactccagcctgggtgacagagcaagaccccatctcaaaaaaaaaaaaaagacaaacaatgactgactccaactaaaggagtttaggatcttcaccgggggagtaagacctgttcccaaatagttacaatgcaaataaggaaagagagtcacaaacagtacatcctggaagatcaagatggggagaaataataaccgggaaggaaggtggttgtctggagacttcaggaaaaaaaaatgccaggcagggtgtcagagccccagtatgaggaggtggttgacttgagtgttggtaagaaaaattgactgataacagtatagatttgaagaaggcaagtttattagaaagaaagaacgctgcaaaagggtgcagcagggcactcagtgagagaggactgagcgcactgaggtggattttccttaggagcatttatggaccttaaggcagaagcttaagggcaatttggaccatactggccacataggtcatgatacatgattacatctgtagatgttttggtgccttaacgtcagcaagggttgcacagtgagtttcagcatgccattccagagatgtgtagaaattctagttacttataaatttggagggaaagaaatctgggaccagatgcctgctttaaatgatagggaagtctaattacttctaattttcccagataaggaatttggcctgtttgatggtcaccaggtggtcattgctcccttctaaattcctcagataaggagtttttgcctctggggcttgctggatggtcaccaagtgattttgctctcctcaaaaaagtagcatttaatctgagccttaaagaataagaggttttctcacagatgtacagcaggagggtgggactcgaggcaaatagctcaagcaaaggcccagaggtaggaccatgaaaggtgtgcatagagaatgatgcattccttgtttgggtgaggcttctggtgtccacaggtgaataraaaagggggtttctggagaaggggctgggaccagaagttatgtcaggagtcacggtgaccctttgaatcagtcacctgcccacctccctcaactctgcagatgtgtggacacttcctgtgaaatggtttgacttttcactcctaaactgtttcacattgggtcagttgcccatgtttttaggtgtgttttttctctgaacagcagaagagagtgaatgaaatgaatgcaggggtcttcagggaaatcaggatggggtggggaagagcactggattgagagtcagggtcccaagttctagctctagctctgccattggcttgccaagtatcttttgttgagtcacttctctttcctggcagctactctgtccgtaaacaaaagattcagacaagagaaatgccattctttttagctttgatatcctttgattaggtaaaaatcctgcatgaattttagtttaaatgagaaagaagaacacatacaaaaatttaagtcaggggtttattgtcaacttacagaccttcacaatggaaaaatagaagttttgccttttagtttttgttctgagggacaacttaacttattggatgaaaaatgtgcgtacaaaatgcccaagcagtcagaattatcaaccaagttcttggattttcttgggcgcaattttggccaacaacatttagaacaatcaagaaagtaggctggggcgtkgtggctcacacctgtaatcccagcactttgggaggccgaggcgggcagatcacttgaagccaggagtttaagaccagcctggccaacatggcgaaaccctgtctctactaaaaatagaaaaattagccgggcgtggtggtagacatctgtaatcccagctactcgggaggctgaggcatgagaattgcttgaacccaggaggtggaggttgcagtgagctgagatcatgccactgcactccagcctgggtgacacagcaagactctatttcaaaaaaattttaaaaagtaaacaaaaaaaaaggaaagtaagggggacaggtctgatggtagtgagttatctcaattcattgttcacagtcagttacagatcaaactggttgttccactaaaaaaaagaaaaagaaagcaaagggaagatcatcttgaaaaatcccatcgtttgcatgatcaaatatttactgagtttctctgtgacagaagcactatttgttgactggcatctagccttggtttttaagtgtttttacaaattgtgagagtacttcctagaatttttgaattaargagaatatttagagaccatctactccagtaactgacaactttttctggatcacagaacctttgagaatctgaggtcagccaaggactctaggccagtagtttggggaggagagtgacacacagttttgcatcatttcaaaaggcccacacccaagtctacctgtgacagatcaccaggttaagagcctccagtcttttacaatgagatgaggaaaccaaggcctgaggaaagtgacagaaattttgtgatgtcagtttggttcctaaagggaaggaagctaatcaaataaaatctcaatatactggaaagctatgtgtccttaaagcatctgtctgagaagcataagaacaaactataggcttagagaaaggagaaggagggaaagtgactcaacttgagacagaaagatgtgacttcagagggaacacttctcaacacaaggaaactaaattagttcccagaaagataagaacagaggcataggcctgccttgaggatggaaatcagaaatagaaaaggaagctgtgatggaacctgcaagaaaaaaagaaattttaaatgttaagatactcaagtaaatataggaaacattttcctttgactcactcagaagggaaatctctaaatagagggcgtttaacagcttacgggatggggagagacgttggctgcggtacttacaaaaataagcagcaggtattctctcatcactaacggtagggaactggccaggcacggtgactcacacctgtaatcctaacactttcagaggccagcacaggaggatgtcttgagctcaggagtttgagaccagcctgggcagcacagggagactacgtctctacaaaaaaacattagccaagtgtggtggcgagtgcctgtggttccagctacttgggaagctgagatgggaagagcgcttgggtctgggaggtcaaggctacagtgagccatgatcacaccactgcactctagtctggacaatagaaaaaaaaaagggtaagggactaagacccaaagctaaagtgtctacccttataaaggtgttaggagaatggagcatgtcagtaggaagtgccagccacagggtactggacaaattaaggtgacctgttggtgagcatctctctctagctcttctgatatcttcctctggcagagcacaaacctagaagtttggggtgtggtggaatgtgcagaacttggagtctgagagacagatgttccaatactaactgttcacattcccaattcacacacggcaggtcttcgttttctcatttgtaaaatgaggtcaatgttgaccaccttcttgagttgctatgagaattaaatgaaatataatagagatgaaagcagctagcgcagcctgtaacgggaccataaatacctgttgtgtgatgtcgaggtaccagggaaatgaaacaaaagtagtttactttatccaccttaccctgttccacctaagagagaaaaatggtgggtggggaggatgggaagagaagaaaatagagaatgatgggaaaatcattttactttgggttacacaaatcgagaatttagaaaatctggaatttgtgctccccaaattagtttattctaccttcagtataaaggcataagctattcttggaaagcctttggtttcttcacacttgaatatgtatctgccattaccccccaactgtcttatgaaaggaagagaagactgtatgatagtctatgaagagaaggctgagcattggttgartatttactgagcatttaagtttagtgttgtaatcagattcaaattacaacaaagttaatgtgttgtctagtgagtgacttgcaaggagataaaatctagatggtaagcaattgaactagttgtttgtaattagttttatatttaagctgtgatctttttctcagtawactcaataagataactcagtggagtcagagactgttttgagggtgctctggtggtttcctggagctcaaacccaggagactgactcattcgggcctttctactcctctggaagagtttgcccatgatgttccagtaggtgcaaatctatcactattttggggcagtcgcttgggatacttccagaagtgagcactccatccatatctggaggctgcagtcgaaagccttcctcctcccagtcttcagtaagcaatgagtagagtgctgcctcccttaagccaagtcagcccctacccagtcctacttcttaacccatgggacaggcacattgcaatcatagagcattaaagccaaaaagacatttatgtaaattatgtccaatcctcttatgtattttagaacttgaagtcctaagacgttaagcattttgttcacaagacaatcagttagtacagagcatggcctggaacctggattttctcactgtcccgctgggaggtcagggtaggtcaccagaaaggtggggtggggtctgagaagacttgggatrtgagatgactagaggagtgccatctctgtgagactcaggcaggttaggggagcagcagagcctcgtgctgtttctagaggggatttggggccagggagaagtagagtttctctgtcctgtccacatcttcaggacttcctgctgttctgtagcctgtgtgcaatctatttgggcccacaaggctttggcacacacccaaagctggaagcggatgcttagtaactccacagtagcgccaggtgttctgtggatccagagggattaacagctccagggaggctaagatctgatttctgggggatttctgtgaactgaaagtagaagggcaacagcaaggacgcatgcagggtcacccacttgaggagaatgaagcaagctccaggccaggagaggcgacttgtgtacaaatacagaagaaagcactttctggatcaaggactgtcacctgcttcctattaatggrggaaaggaggggagtgcaktgtgtgtgtgtgtgtgtatgtgtgtatgcatgcgctgggctggttgtttttgtaaacacgtgaaaaactggaatgccgtcaccagagttggaaatgtccttagcattttttttttaktcttaactttattcttttttattcttaacactagatgaagtccttgttagaacttgtatcttctcttaggcttaaataagggcagatgctgagtacctggggagggctcagagaggcattgtctagtagaaatataatgtaagccacatgtgtgattttaaaatgttctagtacacacagtaaaatgraacaactgaaattttaataatatattgtaacccartatatctaaaaattattactgagattttacattctttattttgtactaagtttttgaaatccagtgtatatttttacacataacacatttcacttcatacttgccacatctcaagtgtccaacagccacctgtggctgctggctacaatcttggacaggataggtccagaagaagcactgtacaaagctgtaaagtggttagaaaatggggacaggaaaagaaaacataactagaggggaaaaaaaacctgaggataaacagccttcaaaatgaagggctaattcttgtgatagatagtaatggtttccatttccactgagggtstacccccatgccatgtctccgtcccctgaaaaaaactggtttacatttcagttatatgagctatttcacttaaatctaaacagagagaaattgagtcttaactaatagaataaatgtttatcttgccttcttccttcatttattcaacaaacgctaagtgaggcacccagtcatccctacctctcaggaatggggttaagtttgtactatacagatgttaaagctatgatgatgattatccttagctttgggcatggcctgagaccaaggaaggtacaaggtggaccatcaatgtcccttccggtactatagttcacaattaatgattggacgctattaccgtacaccgtatcttttacataaggaaatgtctttgaacacctagagtaaaaagtattcaagaagagaaatgatagatagtgcctgttttcagacaaggcagaaattgggtgttgctrtcatagttacacaagcaatctaatcatgatccaagagggaggtggcaggtagtatatggagattagatgtcaaagggctcagctttcacactaccttgtacaaacttcacaaggtcaggtcccagccacctggcaaaggcccaacatcctgagacattgtagaagaagcatgaaatggcctctttcgttttgtctcttcctttacccctgtcagagtccgaggtgactgatttgagtgattgcagtttagaaggggtttggagaacttgaagatgcttcccaaaaggacaagagtatagaagtggggtcgggcacagtggctcacgcctgtaatcccagcactttgggaggccaaggtgggcagatcatttgaggtcaggagtttgaaaccagcctgaccaacatggtgaaaccccatctctactaaaagtacaaaaaaaaaaagctggacatggtggcccacgcctgtaatcccagctacttgggaggctgaggcaggagaattgcttgaacctgggaaacagaggttgcagtgagcccagattgcgcctgggcaacagagcaagactccgtctcaaaaaaaaaaaaaaaaaaagaaaaagaaaaagaagtagtgcctgggatggaactcctctgagccttaaattccttattctgcactcctcaagtcagagggttagtacaaaagtcagatatgtaatggatctatatatgcttgtaaaatatcaggttcttcttactatatttgattcactgatcctcttttcagcaccaaattgtttgctagrtaattgattccagtcactcctttgggatgaatgaagttgagtggaaggaggctaggtttctgtaaactatggagatcttgccaagagattgtctacatcctctctttataccgcatttgacctgaggtcatgaggccaccagctggaatttggaaatattttgttttttatgagaacttttgttttcatgaggtgtgacccagaccaccggtcttggcatactatagccaaagaatctcagtgtagggcagttgaggtcctctgcacccttgccgcctacagttggtctgtgaaccagcagtgtcagcactaccaagtagaaatgcagaatttcacaatacagcccaggtgtatcaagtcagagtccacattttaacaggatcccaaataatagctatatacattaaagtctaagaaggatggctctacaatatcccagttagtcatagtccacagcagcctcagcttaaacagctgccaaggcagccaactcatttccacttgaggcagccccttgtattgttggattgtttggaagttctcccttctgtcatgttaaaatctgcatgtcattgtcacccactcaaggtgacatttcagacgtttcattcttctgaaagcccacatagaaggtacttggaaatgtccatttctttcctttgtgatacggacaccttaatccagaggcagtgagtggagggtgggtggtgttggagccatacaaggtcggctcccagtcacccggcaaagacctaacgtccagagtcattgtagaagaagcatgacgtggctcatttagttccgcctcttcttttactcctgtcagagtgcaaggtgactggtttgagtggttgcagtttagaaggtttttggagaacttgaggaggcttcccaaaaggacaggggtattgaaatgatgcctgcaacggaagttagtcctgcagggcttgctaacggttgaggacatttccaggggaggtgaacaggagagggtggtctggtggagcggaaagagcagctgagccactttacctcttactggctgtgtgatgttgaggaatgcatgaaacccctctgagcatcagcttcctgggttttttaagaaaacaatgataaaccctgtcctgcctgactccagggtttctgagggastcactgaagatgaggtcagtgagcacacttgataaggcagaagatggtctgaggataaaagacaaggtcagttgggacaatagatgaagccaggagaaaagcctaccactgacttgatgtgtgacctcaggggaggctcccactttttctatgtctctctgtgaaacaagtgggtcatgcacaaaagatttctaagcgcccatctagaaggccctggagttgtggcctattgctttatttttttatttttkagacagggtcttgctttgtcacccaggctggagtgcagcggtgcaatcatgctcactgtggcctgaatctcccgggctcagttgatcccaagtagctgggactgcaggtgtatgctgccacatccagctaatttttgtatttttttgtagagatggggttttgctttgttgcccaggctggtctccaactccccggctcaagcagtcctcctgccttggcctcccaaagtgctgggattacaggcatgagccaccatgcctggccagcctgctgctattattgcatgttacctggaggattttttcaaggatggctcttcagggtatttatttagaaaaacttcctagagcttggaattgagtcctgtctgggggacatggttccaaacactctccaagtgaaggctggcctctacaatggaagccccactcaaaaggcaggtttgcttggccatgtttgcacctgtgtttctatgttagcatgtggtacctgggttggtaagtgaagagtgacagtttcgtcacacacagtcctatttctggaagcaagctctgtcctacaagctatctgaattcatctcatacctcactggagtgtgtcatttgcagatttttccaggggaatggtcttggttggtacttcatatattaccaaggaagttttcaaaaatgttattccctttttcagtttttatargtttctgaaatacagcagacttgatggttctatgggcctgctctgctagagggggcttccagtcaacaaaataaccaaaactggctttgggttcagccaccttccctagatgcttactagctgagcgtgaggggaccaatatgtgtgaagggacctggctaagatggcctttctgagtctctctcctgccaatctggggaccctgtgttgttcatcctcacctcactgcagccatgtttccaatttcccatttcatttcctggatgcttgcttctaactctacatttgcattttcttctgtgcacccaccctgttgttgtggagacttggtggccataggccgccggtatctggtgtcatccaagcgtgatggtgtggtacgtggatttgctcatgcttttattttgaatcctttccaatgtgacatctgctaaaatgtctcccttataatttgcttggtgatcacagctttctcatcattcattgagagcaggaccagatctcacagaatctgaaaagagctatgtggtaagatgcctgttgaataagactgcagcttttctaaagagaatttttactgatccttacttctggaatctagactagagtgatgcctggttaacccacagaaatattatttataagaattctgtggctattgtagtagagcgagatgttaggccactgcattacccccagcccctggaaaaaagcagaggaatttagagacgatatttctactctgcctrtatgtgggattaaattaatgtattagtgcatgattggggatacatacttgcatttctaccctaaagtattccatttgtgacagttactcactaatttcaggcttttatgctgctgcctttttttttttaatattcttactaaattccaaattcttctgtatcttacctgtttttccatgcttacgcctggatccctcctgcactccactactggaatatctatttttttaacctggatcttcaactctgttttctccctggacttatgtgcttcgtctggaatgttacatctcttcctctctttcttttttttttgtccccatgttgactgttttattggggtttctggatatctcggggccacctcacaggaagcggtttgcaatgagatcataaacattgccgaaaaatctgttcattactgcagcactgtttctcatccccttgactttcatcacaaggtatccccttctgacaataaatcatctttaatcatttctcagcaacctcaagcccagcagcgaagagtcacccccgacaggagtcaaacctcacaagatttgtaagtactcctggtgaacttcgattctcatgttctcagaggactgttggtcttagaaagtgggtcgctggctgaatatggggcagtcatttgcaggaatgagtgaattacacccaggttctctcctgaggatttctagtgaaggccatgttctgcatcagccaaggtgaaaacaggtggcaggtaaataaaggccgtcatagactgctgggagagagasacaggtaaagattaactgctgtagaatgtcaaatgagagctgtgctgactggtttcrgtgctagtatagtgggaatatagaggaaggaatggttaattctgaccagccgtgaatgaaagggttgcttcattcattcattcataaaaaattattggatatctcctatgttttaagcacataggagaaaactctgtgcacagagaaagagagatttggaccaaacactgaaagacaaattagattctgagagctagaaaagggaggaaaatatcttcccagaggtgaggaccacatgtgcaaaggcatagagtgggtggtatttggagaacttgaaagggcccgtgtagctgcagcatatggttcatggaagagatagagatgaagcttagaggtgggatgggaccagatggtagattccagaatgcagttgaagtaagtttggattttattctgcaggtactagggagccattgaaggtttttgaagtaaggaacatattgatcatattttgttttagggagataactctggcaacagagtggagggtagatttcatagatcagggacaaagatgtttgttagaagacttcaatccagctaagaagccatgagggcctgagccaggacaaagtgggcattttgtaaccgtggaagtgagtataattaccaacagagatacatgtaaagaagcctagccagccacagagacagagaagggcaacaagagatgccagtgagggtctaagacgttcactttcacagaacagctacagcatctggtcagcagtgtcacctgccccagagaggccaagagtgggaaatgagaaatgtccaccaggcattttccatggcaactggaaaaatccctggtgacctctgatacggcagtattagtgttggtaggggtggtggcaggtgctgtgttaggaagggtcaatggtgagtggaaggcggggggctatagatcaagggaatagcagagtcaggggaggtgtttttagggtgcagagacaagcaaattttaccagagtaaaatgccagttaatgcaaataagatgtaagtgaggccaggtgcggtggctcacacctgtaatcccagcactttgggaggccaaggtgggcggatcacgaggacaagagatcgagactgtcctggccaacatggtgaaaccctgtctctaccaaaaatacaaaaattagctgggcgtggtggcatgcgcctgtagtcccagctacttgggaggctgaggcaggagaatcacctgaactcccgagacggaggttgcagtgaaccaagactgcgccattgcactccagcctagagacagagtgagactctgttaaaaaaaaaaaaaaaaaaaagtaagtgaaggaagagcccaggaagggggttcaacgtggcttggagaagggacctttctttcctcacatgtgtgagcaggggcaggaaggtgagtggaggcacagagacttaaatctggaggggaggaggattaaggtgctgtccacagcaagcttccatctccagaagtgggggcagagtgagagctcttggctgagcgtggggcaccaggattggcaagagagctgggggaaggaccccatgggacaatgttctgaggagtatgaggttcatcccaaattagagctgactggggtacccaagcagcaagagtgtgggactttgtccagccagtctccactgtctgggagtgaaaatagagaagcagatattggagttatttcccagggctgaggctggcaaagcagccatggtgggagttaaagggcccaggcattctaagaagctggcaaggggcatgtgttgggaggccagtaggagactccaaattgagtaggagacagcaggcaaatacagaaacatgaaaaaaaaaaagtgtttatttaccaattggaaattgatctgcatctcttaattcctcatttgagaccttccttctggcaaccagatccatcctccaaattatcaatacatttggataaatatggaaagtgaagttgtccctctggttttagcagagcagaatgaacctcttgtttttgagaactgactccacttgcttgtttctagtctttcttgcttgcacactggaattcattgacatctactggaaatggtagatgactggctcatttacagttttgcctgctactgtcttgtctcaaaatagtaaacagagttgtgaagttggtacatagtaggtgcctcttatgtatttgttgaagaaataaataaaaacaaagcttttccttgatgccaaagcaaggatcagatttcaccacaagcagtccagctgtctccagtggctgctagaacagacaaaacagcacagacccaatgccttaggccaactagcaagtaaataaaaatcttgccctcaatgctcactgggatagaaaaaagaaaaaagctttcaagggtttcagaaaaatgacatccacatttaaaagcagtgaatgaaatgtgtttaggcatgtaaagaaactcaagatagttttgctaaacagtgaggcaattggaatgtacttttaatagcatatatatagctattatatatggctattatacacacactttttttaaaaaacaaatgttttatgttctccatatatatgaccagaatgtaatgtctctgggcccaaataacttctgattatgcttgataatctacatatattatcctgtgttaaggaaaaggcttagtttactttaaagcaggggtccccgatccccaggcactaccacctgggctctgcctcctgtcagatcagcagtgcattagattctcacaggagcgtgaaccctattgtgaactgcacatgtgagggatctaggttacgccttccttatgagaatctaactaatgtcctgatggtttcatcccaaaaccatcccccccaccccaccccatctgtggaaaaattgtctcccacaaaaccagtccctggtgcctaaaaggttggggaccactgctttaaaggcagaggtcagagtagagtaggaagtgctctagataaaaaggcttggctgtggtaaccaaatgaagcgaaataagagtgatcatggcttgcttgtcagaagttctccatccctcagtcttaattatatgttgaatgcatctccccaaatgctaagttattagggaaatagtcaataaaatgcttttatccctactgataagtaggaaacactgctgaaaagtttawtgaacttgaaatggagtttaaaaattccttatttaatcctgtcgacatttgagtcacttactattcatttttttcatgtatagatttagctatcaagcattatatagctatataccacagaatgatgatgagttggaactccgcgatggagatatcgttgatgtcatggaaaaatgtgacgatggatggtttgttggtaagaatctcatcatgcttttcttactagttgtgtattgagggaataacagggggcgatgagccatgcaaaaagcaaagcaatctcctctgcacagaaagaagagccttctcagatttttatgaccttggaaattctgggccaccagtctgtgttgctattatgatggtgtggatgttgctaatgttgaacctgaaaccaaatctgctgcacagaagagcagttgtcagatttattaattgggtttccatttattttttatatttatttatttatttatttatttattgagacagaatctcactctgttgcccaggctagagtgcagtggtgtgatctcggctcactgcaacttctgcctcccgggttcaagcaattctcctgtctcagcctcccgagtagctgggactacaggcgcctgccaccacgcccagctaatttttttatttttggtagaggtggggtttcaccttgttggtcaggctggtcttgaactcctgacctcaggtgatccacccaccttggcctcccaaagtgttgggattacaggcataagccaccgcacccggccctagtctccacttatatttatattgtgcatgtgtctattttgcatttggaaattttatttttaaaacccttatgaaataacacaagaaaatgttgactgagcctatgtctctaccatgaaactcaggcatacgtgtagacattctaaagaccttatttactccaggctttcaataatattagtcaaagcaccctgcttaattaaaggatttgcctttacaaggagagagatcaacatttattgagattctattacaaagcagacactgtgtttgatatgcttttattgacgttctctcaacaaacagccctgtaagataagaattatcctcatttatcagattcaaaaactgaggcccaaagaagttaattaactatgccaagatcaccagggtagcaaatagtggggccaggatttgaactcaggccacccatctctcctgaaatctgtgttctttctgctcaggcatgaatataatgttgggagatattgacccactctgcctcagtttctccctgtacaagtggctttaccttcaccttctttccaaagaccagcccttccctgatttttctggcaaagctttgctaaagcaaagtaatatcagggctggggtggtaaggacagcaagacctcaacatgaatgagaagtcagtaagatttgccttgtcctcaccagcctcttagagaactaccccatcctcccgaggtcctcagaagcccacggccctcactactttgagtcgtctgttcagtagaaatcaggtctgagaagtcagtgaccactctggtgcagtgcaatccaatagaaatgcaatgtaagccatgtgtgaaatttaaaattttctagaagccacattgaaaagaagtaaaaagaaaccagtgaaattaattctaatgtattttgtaaacccagtgcattcaaaatgctaccatttgaacatgtaatcaatattagaaatggttaatgatttattttacagacatcttttcatactgtctttgaaacccaatgtgtattttatagttacagcacagctcatttcagactagctacatttcaagtgctcagtagtcacacgtggctatcattttagagagtgcagcactagtatgcaatagctgttaaactcgttcaggaatatatatattttttatgagaacttaggtgtgggaaggagcaccagttctctaatgaaggcctgccaggcagctgggtaaaggaaatattttgggatgagtatcttccttgcatccctgaactcttcacttgcttctttttttttttgagatagagtcttggtttgtcacccaggctcgagtacagtggcacaaacttggctcactgcaagctccacctcccgggttcaagtgcttctcctgcgtcagcctcccaagtagctgggactacaggcccgcatcaccacgcctagctaatttttatatttttaatggaaatggggttttactatcttggccaggctggtctcgaactcctgacctcaagtgatctgcctgcctcagcctcccaaagtgctgagattgcaggcgtgagccaccatgcccagcctcctcggtcactttgaaaagtagcattttcaaactacaaataaagtagccttagcagaactcatttttctcatccataaggaaagatactaactagctatgtggccctaggcaaggttcttattatctctggaccctaccatctcagttctctaaccttcttggccattctccataggagttcaactagatgttttaggtttcctaagctttaacatatttttttagcttagaagtttcactttgggtagtaattccaacccattggtagtggctgcttgagatgtgtacaacaggattccgaagccaaatctaagccaattgtgataagggtgcagttatcaaattgggatgtctgctaaagaaacgataatgatgatacaacatatatttgccactcctgctttagagagagaatcccaagggaaggaactagattaaggatcagcagtgctgcatctggagcagcccaggaagggctttgttcccagatggctcaatgctcctggcttagcaggagccctaacaaggttagtaccaaagatagggactcaactgggggcttaggcacaagctggataggaatttccttttgatgggtggccatagtcagtgggcttttagaaactgcatggtttagaaaatctaaatctcaggtatcttcttgtgtcagataaatgtatgaactcctccacaaagcagaagtgttggaaagagcaatggactgggagtcagaagacctcggttcagattctgcctctgatagttactaagcagtgggacctcagacatgttacttctactctctgaacctgggttccttctgaaaaacaggagtactagaaatgcctacattgcttaccgcccagcattatttggcagcctaagtgagataagataggggaaagtactttggaaaccatacggtattctctaagctgcaggactgttacaaggggttttggagcagaaatctctgcagcgtgctgtctcaactcaagcgagtgggtcttctcatgttttgtatgtgtgtgttttttcrtaggtacttcaagaaggacaargcartttggtacttttccaggcaactatgtaaaacctttgtatctataagaagactgaaaaccatggagattatttttattggaggaggaagcatcattcatgaaccgatctttttagttgagtcagtaggaaaattaatacagtggataaagtaagaagcaaaagacagggacagagaagtgttgtgtttaaaacccaagcctgtctaaggttactgtgtattagacagggccgaactagtgtgctgagcaaaaagaattgaagcaaattgtatttacttagccgcttctgggagccacttcagcctttcccctcccctccacttcttgggtaatctgacctgaagcatagtccaggagcagagttagccagaaatgcctcctgctgccccagccttagagagctcccatctcaatcattgagcctgaaggcttcaagcycaagaatgcaacaagacccccagcctacatttctcagctcccctggagccagctgatcctgtaacgctgctggaggtcagtctgagctaccaagactgtccctagacaaaggtggagtcccccacactgcccaagaccaaatccctcactcaacctgctgaggtgtggatggggaaacagaggcaaaactgaggcacctgatgcattcagcctgctgtgcagcagtgccattgactgccctgatgttcagagagaaacgcacacaaggtttgcccatgagaattggggagcagatggccaagcagataggttatgtctgttttctgagtgatgaagtcaggaagccctgtggctctggaggccacttgtggttcattcttttcccatatccttggcttttagaaatggttaccttcaggacagtgcagctgcatttatcagagcactattgctaagttttcttttctggcttgtgtttttctgggacagtttagaattgggaggcctattctcatagaacaccaaaaatgatgttcagtgattcatttaacatacaccaatgtactctrgctgctggggggacaaccataagcaagacatgcccagggtttgccgtggctccagatctactccctgtaggagttcaaggatcacacaaacggtagtaaccagggttgtgaatctgagtacaccctggcaaggcttctcttcagactgaagcagcaattctgccactaccagcagcaaccaggabgtctgttctttgtgggggccagatcagaagagagaggcccctgtgacgcccgggctgcttggtcacaactctgtccaattcaaggatgtttatcggcctctcttagatcctgagtgagacaaatacagaaatgacccattccctgcccaccagaaactcagaggtgattggggagactgacacaggaaaatgaacttaatcaagagagactgtgatatgtgctaagaagggtgtgagggagggagagatgaattttccctggagggatcctagaaagcattgtcatattgccatctccattagctcacttttaaacaactagggtgctggaagaacctttgtctgagggtagttcatagctggaaatacttggaatattttccagagtctctaaactctcatcttcccccacagatacacatccaagctcacaaataggagtagcaattctaggtggtagggttgtgtacggaacccctggctgtctgcatatatctcagaattaccccaggaccattgtcccaaagtctagagtctttacaggtaggcaaaattygttttcaatgcctgtgcctcagctgctgtcacaaatacccatcttaggatcccatcagcttcccatcccccaccagacagccacagtaccctcactttctccctattgttctttcaaatcctgttctcaggaaagaaactgccactaattcattcacactaaggtgtaaatgattgataataggaatgagttacctcttcccacagacatttgtttttaagtatgacagagcagggccttaatcccaagggaaaaggttatggaactggagggggtgagctttctgggtagaaggagacttcctgaatttccttaaaacccagtaagagtaagacctgttgttttggaaggtctgctccaccatctaagagcactgtttttttttkkttgttgttgttgttgttttacggtctctgagggaatatagtaaaaatgcatatgcacgtgcaatttgcacggcagcatttcaccgattgtggactgtattggctaatgtgtttcctggtctttagatgcaaaccattaataacactatcttatctcatagttttttcaggggtgcttcttgattagtagggaattttgaacacctctttaaatacagctagaaaataaaaccaatttgtaaagccacatttgcatatgatgccagcctcacgcatttgtatatctccagaaattcaggtatgcctcaccaatttgcccgtctttaataaaatcttgtgttaaaatttgcatcacgtcgccttccyatgtatgacgaaacaagaaacagagatttccaattgctcttttktcttcagacatttagtaatataaagtacctatttttatgctgaaatgtttatacaggtttattaatagcaagtgcaactaactggcggcatgccttgcaacacattttgatatattagccatgcttccgggtaaaggcaagccccaaactccttatcttttgcagtctctctgggatcagtaaaagaaaaaaaaaataatgtgcttaagaagtgggactgtaaatatgtatatttaactttgtatagcccatgtacctaccttgtatagaaaaataaytttaaaaatttgaatggaagggggtaaaggargtcatgaagtttttttgcatttttatttaaatgaaggaattccaaataactcacctacagatttttagcacaaaaatagccattgtaaagtgttaaaatttacgataagtattctattggggaggaaaggtaactmtgatctcagttacagtttttttttcctttttaatttcattattttgggtttttggtttttgcagtcctatttatctgcagtygtattaagtcctattgctagaataggttactacaaaaaagrttatattctgaaagaaaaataactgacattatatataaccaattaatttaaagtattgccatttaaattacacactgagagcatgtcctatgcagacatagatttttctgttcatttatttttcttcattgcagtggattgatttgataaatagatgtgttgaattactacatttgctgtacatattatttaataaactttattcagaattgcgtggcatatgtttgttctcgtcattcattgtttctttcctccctttgccaagcttctcaaatgaagcttaaattcactgcttcaatttcttataccctcctttccatccttaatcatttaccatctgccttctgccgcctccttgaagacaccacttcttaccttacttttttctcaataacctaactcctgaccctctgacttaattgattactgttgaccattttgccattatttctaaaatatgttcgtatttgttctgataacaaaagtgatgcacaaatgtctttaaaaacaaaagtaaaacattataaaatatgtataatgggtctagatttgctttataaaacatgggtatgggaaatgacatagcactttgtttttctaaatcaaattaatctggctatgagtcctctcttggtatgggtgggcgaaaatgcaatctgtcctttttctcctccaaaccaaatgtgttgaggcactaggcatgcagtctcccctggcatcccgtggctacaactactgccatcttagtctgggatggggtctgctgcacacaaggcatggatctgtcccctaataggaaagctcacgcctctaccctctctccctgggttctgtcctccacctccaactcaaagcaccagtttgcagtgctgcctctggggtaactcagtgtacttgggcctcccctgggagaggggcctaacagtctcttgtttcaagggtctgacagtccttaacactaggtcctgaatcacaggccctatgaacccttgtctccaacaaatccatcagcttacctcctaactacatttagaacccagccatttctaccatcatagcccaagccattttctctcacctggatcatcgcaataactgtctaactggcctccctgcttctgctattgcccctctagtctagacagagcaaccacagtgatcatcttaacgttggtccaaaaccctctagtggcttctcatctcgctaatgtggtacaatggcaagtccatagacatactgctcctcccctcccccttacccctgaattcatctccttcattccagccacacagccctctttatggcctcagactcattaagcacatttgaggttcagggtcttcatgtttgcaatcccctgtgcctggaaggccctttccccaagagctgcatggttttcttcctcctttaggtcttcctgttgtcttctcaatgaggcttttcgtgactactttacatacatctaggaacctattgtccccaccccctgcattccatccccctcttcctcctctgtttctccataacacttatcaccatctgaaatttgtctccacaagcaatcctgtaaaatccatggggttagtgactctgttttgctaatatatgcctggcaccaagaagagagtctaacgtggcactcaatcctttgtttatcaaataaacggataaataagcccttgaggccagagatcctagaactcagaatatgttctaccaacaatgaaagaagggaaaccattttcttacagtggcagaaacaacgaactaatctttcaaattatgctggtttcatacaaacatagaaagtgaaagttctccataataacactcctcacagagatcactcctatatatggtcctcccagcttgcttttctacacatactaaacacacacgtctctaaaatgctttatgtagtctcatacacttttactttcctttagtagaacttggacatgtttccataacttacttaacccatcgtctattgatgatgcaggtatttgaggttattgccagctttttacaacaacaatgctgctttgagtaaaattattggcttaaagagcaggaacatttcaaaccttaagagatttccaaattgacttcccaaaaattccaattatactcccaccaagtccatggaagtgtgtttcccaccacccaattaaaactactacattgtccgcttccatgaattggggctccttggttcacctgcttttgactggccaaccccttcttcatcctctttctagatcttcactgcatcctcagccctctgttattttatctcaatacatgctcctgcggagagcagatctctcccaatataattacggcccaaagagtcaattgtgggagggccctttcaatgattaaatggtagaagcttaggccgggcgcagtggctcacgcctgtaatcccaacactgtgggaggccgaggtggacggatcacctgaggagaggagtttgagaccagcctgaccaatatggtgaaaccccatctctactaaaaatacaaaaattagtcaggcgtggtggcgtgtgcctgtaatctcagctactcaggaggctgaggcaggaaaatcgctggaacccgggaggcaaagattgcagtgagccgagatcgtgccactgcactccatctcacaaaaaaacaaaaacaaaacaaaacctaacactactgcattggctgagacataccaaagggcgttagaactagtctcagtcaggagttaatccagagactcaaactttctcatcagtatttgtcttattcttggcgttttgtttggctacattttcacctactgaatgcagcagtgggaaacatggctgcaagctgctccagcctccttccagctctctgactccaaattctcaaggcaaaaggaccttcctatttggctttccctgaaaacaactccagatgctggcaggcccagcctggatatttactcttccctagactaatcactttgactaaagaggcaactttacttgtaaaaacctttgtggcttttggccaggcatggtgactcacgcctgtaattccagcactctgggaggccgaggtgggtgaattggcagctcaaccaaaacctcaaagaatgagggagaggagtggctgggcgaaggggtgtctgctctaagaaggggaaaaggaaactggacagataacagctcaatggtccactggacttggagagttattgtaacacactttgaaaatggaacactattgtcctgtcccagtataaacttcagtgtagttgaaagcaggctatgtgctgaagttttgctagccaaggtcttgacaagaatacagtgggaggagaagtcccagaggagggggccaatgcgaccaggggggcacagcacaaccgtatctcatgctaaaaatatcagactctaatggaagggaacaaagttgatgtctcagaagtcacagaggatgtttggatgagttgtacgtgggagtatttttccaagtcttagcacatagaaaccacatctgtctcaggaacacttaaccaggtcttttaggacaaatcaaagaacttatcacttgatacaggtaatttttggaacaaattagccaacaaagtggttcagattgaaaatattatagaacatttaagataaatccatagatgcaaaaatccataatgagaagctctgaatgaccgtgtgacactatgaagtctgtcccggaggacaactgcactggtcttccaggaccctcactctagccttgtcaggggcaaaatattgagtagattaagagtctctctacctttagggtttacttgtttttcaagtaatatctgacaaacagacgaatctgcaaaagggagatcaaatcatcttcaatagtagcataatgtaaatcgatgatctcaaagcttggttcatggtcactttggaatctccaagccctttcaggagattcataatgtcagaactattttcaaatgatgtgaagctgcttgtggtagtcagcgtccaaagatgcctccagtcaccctcacctcttggtattcaggctcttgtgtgatccccttccccattctatgagggttggtctgtgtgatcaatagaatgttgcagaaaagtgacagcatatcacttccaaggttaggttgtaaaatcctttatggcttttggccagacatggtgactcatgtctgtaatcccagcactctgggaggccgaggtgggtggatcacccgaggtcaggagttcgagaccagcctggccaatgtggtgaaaccctgtctctactaaaaatacaaaaattagccgggcatggtggtgggtgcctgtaatcccagctactcgggaggctgaggcacaagaatcgcttgaacctggaggcagaggttgcagtgagccgagattgtgccactgtgttctagcctgggtgacagagcgagactccatctcagaaaaaaagaaaaaaagaaaaacctttgtggcttttgtctcatgcttggatcactcacttgaggaggagtggactacagtttagaacttctaagttctggtattttgttgtgttggatacatgcactaattcctgaaaaaaggagaagtattggaaagaacaatgggctggcagtctgaagacctgagttcaaatgcctcttaggcttacatacattgtgagacctcagaaatgccacataggctgtcttgagttttttcatctaggagggaaagatgcctggaccaaagtgagatccttctaggaaggaggaagaaaaaggatgtttggaaggcaatctgcaatgtccacattggagctccccagtcattctattgcctactgtataccagcactttccatgtgttatcttttaatagcacctcggtgaggaaggtattcttatctccactgacaggtgagggaactgagactcaaaggagttcagccccagggtatatgtgcaagtacatggcttcagtctgactccaaagccagggtcctttccattgatcacactctactgcctgcaaggcacagagctgggacaagactgtggaccagtatacctctggatcacctaaagcttaccaaaagactataacatcttcaaaagcaacctcattgaataatagtgataaccattagatgagcacctactacgtgcttgaacattgaaagttgcattaaaggtctatgtccctccttggtcagtcttctgccagagccgagacagcagcaatggcatagaagaaatctgccaatttcatgtcatcttattctccagcactcacaaacctctcagaagtgtggtccggcctcgaacctgtattgcctgaccactagtctgaaccctttgtcacctgcactgtggctcccatatgtggtgttatagatctgcaaagctaaaagtgaacaaaaatttgcactcttattttctgtgtcaattaagaataactccagctgcagtaacatatggccgaataaatgccagcttatgtgacgcagatgtgtctcattatctcgtggaaaagaagacagggctctgggttagtatgtcccctggcctttgtctcataatggcaatctggctaccatggcagttccaagcaccacatcctcatacaactgcttttgaaggttggaagcagggagcaacaacacaggacagaggttttatctttgcaagttttccctcatcagggaagaaaaatcttttccaaaagcaccccccaccaacccaccccgcatctcattggctagaggtgaccatggggctactcctaactactaagaaattgcttcgaggaagtggaccaggcagagaggactgggagtggctttgaagtagccaaccaggggtgggttttgtaagcaagtcctttctgtatctttttcttaggtttctgtgagatcttcctgcctcttccctcagtttctttgagttctttcctggcttctcaccttcttctcactccctaaataggaacgtttccaagtttctctctgtaatctgttagctgcgcaatcttatctattccctttgtttcaaatatcacctctctgcaaattacttgtttccaccttttaaattaaacaaaacaaagttattagctaaactttaagaagtaaaacaaactgaaaacttgtataatcagccaggcgcggtggctcacgtctgtaatcacagcactttgggaggccaaggcgggtggatcacttaaggtc

SEQ ID NO: 6883 - DNA, 187844 bp, Homo sapiens
  misc_feature (1)...(187844): n = A,T,C or G, or insertion/deletion polymorphism (see Tables 1-2)
tatcctgggggcgatgggatacagaaagtgtacacatatgtgtttggatttgaggaggggcaaaagacagctaagtcctcattttccttgttaggaaacagatgatgcctgatgctggaaagtgaaaaatagaagaaagcatgttacttggagatatggatataaacaccaaaataatcagatgaaagagctgaaagttggggcctctggaaatggaaatgctgtcaggaaatgctagaggtaaggagaggtgaactgctaattttataataagcctggtagagtttacttatttattttgagacagggtcccactgtctcccagactggagtgcagtggcaaaattatagctcactgctcccaggcctaggtgatcctcccactgcagcctcccaagtagctgggactacaggcacacgccaccacgcccagctaatttttgatttttagtagagatggggtcttgccatgttgcccaggctggtttcaaactcctgggctcaagcaaccctcccaccccagcctcccaaaattctgggattacagtcgcgagccactgcaccagcctctgataggatttcttgaatctttaaaataaatacaggtatgaattttgtgaaagaacaacaaacatatcagaagaaataattccaagttcacaagcttttccaaagaattaaaaaagaggcaacagcacaccccaccccattttatgatgctagcatgacctccacaccaaagctgaccaggacaaaatgaggacgggcaattgcaagtcagtcttattcataaatatacatgcaaaagtcataaatagtatataaacatatttgcaatctaaatttagcaataggaaagtataagatatgacaaccaagttgagtttatctcaggaatgcaaagttagtttaatattagaaaataaatgtaattggcagggcgtggtggttcacacctgtaatcccagcactttgggaggccgagatgggtggatcacttgaggtcaggagtttgagaccagcctggccaacatagtgaaaccctgtctctactaaaaatacaaaattaactgggtgttggtgtgcacctgtaatcccaggtacttgggaggctgaggcaggataattgcttgaacccaggaaggggaggttgcagtgagctgagatcatggcactgcactccaacctgggcaatagagcgagattctgtctcaaaataaaataaaataaatgtaattcaccacattaaacataaaattcatatgatcatttcactaaagtgaaaccatctgataaaatccgactttatgtcttataaaaagccttaaaactgggcatttaaaagtagctaagcacttgcctgcagtctcagctacttaggaggtggaggcgagaggattgcttgaggccaggggttcaaggctgtagtgcactatgattgtgcctgtgaataatcactgcattccagccagaaggacataacaagactccatctcaaaaaaaaaaaaaaaccaaaaaaaaaaccctcaaagttttagcaacctaggaataaagagaactcctttaatcttaaaagggctaattatgagaaacctacagcaaacatcatactttatggtgaagtatggaaatctttccctttgaaatacagaaaaagataaggatgtctgttattaccacccctagtcaatattataatgaaaggtctaatcaacatagaaataaaagggaaaataaagtaagcacaaagattgaaaaggaagaaacaccccaggcgttatttgcagattctataattgtaatggtagaaaatccatgagaatttactgctgattacactctcaccagcggtgtatgagacttcccgttgttccacattcttgtcaagcttggcaatgttagatttttacatattttcccatctggtgagtatataataataactcattggagttttaatttgcacttttctaattaccaatgaggttgagtaccttttcatatttacatttcctaatttatgaagtgcctattcaaatcttttacctatttttccattgagttctatgtgtttgtcttactaatttgctggagctgtttatgtactctgaatactagtcttttgtaggttgtgattttaatataattgaatttatcaatatttcctttatgatttgtacattttttcatattaagaaatcctttcctatcctggggtcatatagatattcttctatggctttttttgttgtttgatttttttctttacttatttgttttagagaggaggtcttgccatgttgtctaggctggatttgtatttctggcctcaagtgatcctcttgcctcagcttcccaagtagctgggactacaggtgtgagctgctgccaccacctggttagatttttttttttttttagagacagggtctcactctgttacccaggttggagtatagtggcacaatcatggctcactgccaccaggacttcccaggctcaagtggttgtcccacctcagcctttcaagtagctgggaccacaggtgcatgccaccacacttgattaatttaaaaaattttttttagaggcagggtctcactatgttgcccaggctggtctcagactcacctcagcctccccaaagtgttgagattacaggtatgaaccactgtgtctgggctgaaacatgttttatcttgcttatttagatttatactccacctgtaattgattatgtattatgtaaggttggaagtcatttgtctttttctcccacatgaataggtaaaaggcaaattaaaactccagtgagatgctattatatgctcaccagaagggcaaatgtaaaaaatctaacattggttaagtatgacaaaaatttagaacaacaggaagtctcatacactgctggcaagagtaccattgtggaatataatttggaattaccttgtaaaggtgaagaaatgcatacattctctggcccagcaagcaattccacccatagattagactctaaatagactcatgcacatttgtgccagaacagtcttggactgttcagaacagcactgtttgtaatagccccattccctgaactgtccaaatgtctggcagtagtagaatgaattaaccaaatctggaggccaggcgcagtggctcatgcctgtaatcccagcactttgggaggctgaggcaggcggatcacgaggtaaagagttcgagaacatcctggccaacatggtgacaccccatctctactaaagatacaaaaattagccgggcgtggtggtgtgcacctgtaatcccagctactcaggaggctgaggcaggagaattgcttgaacccgggaggcagaggttgcagtgaaacgagatcgcaccactgcactccagcctgggctacagagcaagactctgtctcaaaataaataaataaataaaatgtcagaaactcatacaatgaaatgccatatagcaacaagagtgaaggaagtagagctacatgaatgaatttcacaatataatactgagaaaaaagaagtcaaacacgaaagaatccattctgtatgagtccatttctataaagtcataatacagcaaagaattcacaaagtatgaacacatgtatgtgtgtacctatatatatgaatatatgtgttgtatgtaaagttcataacatacaaaagaatttatatcaccaaacaaaggtcatgagcaagcaaacctaaactgttttgttgttgttgttttcggtaaaaactacaaagaaaagcaaggaaatcattaccataaaaatcaggagagtgggccaggcatggtggctcatgcctgtaatcccagcactttgggaggccgaggtggatggatcacctgaggtcaggagtttgagaccagcctggccaacacggtgaaaccctgtctctactaaaaatacaaaattagccgggtgtggtagtgcacgcctgtaatcccagctacctgggaggctgaggcaggagaattgcttgaacccgggaggtggaggtggcagtgagccgatcaccccacttcaatccagcctgggcaacaagagtgaaactccatctaaaaaaagaaaaaaaaatcaggagagtggttacctctgggagaaggaggtggatatgatatatggggtattccaggggcttctggaggactggcaatgttctgtcttgacctggatgcttgttaaactgtcacatttatgtagtatgcatttttctgtaaatatatttcacagtaaaaatggcaaatagaaagcagccagataaaataaaagtaataatctctatattccactaaaactgccaacatgtccactaaatacaataatgaacacagcactgggtaattggttctttgctttaagccttggagaaactcgtggagacagaagaattcttgtaggttaagtcatgcttattcaatgtacttgaaatgtttatttacaggtgggtctgcttgatgtgtgttctaaagcaaaaagaagcccaatgtttcttcatcccaagttttagccttttcttctgaaatataacgagatcctgatttaaagtcagcctgcattaacagaaacgctgtgagaccacaaataagcatgaacttcttacatgtgcaaattactgtgtgctttgtgccagctcctatgctatgacctttatmttataacagcctttatccccagttcatagatgaggaaactgaggaagagaggggttaagaaacttgctcgccagcacagtggctcaagccagtaaagctcaagccagtaaagctcaagccacggaggccgaggcgggcggatcacaaggtcaagagatcgagaccatcctcgccagcatggtgaaaccccgtctctactaaaaatacaaaaaaaaaaaaaaaaaaaaaaaattagctgggtgtggtggcgcacgcctgtagtcccagctactcgggagactgaggcaggagaatcgcttgaacccgggaggcagaggttgcagtgagccaagatcgctacactgcactccagcctggtgacagagcgagactccgtcaaaaaaaaaagaaaagaaaagaaaagaaaagaaacttgctaagatgacgtagctcagggtggtgaggcagagtctcacactcagatctggctgactaaccccaggccgcctcttgtgatctcagccaagctgcactgtcttcatgcaccctctgggacagaaagacaccatgggcagctgtaggtccagaaacagtggggagtcacttctccattttcactgaaggcaattggcagcatttgaagagccgggaaaacttaggcgcccagctctcacctctgaaggggttttgaagaaattctatgttcagtcctttatatatatatatatatatatatatatatatatatatatatatatatatatatatatatatataaaattatatatatatatataattatttatacatatatgtaattatttatatatcccatgcctggatcgcgtttacttgaaataaacgctgtcattcgtttgccgtccagtaagaggcaccctttagctgctttaaaaaagctgaacatagggttactgagtgggtgtgttcaatggcgtgagaagtaacagcgaaaagtcaaaagcaaataatgactaaagttttaaaactccttgaaactcagaaaagaatgaaagcagtgacggaaaaatcaattaattcagtttcacgaaccattgctaaaaggcagcaacattttagtggtttcctgacctacccgtatttcttagctccaaattcatgttggtttcatttgtcgcacggaattatttttagtttagggtttgtccttttcacttccacatttcccgaattcataagtctgtgcctgcggcactgcgtagacgcggggagttcggtatcagtttacacgttgccttcagtaaaatccgccagaggtccacccattttgccttttccccttccttgccctgggagaaatcctcccttcactgggagagaacttctctcccagggcggtgcgacccggagctccagcgccckagtctccacttcktttgctgaaacttgctttctaccagctaagaaccatgctgcgagtgattgtggaatctgccagcaatatccctaaaacgaaatttggcaagccggatcctattgtttctgtcatttttaagggtaagaaaaagttttcttctttttctgaagtcctgttttggaatgttagtttcttgagtcaccttcttgaaaagtctgcatttagacagctgatgaagccaagtctctccagcagcgtttgttacctgcgcaggacaggggagaggacccgtttctggggaaggcatttaattttctccagggcttgagactcatggaatgacctgatgttttagctctaagagtgtgatttctgtaagctcttggcagaaaacgtatttgcgaatcmctaaatttcaggtatcaacaaacatctgtattggttcaaagtaagtttcagtagtcttagatgcattttttctctgcctgtgagaaatgggtaaaggaggaagaagagcaattaaattgttggagacaccattactccttgaaccagcctgacgctgctttgattgtcactgggtttctgggaggtgggatgggtgaagttyatagttttattgagttttcctgcccttttgtgcctttgtaattgtttttatatctaractgttggggagctttttttgtacattctgtagcttttaaattgctcattgaggaaagaactctggacagctagtttgcaatttggggatctagttctatcttgcctgctgaatgaccttgggcaagttacttcatttctctgggatctcaattttcttttctgcaaaacaggcgagaagggtttagacaagatcatctctaaaaacctcatggttggctgagcacagtggctcatcaaccctgagccaactttgggaggccaaggcaggaggattgcttgagcccaggagtttgaggctacagtgagccgtgatcacgccactgcactccagcctgggtgtaaaaataaataaaaataaaaggctcatggtaattttaaaaggctatttttctatgacacttgattgccattrcaggggaggggacaggaatgcttggtgtcatggtacaatttgatgtaagtgacttagttttggmtaaagtggggtttctaaatctcagtgtggaggctttatctattttgtttgtcattggtaagattgccaactcacttcttggcaagagggatgggaaagagagggaaaggcagagagagtgggagcatggatagacatgtgtttcctgaccatgccttgctacatttctcgtttcttccaggagcctgactgctactccctgtcagttcctgaggcatctatacctttcgcctttctgtttcccgtttttcccctttatttctcttcttaaacctctctctctgaggatgagcaagaaaatgaaagaaatgaaactcaaagctggctggctgggtgtggtgacttctgcctgtaatcccagaactttgggaggctgaggtgggtggatcacatgagggcaggagttcgagaccagccaggccaacatggcaaaaccccatctctactaaaaatacaaaaattagccgggcatggtggcacatgcctataatcccagctactcgggaggctgaggcaggaggattgcttcaacccaggaggaggaggttgcagtgagccgagatcatgctactgcactccaacctgggcaacagagtgagactccgtctcaaaaaaaaaaaaaaaaaaaaaaagctggcaaattgttggttggttaaaaaaaaaatctaaagggcaaaaattggatttaaaaaaaattwaaaaaaatttttttgaataagactgggtcttgctatgttgcccaggctggttataattcccttgctcaaactttcttcccatctcagcttcccaaagtgttgggattacaggcgtaaactaccacgcccagcttaaaattgggctcttaaaggacaatgaggtttgaaaatctggctagtgaatatcatggactcaygttatgtcagagtttatttacatgtgttaggttttattaattttttgttttcttgaagcagttacataatagagacataatatgaagattttacatccttcatcattgacatataaagacattaaaatatatttggatcagtccgatcatgtaattatttaagtattatagattatagaggaattggagttaayactatattgaaatctgacttgttatttgtctggagtttgtatgcattgatgaaacattttaaatgatgaaaaatatatctaagtcaatgaatgcaaacmatcaattgaaagtggaaaacttcagttaagttggcaaatatagtctatacaaacaattacacatttaactttagtctcttttctggcctccttttttcatacaaatcgagtggtaaagtcattcattcatttagctaacaagcaacctgacagaggaaagggcactcaactcagagtaggaacatctgcattccagctgacattaactcaatatctgatttaaccacctgggtctccaatttctcagctgtggcatgatgggaactggtctttagatgccttccrtcttttagattctaattttctagttccaggtattgagttakctgctctcagcaagatgtgaaatgcattgccttaggtgytggaggggatatagcaacaaacacagcactcttcttgctttcagtctatgtcrgtggtttaaaatcctggtgatggcaaaccctttacaggtgtgttcccaattttgagcactgcgtaaaattaagtaacattaagttctgactgaactgaggatacttatagcaaaatactgtccatcagaaggaacatggaacaaaggcagacacacttcatagtgtggagtggggcagggtatggtaaactggaaaaagccctaccatgcctgtagtcccagctactcaggaggctgaggcaggagaatcacttgagcctgggaggcggaggttccagtgagcagagatcgcaccactgcactccagcctgggagatagaacgagactccatctcaaaaaaaaaaaaaggaaaaagccataccagaagatcaaggcggcatcaaagaaagtccctgtgttaacagaaatatgtaaacattttgcctcttgggtaaataaacaaagtcagggcagtaagcagctcttctcaaactataagacggtgaagaatggccaggggaagtgattgttaatggtgaagctcgcatagacactgtgaggccctattaggctatagctacactgtacttgggattgtgctgtactgacaaccaactggtttacagttgacctcagtttttcgtgttcaaaccctttctttctttctttcttttttttttttttttttgagactgtttcaccctgccatccaggagggaagagtgcagtcagtggtgtgatcatggtctcgaactcctgggctcaagcgatcctcccacctcagcctcctgagtagctgaactataggcacacaccaccatgcccagctaattttaattttttttgtagagacagggcctcactctgtttctcaagctggccttgaactcttgggctcaagcaatcctcctggcttggcctcccaaagtattgggattacaggtatgagcgcccagttgtgttcaaccgtgagtgacccttctgaggctgtcaaattactcagggcctggtaggaactaggaggatctgggggttgctgtagtcctggtgcatggttgttggtgatgttyagcagcgcaggtgtakattatraaagccacaacgcttatgtaatttttcatatccttcgggtacaccaggttccatgagccagatccgaattgaggctggagtgagtgcctgtgagccaggggtggccattctgccctaagttccatgcrgacagccaggctgtgaagctgaatctagctgagattagactacacagacctctgagaccaatttcaactctgagacttgatgattcttccaaacagtcctccaaacagaacaggttgttaaaaaactttttaattttaaataatataatatttttaatttctaaaattaaaaatgcatgtagacataarataaacaacccagaagggattatgcaactaaaaagtgaaaattctccccacacctcttctattctttctctctcccactgttagtccttcagggtcaccactctgaacaatttgatttgaatccttcttgatcttttgctctagacatataagttgtcccaactactgcctgttagcaacagtactgcagtgggtgtccctgtggtgcgtgtctttgtgaatatgcatatttcatttttatttatttatttattttttagatggagtctcgctctgtcacccaggctggagtgcaatggtatgatctcggctcactgcaacctccacctcctgggttcaagcgattctcctgcctcagcctcctaagtagctgggattacaggcgcccgccatcacgcccggctaatttttgtatttttagtagagacagggtttcaccatgttggtcaggctggtcttgaactcctggcctcatgatccgcctgccttggcctcccaaagtgctgggattacaggcgtgagccactgcgcccggccatgaatatgcacatttcaaaagcacagcttctatctttgtgtgtgtttgtgtgtgtttttcttttttctttttttacagagtttcgctcttgttgcccaggctggagtgcagtggcataatctcggttcactgcaacttccacctcccgggtttaagtgattctcctgcctcagtctccygagtagctgggattacaggcatgcgccaccacacccggctaattttgtgttttttagtagagacagggtttcaccatgttggccaggctggtcttgaactcctgacctcaggtgatccacccgcctcggcctcccaaagtgctgagattacaggcatgagccactgcatctggccttttcttttcttttaaaggtgcttttgctggatcttgccataggcttccattttccctttgacctatcccttgcttctgtgtccaatctcttgaaaaggtgattgagcggaggttttcttgcatacttttatattattgtgcctttacaatgtggcaacattacattcacataaaacatccatctccttgggtacgtagttgttgctactatagcatttttctcattctctccttacaatatcccccattccatcagccagaattttctctcccttctggtcttgtgtaaatcttttccttgtggaatggctactgctactgtccagatggccaccagataattgtcatgttattacttattttttccagattcctgtcattttacttggacctgtttttggaatgtgagcctagatatttctagaatatcccccctctaattagcatatcaaactttgtagtcttgagcaaaccagttaacctctcagagagtccttttttcttttgaaaaatggggctgtaatggcttatctgaaagggagttaatctctagacatcccaaaggctgtgatgtatccaatagacacatgtgtatttttagtaaaaacctgctttgctatttgaaattataaagttgattttttttttcagtgggggacattaacaccaagaatatatcttttaaagcatttttaaaataagctccaaagctatgagattccacttaagaatggggaagtaacatcctggccaacatggtgaaaccccatctctactaaaaatagaaatattagctgggcgtggtggtgggcccctgtaatcccagctacttgggaggctgaggcaggagaatcgcttggacctgggaggcggaggttgcagtgagctgagatcgcgccactgcactccagcctggcaacaaagccagactccatctaaaaaaaaaaaaaaaaaaaaaaaaaagaatggggaagtgatgtgagaaagagctcatggatagtattcactgtggtttgtccaggcacttggtgcgttccccacagagagccttggttcacccagtgagcaccataggactcatcaagaagatccctatcagctcaaactgataatcacactactcgggtattcccataaaaccactgtattgtattgacaaaacaatcaggaaggcaaaagtgtttaatctactgagtcattcccatccctttctggagaacaaggcttagagactcactgcctaaggaaagtggccccaccctatggaagcatgggaattctcaaaggtacactccccaaaggcacattctgcagggtctcagtcatctataaagctacaatggcccttaaaaaattaattaacgtgccttgtttttctttcctccttcacaacacatctcacctgcgtgccctcagcttaggggtgctggtatttgtctggtatgggttttcctttctaatcacgggtgtgtttctcctttactgtaggatttggccctgccaagaaggtgtgggattgttatatcctctgcaacacccagcacatcactgatgttgaatatacattttaaatattgagcatgtagcaaagaactggcaggaaatttcagacaccttaatgtgacaaagtccttgatgcttagtcctgaaagagaccctgggaagtcatccaattgccctttacgtttaatatcctctcaggtgtttgtgaatgaggcttagcaaagaaccatgtcaagtattcatgaaccctgagtacaaccagttcctagcacctgttctctgggggcaaattggtgtataagacattttgcattcttgttcctggcaaggaaaatatgaagctgccagttttatgttgaaccttcatacatgaaacgtagtatatagaatgccatgatatggcagtggtcagctgactcactgtgtaatttctattgaacagctgttctgttgcactggggtgtgctttgagcaggtctgagcacagttctcaatcagaaaaagttatgggacatttgataccttaagccttatcaattaacttcttactgggcatgagggtacaaaggccctgagctctggggccagggatgcctaaatgagaattccagtggccatccctagttgctcatgagcaaatacaatctgcagcttcaagcccggtcatgatggctcacgcctgtaatcccagtactttgggaggctgaggtggacagatcacctgaggtcaggagttcaagaccagcctggccagcatggtgaatccctgtctctactaaaaatacaaaaaacttagccaggcatggtggtgggcacctgtagtcccagctactcaggaggctgaggcaggagaattgcttgaactcgggaggtgaaggttgcagtgagctgagatggcgccattacactccagcctgggcaacaagagtgaaacttcatctcaaaaaaaaaaaaaaatcagcttcagtgttcttaataatrtctcctgccttgcagggctgtttgaggattaaattaatgtacatgtgacattgcacatggcagtctataaatctccttacctatttgataacagtttcatggagcactacagtgcaccagagagtatttctggaactaagtctagaaaaatatgcataagatggcttggattttcaggcytaggtgaccgactagttagcacacaagaatgagatgcaaaccagaatagacatgaaaagttacaatctgagtagatgaaagagtgaaaaagcttgtggagaaagtgtcatttggcttggttttaaaggatgagtggaaatttgacagaaataatggaaaaaagacattccaggctttggaacagtacaggaggaccagagagccatggggaggagtaaygtggtatgaatagggattgaactttactcatcaaccaktggggagccgctaggccgcaatgtgaacagcagattagtactagtcagggagactagtaagaaggcttactagttgagtcaaatgcttctcagcacagatggagctcatcccaggactggaatcagaaggaaggcactaataaggaaagacactgaggaaacaacctgattaaattaaagtgataaggragccacactggacaggcaaatttggccatccttcctcacactgtactgtgaaatggaacatcagactgccttgcttccagctggagtgtgcaccctgtgggcgagtgcagggctggttggggtagctcagcaagaggccagcacgagggcagtagccacctgaggcggcagggaggccaccaagagatcgaasaaaaacagaaatacaaagtgatctttgaagacaaatnttgctgtcttcccaaagatcaaatgggggagcatttcctcaaccaagctgagccatggttcatttgcataaggtccttctctccctagcctgttgtactatctgaaaggatagggagtcatggttcagaattgcttcattacaaggagcagatacccacttcagcgtgctcaaggaaaccttgatttttctaaagctagaaagaaatctggagtccagatcacagacctcacmagagccagaatcatgtccgctcccctctcctcatttcccagggactgtgcagcctcctgcctctgcttctccctgcacatggcagccattacttttctgcatattgtctataattgttggctctctgcaaattggctgtccttagtgaggcctcttgcatgggctttgggttgctgcaaggtgactgggtcttgactctacatccaactgcagtggcagcgtctcgtgcatgagatagctcagagaaaaacaccaattgccttggttttggtcagatgttcagccctgctccaattaactgtggccaaggggcatggaaggccaagacaaagtgggtagaccagatgtgtctactcacagggcagccttctgggggcctagagtatgaactctgcagcctgtctccttccagggattagatctgttcttttccatctttactctgttggttgacataacctctcacttaaaagaaccccsttctttctgtaaccaacacaatacttggaaagggatgacctttggattcgaaaaattaattttcactcctggttttatccctaggagctgggtgtctttgggcaactatatttccgagccttcatttcctcatctacagagtgtggagaataatctatacctcacagggaggttgttgggarcaattgtgataaaatatatagagaacttgtcgtagtgctgacacagaatgtwgcatgacaggtgctcatgtcttctggcttttatgccccacttcttcccccattgctgcagggacatacagagtcctgggggacatttccaaggggtggcccaggcttagctgttcagaataaacaggatgctggtcagctgtggctgcacaaacagcttgaaggcattgccaaagtaggttctttgtttttaattgtggtaaaacacatataacgtaagatttaccatcttaactattttaagtgtacagttttgtttttgtttttgtttttgtttttgttttgagatggagtgttgctctgtcacccaagctggagtgcaatggcgccatcttggctcactgcaacctcctcctcctgggttcaagcgattctcctgcctcagcctcccaagtagctgggattacaggcacgtgccaccatgcctggctaatttttgtatttttagtagaggaggggtttcactatgttggccaggctgatcttgaactcctgacctcaagtgatctgcccacctcggcctcccaaagtgctgggattttatttctaatttcttgaggaaatggcctactgttctccatagatcctgcaccattttgcattcccaccagcactgcacaagtgttccaatttctccacagccttgacaacacttctttttttcttctttatttcataatagccatcttaatgggtgtgggcatagtaggttcttagcaactctctgacttggattttcagctcacacttgctgcattagctcagagtgagaattgctgcagtgcaggcctcgtcctcagtgatcagcaggaaggcagctctcctgtgatggaaagcccacctcgcaggagcccagcagcagcctgaaagagcctggtggcctcttggccagtggagcccagctctgaggtccatgtggccagagttgtgctgggaaccatagtagagccaaagacgtgtgggaaatagccttggtcctctgcaataccaggtcttccagttggccaccgtgccgagcctttttttttttttgagacagtgtttcactcttgtcacccaggctggagtgcaatggtgcaatcttggctcactgcaacctccacctcccaggttcaagcaattctcctgcctcagcctcctgagtagctaggattacaggagcatgccacaatgcccggctaatttttgtatttttagtagagaaggggttttgccatgttagccaggctggtctcgatctcctgacctcaggtgatccgcccaccttggcctcccaaagtgctgggattacaggcgtgaggcaccacgccccgccttcatttcgtttttaggaagtaggtattattgacatcttcattttccctatgagggagctgaggcagagacaggtcaggatttaactggattccagatggtccatgcgtcttcactgagctcagcatggatgaagaaacaactcacaacctctgactacacaaccaactcacataaacagttcctctctctctgaacagattgagttgtttagtggttggagtcattaggatccagtctgaaaaaggaagaaagtgtaccaagaacaaaagaacttaaaaaaaaagaaaaagaaaaaaaaacccatcccccctggggtgagtttgcaacagagcaatgaaagcctttatgacatgctgtgactcagaagctcagaggtgacatagcttagcagtgaatcagttccactgatagtcaagtttgagccattttattagtggagactagaaccataacttcttgtaatgtaaagtattaaaaatctaatatttgactggcagggcgaggtccacttcatttcacctccgtttgttagtttatgaccttcatcatcttttkcatctcaatartgcagcttataaattgaaaaaaaaaattccttgcccttctctctctttctttcaataaataaaatgttatgtttttgcttacccctcctaacagactgaattcattgctaggacactccctgtctctgtccctcctatgtttagcagctccttcctcattccaagcatgaatccattcaayaagcattgatccaagcattgattgagagggtactctgccaggcagtgtgcttagctctgtgtatagggtggggaacaaagcaagtttggccctgcccacatgcagcttatagtctaggctgtaaatggggccagcgttcagtgaattaagagtgtaggctgggtgtggtggctcacacctgtaatcccagcactttgggaggccgaggtgagcagatcatttgaggtcaggagttcgagaccagcctggccaacatgatgaaaccctgtctctgctaaaaatacaaaaattagccaggcatggtgttgggcacctgtagtcccaagctacttgggaggctgaggcaggagaatggctcgaacctgggagacagaggttgcagtgagccgagatcatgccactgcactccagcctgggtgacagagcgactctgtctcaaaaaacaaaaaacaaaaaaacaaaaacttctggaaaggagacattatcattattggcaattatattgatggtgatggtttactggctgttaagcactgtgctacatgcttcacatgtacttagttatttaattttaacatattcctttattttctttctttctttctttctttgtttctttctttttttttttttgagatggagtctcgctctgttgcccaggctggagtatagtcacgtgatctcagctcactgcaacctccacctcctggggtcaagcgattctcctacctcagcctcccaagtagctgggatttcaggtgcgcaccatcatgcttggctaatttttgtttttttagcagagactgggtttcaccatgttggccaggctggtctcgaactcctgacctcaggcgatctgcccgccttggcctcccaaagtgctgggattacaagcgtgagccactgcgcccggcctactcctttattttctcaccaaaaaagtaaaaataaaaataagaaagaagtcctcacttgagagctgaacaaactgagtctcgggtagagtgggtgaaatgcctcactcaaggtctyacagcagggtctaggtggagctggaacactaatgcttaccgccaaggctgtaccacctgtgctgtcccttatgcagccctgagtgcttggtcttggtcgcatccaaatctggcccatcctgtggtcaggcacgtgaactcagcccacattgctggcaatctgggctctgctgcttactcttggcagtaacttccctggacaaagccagccctgagggcatctggtcacaccatgctggggcctggggcattggtgcctttgagctggacatctctggtctcagaggccttgtctggggccccaaattccctcttgtttgccctagggtgttggacacattatgatggcttccatgtgtgaaattgccttgcagggtactgacagtgtagaaagctttttcatgggtgtaatctttttttttttttcttcagagatgcagtctagctctgtcgcccaggctggagttcagtggcatgatcttggctcactgcaacctctgcctcccaggctcaagtaattctcctgcctcagcctcccaagtagctgggactacaggagtgcaccaccatgcccggctaattttttgtgttgttaatagagacagggtttcaccaagttggccaggctggcctcgaactcctgacctcaagcgatccacccacctcggcctcccaaaatgctgggattatgggcgtgagccaccatacctggctcatgggtataatcttatctgttctccacaacaacacaagcaggtgctgaaggcagatattcataccgattgtgcagatgaagatatttagactcagatatcaagggaggccaaagctgtgtagccagaaagaggcagggaaggactagaagctgggtyttgggatgcttggtcctttgctttttcccactscttcatatatggttggttttctttgtgcttggcgtcttctcattttaattccaccctctgtccttgtcccaggccccactgacaaacaacagctcacaaacactcctgactcccagctctccctctgatctgcagcaaacaaccagcccagcttgctaaagcgcccagaggtgaaagccatgcacagcataggaaggagggttgaggaaagtagattaaactgctggcagggcccaaaattccagtgaaagagatgactaatgatgagacaccagggtctgaagctgaggttaaattcaactggaaattcttggcctgggagggataggatctaattatcaagatttttcactccrcgctttgcatttgttttcaaggttgttttaagtgactattttattttctcttgataccatctcttggagcgaggaaggrcagaggactggatcctcccaaagcttgcctgaaggaagcagttgatagttctgattccaacacctggtaatgtcccctgtgtcttgggcatgggtatgctttctcatttgatccttgctgcaattctaccaggngggcttttgtatcccctttttagaggacactcgggacttaagaggcactgtaggccctacctcctcagctgggtttgaaatgtatttgctgagtacttgagacttaattcattctctagcaaattatgtgaaatatactagtcagaagccagagaggttgagtggctccagagccagaagacctatattcaaattctggctttgtttcttactagcaggtaatcctggacaagctacttaactttcttgtgccttgaataaggatcataataataataggtaacatttacaaagcccttagaagagtgcctggcagatggtaaaccctatagttggtaggaattattcctgggcattagataccaatctttattaatgaagaagtctagatatgaagagctggagtaagtagaccaagttcacaccactggaaggtctgaaaaagtgacaggtcgcctggcaccctctgcctgcagtggcagttaagagcacaggtttgctgagaatgatggtttccagtttcatccatgtccctacaaaggacatgaactcatcattttttatggctgcatagtattccatggcatatatgtgccacattttcttaatccagtctatcgttgttggacatttgggttggttccaagtctttgccattgtgaatagtgccgcaataaatatacgtgtgcatgtgtctttatagcagcatgatttataatcctttgggtatatacccagtaatgggatggctgggtcaaatggtatttctagttctagatccctgaggaattgccayactgacttccacaatggttgaactagyttacagtcccaccaacagtgtaaaagtgttcctatttctccacatcctctccagcacctgttgtttcctgactttttaatcattctcagcaaactatcgcaaggacaaaaaaccaaacactgcatgttctcactcataggtgggaattgaacaatgagaacacatggacacaggaaggggaacatcacactctggcgactgttgtggggtcgggggaggggggagggatagcattaggagatatacctaatgttaaatgacgagttaatgggtgcagcacaccaacatggcacttgtatacatatgtaacaaacctgcatattgtgcacatgtaccctaaaacttaaagtataataataataaaatttaaaaaaaaagagcacaggtttggaaacaaggctgacttgggtctgaagctcagctctgccacttactggctctatgatctcgggcaagtcagttaacaaccctgatcctcagtttccttatctgtaaaatgagcatactcatatctcctatttttgttgttgttgtttgtttgyttgcttgtttgtttgagacagggtcttgctctgtcacccaggctggagtgcagtggcctgatcacggcccactgcagccttgatctctagggctcaagtgatcctcccacctcagcctcctaagtgagtaattgggaccacaggtgcaagccaccatgccaggctaatttttaaattttttgtagagatggagtctcattatgtttcccaggcaggtctcaaactcctggactcaagccatctcccacctctggcctcccaaagtgctgggattacaggtgtgagcactgcgcccagcctcccttgtagggaacagacgtgaatgtgtttaatatgcccagcacacaacacaaacaccaaggcagtcaagccaggtgcctggccctcctgggagcccttcccagcagccctggcagtgagcagagctgggacatgaccacgccccagcatcagcttttaggaagcagattctggctgagtcattcaaatggactggacttcactgcagctcccttggaaaatgtgggtttgattcaagagcctgtacatctgaaaggtcattcccagaggccagtggggcactgggtgtggagaggggagcagtcacccctcctgcctttttgctggggcatttctgtttatcagtgatatcagtgactgtttcagaaatgtcccaaacagcctcgctttgtatcctgttgccacttgcccaaaatgcctttctcctagaacctgtttggcagcatcttcctggaacgatagggcagccaaggttggaaagccaaagtcagagacactcctggagaggggtccacctgatgggccctgtgtccctgtgctcccccaggtgtctctcaagtccccagggtggaggcgtttctgccagcccttctcagaaacttctctgccccttgttgatagtagaaattagccagctcctggaggctgccaggctgcctgccagagaggagcagtcactgctcacatgccagctgccccagggaaactcagaagcctggaatggagccacgtggaagaaatattccaccagggcggtcccagcctcacagggcacttcctccagtcacaggggccctgccctccggagctccacagcctgggaactccctggggggatgcaaggaggctgccctggtgctgtaataagaaatcatctagctgtgtgcggtggctcacgcctgtaatcccagcactttgggaggcggaggtgggcggatcacctgacgtcaggagttcgagaccagcctggccaacatggtaaaaccccatctctactcaaaatacaaaaagtagatgggcatggtggcacatgcctacagtcccaactacttgggaggctgaggcaggtgaatggcttgaatccaggaggtggaggttgcagtgagccgagattgtgccactgcactccagtcatctcaaaaaaaaaaaaaaaraaaagaaaagaaaaaaaagaaagaaaaaagaaaagaaaaagaaagaaatcatctgatagctctcatttgtttagtgcttactgtgtgccaggccctgggctgggcactttgtattcattctttcatttaatcattaaagccgcctagtaatcacacttatatgaacttatgaagtccaatttactccgtcatggagaaattactatgtagtaagcgttgtggggggaataacaatattaataatacatagtctcagccttcaaggcatcaccctcttgtcttaatcctccaactttggaaactaattgctttttgtctctttcgaccggggtttgaatcccagctccatcacttactagctgtrtgacctctaataagttgcttaacctctctgtgtcttggtttcttcctctgtaactgggaatgatcataatagaatttatctgttagagttgtgaagattaagtgagagaatccatgggaagtactgggaacagtgactcagttcagagcacttaataataagtgctagccatgtatgggtgtggttcaggggtgtgtgaaatgttaggcaaaatggcagatgaattcatatggggctttatatatctcaaaagaaaggaggcatgacccagagacctagaaaaggggaagaagtacttctgaatgggagatcaaatgtagactcttggctgaacctagagatcttgttgttctattttgtctaccgaagagctgagttacttagggagcttttgtagacagcaccctaacttttcctgaggccatttcagaaagacacagcaatctaaccgttcaggacttggggggcacatcataaaggttatgtaccataagtctgggggaaaacttagtgattatatatctcgtctgaatgcatcagtttatatatgagggactctgagcttgggggttcagccttatattttcctaagataacagctcaaaggaagagaagtcacagatatgaaagttcagtcagaggggctgggccgacatctgtgcttttccctgcaggatttttaggatcagtgagacggtgtgtatttggaagcatttcaaatgtgttaccatcgtgttacttccgtgggcacctggtgttattggttggactagtcaggattctccagagcagcagaagcaatgggatgtgtgtgcatgtgtttgtgcagagacagaaagagagattttaaggaactggcttatgcagttgtgggggctagcaagtctgaaatttgcagggcgggccagcaagctggaaattcatgtaagagttgatgttgcaatctctagtctgaattccacagcttagaaaactcaggcagggtttctatgttagagtctagaggcagaatttcttctccaggaaaccagtttttgcttttaagaccttcaactgtttggatgaggcccatctaaattatagagggtaattttgctttacttaaagtcaactgagtgtaaatgtttatcacatctacaaaatacctcgacagcaacatctggacttatgtttgaccaaacaattagacaccaccatagcctagccaacttgacattaaaatgaaccagcgcagctgaccaccggcacagatgtagcaagccagtctcaggagtcctgatgtctttcaggccttttttttttttttttttttttgagacagggtcttgctctaacacccaggatgaagtgcaggggtgtggccactgcagccttgacctcccaagctcaagcaatcctcccacctcagcctcctgagtagctgggactattggtgcatgccagtatgcctggttaatttttaaatattttgtagagatgggccgggtgtggtgcctcacgcctgtaattgcagcactttgggaggccgagacgggtggatcatttgaggtcaggagtttgagaccagcctgaccaaaatggtgaaacccccatctctactaaaatacaaaaattagccgggcatggtggtgggcacctgtaatctcagctactcggcaggctgaggcaggagaatcacttgaacacaggaggcggatgttgcaatgagccaagattgcaccactgcactagatcctgggcgacagagtgagactccctctcaaaaaaaaaaaaaaaaaaaaaaatttgtagagacgaagtctcactatgttgcccaggctggtcttgaactcctggactcaagcgatcctctggccttggccttccaaaatgttgggattacaggtatragcaccgcactgggccaggccttttcaataaggttctgacacactggctggtaggtgaacagcaaaggaaatggttccgcgcaagagggcgggtggtttggctaagagagctgttcagttctcccggaaaccttgtttggaggctggcattggggttaattactgcagtggtgacctccgcagaactgagtgasaggcaggcgtagctaatcggaaaacaggaaatgtcctgaagaacgacttgagcccttgagcacactcagagtgtgctctgcatttgagtcagttgttatgttctgagctgaaaatattttattgctttccataggaagaaacagtcatcttaataaaattagacgcaggagccaggttggggggtaggtaatgtggagaaaggggagggagtttcctgtaattcaatttgatgttcagtgcctgcaggtttaaccttttttttttatttttacagaggtagaataaaataattgactaatataaatatgtgactggctgctgataagaaaaataatttatctactttttttttttttgcctgatgtgtttatgtgtgagaataggttttcaataaaatgtaacatatacacattttgataaacatcagagcctccttcttgaaagagattgagctgggtttctccagaagggtaggagccaatgccagccacttagtttttccttattagctagggaaatgggaggtgcagtggttaaatgcatgggctcaggagtcatactagacctggttagagggcttcgtcctagccctgtgatcttgagcaagttacctaaccattctgggctctctttgcttctctgcaaactgaggataataaaacagtgcctacgtcataggcttgccaggaggattcaatgaaatgatgcatgtaaagggcttagcaggccgggcacggtgtctcacgcctgtaatcccagcactttgggaggccgaggtgagcggatcacttgaggtcaggagttcgagactagcctggccaacatggggaaaccctgtctttactaaaaatataaaaattagctgggtgtggtggcacacacctgtaatcctagctactcaggaggctgaggcaggagagagattgtagtgagcaaagagcgtgccattgcactccagcctgggcaacagagtgagactctaactcaaaaaaaaaaaaaaggtggggggcttagcaatgcccagcctgcagtgagcatcccctagaggtaatgccattagcatcaacctcacacaatgagtgccaggagctgcaggaagttctggttgaatagctccacctggtctgtggtcaactggcatctgcctggactcagccactcccctttgttttcaacacacaattgaatcatgtgttcaggaacatgcattgggagaattgttgggccacttggtttttctcatgagttataaaattttgaagttataaaatccagtttctaataccctcctcctttaagtacttatatcagccaaatgaagcttagcctggtacttgaggcttcacagtgagaccataaccttcccacaaagcccgtttgccccctacccagttctatgctctttggttccagctggttgggtcctggagtgtccccagatgtgacataactggttctccctcctccatgcctgatccacccaccctattgtgtctactggagtgagctcgtcttctggctccacattttcaacccctccttgccsttgaattctcatctagctcagcctctgcatcttctgtgcacacagcctgaagtcacctttctttcctctgaatttttctgtgcattgatacccctctgatagcaactgaagtcctttctctatcagtcccgtatagccacatttcctctccccactagaccccctgagggcaggaaccatgtcttgggtatttttgtgtctcctacagtgctcaatgcctggcaatttcacaaacatttgttgggtggaagaatgaaggagctgattaatgtttgcggaagaactcactcagtgaaccatttctgtgggctgagctgtgaggtctctyggcctgagctgaccagtcattatttctgtttattccccctctgacaggcaggaagaaacttcaggatgagaatgagacaggcaaragcctggtggagctttgtgctatttcttttcttttcttagatggagttttgctcttgttgccaggctggagtgcaatggcgcgatctaggctcactgcaacttccgcctcccaggttcaagcgattctcctgcctcagccacccgagtatsggggattacaggtgcccaccaccatgcatggctaaattktgtatttttagtagagatgggtttcaccaagttggccaggctggtctcaaacttctgacctcaggtgatccgcctgcctcagcctcccacagtgctgggattacaggtgtcagccaccgcacctggcctgtggcactttttttttctttttctttctttcttttyttttttttttggagatggggtcttgctctgttgcccaggctggagtgcagtggcttgatctcggctcactgcaacttcygcctcctgggttcaagcaattctcctgcctcagcctctcgagtggctgggactgcaggcgtccaccaccatgcccggctaatattttttgtattttagtagagacggggtttcaccatgttgtccaggctggtctcgaactcctgagctcaggcartccacccgccttggcctcccaaagtgctaggattacaggcgtgagccgccatgtccagccagcctgtggaactttttaagactaagaattatcttacactcttctgtttcctgttactggcacacagtggatgcttaataaatgtttgtgaatgaatgaatgaacaaatgaatcttttcacactccccagctgctgactctggaacaatcctgtgcctcctgagggcagagaggatccatggtcccaggcttggcctcaaggtagcttgcagcgtgtcttccgtgttctctgtttcctgggtcaggaaccaggcttgggacttgtttcatgttgacaagcgctggttttttctgtgacctccctggagcccttgtccctgccttggctccctggttggagtcttggggacttggagactggaattttgcttcagtgccatctttcagtgatgcaaatcctaccccaagcctgggkgctcagtttctattgcattattttctgccttctccttgctttcccttcttgctgggacttcttggaatctcctatcttctctcttgaaggaccgccatggtctcagggtccagatccactcctttgagactcagttctccacccccccaagccccggttatgggagcagggtagtggtaaggtagagggagattggtggtactatttcatgcttgttgaatgctgggattcctaacctttttcaagcacatttgagaatctgatgagaacaatgagctctttcctccaagaaaactcacagatgcaatattttgtgtattagagcaaataatcttggagagtttcaggataccctggaacgcaaccataaacttccttatggacattttccaagacgccaagcccatcacatgtgttacatttaygaatcttcattatccagcatttctgacagcttccaataaggcactgtggcatggtggcaaacacacacaaacacagattttggagccagagggatgtagttcaaaatctggctgtttccttattagctgtgtgattgaaggcaggttaactactctccattttcttggcttagaaatgggaatgaccatgtttacctggaagaattgtctcaatggttagagacactgtggtagaatgcacagcctggcacctagagatgattctgtagagggagcagctacaattacacatagaaaccattttgtccagttctatttaagttaaaaattctttgcatgtctcctgtttctctcaagagcactttcttatactgtaaccagagaggaggattgggagtttctgttagatgaggagagggaagggtggggtcaaaatggaagtgtgggaggggaagtttcyggacagcgtctaggggacctcagagtcagatgcagtgaggggctctgtaggccacatagagagagcacaggcagaaccagccaggataggtctgggcacaagccracgaggagcgtcacgctgaagcttaggaagggaagccattgggctgtgtgttgccctctcaagtggaaaagttaatgcttagcagagtgaggtccatgactcacggccttgctatgctgaggtcttggaagaatgaggtggttagtcccacaggcagctgtgtgctgggagccaaagcaatgtgacattagctaaacaaaacccactacctcctacattccacagcagcagaggagaagcaaaggctgaggagtgattcaaagtgtggccactaatgtgagactgcctgggtctcaaatcctagcaagaccatttattaactgggtgacttatttgttttttgttttgagactgagtctcgctctatcctttaggctggagtgcagtgacacgatctcggcttactgcaacctctgcctcctgggttcaagtgattctcctgcctcagcctcccgagtagctgggataataggcacccatcaccatgcctggctaatttttgtatttttagtagaagtggggtttcaccatgttggccaggctggtctcctgacctcaagtgatctgcccgccttggcctcccaaagtgctgggattacaggtgtcagccaccgcacccagccaactgggtgactttgaatgttactcagcttctcagtttccttagctgtgaaagggggatgaaaatagtaatatatacctcctagggtttgttttttgtttttggacagggtcttgctttgtttcccaggctggagtgcagtggtgtgatcttggctcactgcagccttgacctcctgggctcaagggatcctcccacctcagcctcctgagtagctggaacctataggtgtgtgccaccacacagagctaattgttgtatttttgtagagatggggtttcattatgttgcctacgctggtcttgaactcctaggctcaaacaatcctcccaccttggcctccataagtgctgggattacaggcgtgcaccacctcacctggcttctcctaggtttttaagattagatgaatgccgggcgcagtggctcatacctgtaatcccagcactttgggaggctgaggcaggtggatcacttgagctcaggggtttgagaccagcctgggcaacatggcaaaaccccatctctagtgaaaaaaaaaaaaacatagaaaaattagctgggtgtggtggtgtgcacctgtggtcccaactacatggggcgccgaggtgggaggatctcttgagctgggaggcagaggttgcagtgagccgaaatagtgccactatactccagcctgggcgacctcgcgagaccctgtctcaaaaaaaaaaaaaaaattagatgagataatgctgacaaagcattttgtactcgaagattagcttttatttgggtaggtatttggggacttggggacccaaragaagcctctgctctttggactttgctacaaggaaactttaagcacttgctggatttgctcgtgtgctcatccaggtaggtgtactgtccaggctcagacacagagaagaaagatcttgtgtcttcagaaaaggtggcctcggagtaaaggaagccccaaattatccgctggtcttagaaagttttcatctactaatgaccttgtaccgaagcctatgggagggagtccagcttaatattgaagctgtgttggcatcttagcacactcagatgcagcatgagcttcagagctgaaattccaggtttaaatcagggcatcactgccaggtgtgagctcagataaaygtcttaactctttgagcctcaatatcctcatctataaaatagcaatatcagcatctcagaggttagctttgttggcttctttctgcagcaagccagagatgcagaggctctgggtagccttggtgagagaagggcagaacatcacatcccttaactccatgtagacctggagawgggaaaaccttgtagaccaaaaaatgccatttcatttggaaaactgtgattcaggtaaacacccatcctaagcgatgaatggggagatgtgggtgcaagtagacccttgggtaatgttcttagaataaatgaatggcccacgctctttaatttttttataaatgattgctgtctcttcctttatctcttttgcagatgagaaaaagaaaacaaagaaagttgataatgaattgaaccctgtctggaatgaggtgacttcattgtttyttcaactttgttttaatagataagctatttctgattgtcctatctttgggtgagaggttacctcttcccttcggaaggagaatctctacatttcacccccacccactccgtttccctttgtgttcaccaagagagcagagcagttcaaggagagtagctcaccagcgaccatcttctgtacagcagtggcgcggcaagggaagcctggactggcaggagagttgagttcttaccaggcaccgccacgagcttgctgtgtgagcttggtccacttatgttgcatatctggggcacatgtgcagagcaagggtgggattagatcatctccagagtctcagaaggaaggcctcataattaaaaacatgtctgcatgtgacaaatcaagagtgtatcacatgattctctgtgtgtctagctgggtaatgacatgtattggttttatgttgataaaagtgatgtccagtatgcttcatgtggaaacttttgaaaacttcaattaatctttaaaaaattaacttgggtcccactctctagaggcaactactattaacatctgtgatgtatcactaagtgtttattggaggaatatatttaatgaaataygacatctgataacacaaactagcagcatatagcaaatgatttcctctcctacactttcttgctattatatcctaagcatatgcccatattaattcaaaattattttaataattcaaaagtattttaattcaaaagcataaaattattttaataattcaaaagcataaaattcaaaagtattttaatgactgtgcaatattctactgaagacatataacttatttacctccccccactgtcgaccttatatstattttagaagtggttcagtgtttaatattttcacaaataagtgaaaaaatttaattcttcccactgaataggattttcctactctctctctgtctctctcttttaaaccacccaattattcatgaaactttaactttttaacagttgatggccagctccattgtgtttttcaaaagctgggtcaaacctccctggacaagagcaataatgaatgtctttgttattttcaccaagtcactaggccatgaaggctcccctccacccacccacctttctctcccaactagtttcaatatctctataagataaagactagarccttctgggtttttttttatttgtttgtttgtttttgagatagggtctccctcaggttggagtgcggtggcgtgattaagattcaatactgccttgaattcctgggctcaggtgrtcctcccacctcagcctcctgagtagctgggaccacaagcgtgcaccacacccaactaattgttttattttttgtagagatgggcttttgccgtgttgcccaggctggtcttcaactcctgagctcaagtgatccacctgcttcagactcccaaagtgctgggattacaggtgtgagccattgcgcctcgctagaccttattcttgaatgaagtgaaacaaaaaactttttaatgccttggggkttttttttgttctttttttgttttttgttttttgtttttgtttttgtttttttgagatggagtttcgctcttcttgcccaggctggagtgcaggttgctcaccgtaacctccgcctcctgggttcaagcaattctcctgcctcagcctcctgagtagctgggattacaggcatgtgccaccacacccagctaattttgtatttttagtagagatggggtttctctatgttgatcaggctggtctcgaactgtcgacctcaggtgatccacccagcacccaaagtcctgggattacacgcataagtcaccacggctggcctttttttttttttttttttttttattaaaaaaagacagggtctcgctctgtcacccaggctggaatgcagtggtgtaatcatatcttactacagcctcgatctcccagggccaagcgatagccctgctttagcctcctgaatagctgggactacaggtataagccaccatgcccagctaattttaaaaaacatttgtagagattacatcctgctatgttgcccaggctggtcttgagttcctggtctcaagccattttcccatcttggcctcccaaagtgctgagtttacaggcgtcagccactctgcccagcctttttaatgcctttctgaaacgcccagcaggtctcaggcaggttgagagggaattccacttrtctgtaatttccccagaatccagaacacagccagctggactacaagctccatgagagcaagaggccccttgggttggtcattgtggattcctagcacctgacagaactccaagaataaagcaaataaaaaatrcatttatgtgagagtgcttcctacttcagattttgaatcatcccaactcatctcttcaaatttgagattgagatcaagccacgtgaccaatggcagagagagatgtgctgtcatgcgagctggcatgtcctctgcagggaatcagccatcttattccattttgtttccaacatgttttttttttctttcctttcatattgcagatgtacttatcaagtaaactgttttataattgaaaccaaacacaaatgaaatgtcaaccccaaacccactgggattgctggtgctgggtgtgttcttttttttcttttttcttttaagatggagttttgctcttgttgcccaggctagagtgcaatggtgcgatctcggctcactgcaacttccgcctcctgggttcaagtgattctccttcctcagcctcccaggtagctgggattacaggcatatgccactacgcctggctaattttgtatttttagtagagatgggatttcaccatgttggtcaggctggtctcgaactcctgacctcaggtgatccatctgccttggcctcccaaagtgctgggattacaggcatgagccactgcgcccggctcttttttttcttttttgagacagggtcttcctctgccacccaggccagagtgtaatggcacagtcataactaactgcagccataactaactgggctcaagcaatcctccccactcagcctcccaagcagctgggactacaggcacacaccactgcgctctgctgatttttaaatttttcacagagacagaatctaagttgtccaggctggtcttgaactccttgcctcagcctcccaaagtgctggagttacaggtatgagccaccattcccaggctgggtgtgttctaagagaagctctgaggccacgtgtggtggcacatgcctgtaatcccagcactttgggaggccaagacgggtagatcacatgaggtcaggagtttgagaccagcctggccaacatggtgaaaccctgtttctattaaaactacaaaaattgkccaggtgcggtggctcacgcctataatcccagcactttgggaggtcaaggcgggtggatcatgaggtcaggagttcgagaccagcctggccaacatggtgaaaccctgtctctactaaaaatacacaaattagcagggcatggtggcaggcgcctgtaatcccagctattcgggaggctgagacaggagaattgcttgaacccgggaagtggaggttgctgtgagctgaaattgtgccactgcactctagcctgggcaacagggcaagactctgtctcaaaaaaaaaaattagcygggtatggtggtacacacctgtaatccccagctactgaggagactgagaacttgtttttttttagaagtgctaaaaataattttttaagaagttctgaaacaagttttccttccattccaagcccactacaaggaggatcaagtcatcatttaattattacctaatcagtcaaaggcatcagtgacgctttatcaatcttttttttttacttttgtcattaggaagcaacttactgcattaaaatgagagtctcagaaaggtcggtatattatagcattgaccgaccatggtggaacttaaaatgagaggcattttagaaaatgttttcttagattattcatcttctttgtttgatagtagtatgattaagaagagcagataatttaaaactagccattgaagaaaatgttttcacatataccctgcattttattcttttttaatttttttatttttgttattattatactttaagttctagggtacatgtgcacaaagtgcaggtttgttacatatgtatacatgtgccatgttggtgtgctgcacccattaactcatcatttacattaggtatatctcctaatgctatccctcccccctccccccaccccacaacrggccccrgtgtgtgatgttccccatcctgtgtccaagtgttctcattgttcaattcccacttatgagtgagaacaacaccctgcattttattcttgcagcagttgtggtagtcgttgagtccagctcttgagtatgaagcaggggtgtggtcacctggttgaagccacagaacctagaaagcaggaagccaggagttgtctacaggtcctctaagtcgacatctggtttgctttccygccccctcagctgccttcaggtttagaatttaatcatttctgcataacttcaaaagattgtcattggtgaaaataatgacccaacatgtagtactggtgcatcttagtgtaatctctgctccttctaacagcctttttttttctcttttttcaaaacctttctgtgaacagattttggagtttgacttgaggggtataccactggacttttcatcttcccttgggattattgtgaaagattttgagacaattggacaaaataagtaagttgttttcacctgtttttctcattttaggtattactatctcactgttgtttattttgttgaagagacacatctttaataacgtattataatacttccaatataaatgtgctttaattccatgccccgctcccttctaagccaatagcagatgtggctaatccatcacagcactttttcccaatgactgcttttattccaaaaaagctgcaaacacygagccacctagactagtttatcaaacttggcacttagagtgaagcctgttcacatgcctacaacttcttggtcaactgcacttcctacctctggcagtttatctgaactgtagtgatattggatacaacccaaatcacttctgattatttgtggcctatacatgtctcattcaagttttactttcagccccatttccatgttaatgtctccttcgccttttaatcccaacagacctaaacagaccttaatccttgccttactgcctctttcctttcacatggggaagggtcacggtggtgcccgtggtgacactgagggttgtcctctgagtaaaattgggagacttcccaaacaggttcccgtgggacagaatgancttagtattaataaattcaccctagtcctggatctggactttggccttgtagacccagtcgtatgttaccaattcaaactaaccaagttcacaagagactaaaggtttttttcttttttttgactctgtcacccaggctggagtgcagtggcacaatcttggctcactgcaaccttcacctcccaggttcaagcaattctcctgcctcagcctcccaagtagctggaattacaggcgtgcaccaccacgcccagctaacttttatatttttagtaaagacagggtttcaccatgttggctaggctggtcttgaacyccttacctcaggtgatctacccgcttcagcctcccaaagggctggaactacaggtgtgagctaccgtgcccagctgatactaatacttaaaaccagaatacctgcttattttccttctggtggaagtcaattgcctagtgacagggcatttctaccctccaacccatgaattttccttcaagtcataccacatgggaagccaaattactttgtatmctcgatttcaagatgttattgtttataargtatactatcaaattaataaatggttaggggccaaaaaaagcgtgatatttaatgcccccatcaattgtaagaagcatttcagtttttagtaatgttagtacatttaaaaatgtatgtcttaggcacatctgatataatctgaaggctgcagtgagagcaaaaatttaggataaattagttgaggtaggtggtcacatgctctgattgcttgagacagtcctggtttgctgtcctagcacagtgattaataatgccccttttgcagtcaacgtggctgggtttggacagtaaattattattattttttgtttttgagatggagtctcactctgtcacccaggctggagtgcagtggcgcaatctcagcttaccgcaacctccgcctccttagttcaagtgattcttgtgcctcagcctcctgaacagctgggattgcaggcatgcacctctccacctggctaatttttgtgktttttgtttgtttgtttgttttttgagatggagtcttgctctgtcgcccaggctggagtgcagtrgcacgatctcagctcactgcaacctcagactcctaggttcgagtgattctcctgyctcagcctcctgagtagctgggactacaggcgtgtgccaccatgcctggctaatttttgtacttttagtagagatggggttttaccatgttggtcaggctgttctcgaactcctgacctcatgatcygcctgcctcggcttcccaaagtgctgggattacaggtgtgagctactgcacccggcctatttttgtgttttttagtagagatgaggtttcaccatgttggccaggctggtctcgaactcttggcctcaactgatctgtccacctcagcctcccaaagtgctgggattacaggggtacagtaaattagatggtcactccagttattggggtcttctgcttaccggcatcaraataagagagtctgcacagacatggactccctggacagtgctttgataggcactcccatcttcgcctttgatgacatcctttttaccattctctgttgctgaccgatgccccctgcatatttttctgtaactatataaatacattctgggccaggtgtggtggctcatgcctgtaatcctagcactttgggaggctgaggtggaaggatcacttgagcccaggagttagaaaccagcctgggtaacatagtgagaccccatctctaaataaatgaatacatacctgcatacattctagcaggttctggtcccactctcttgcactggaaactattctagctttttaagtttctgtcgcatatctcagctgcgaactattatatgattatttattccccaccccaactcccaaaagccagttttatttcccatatttcaaagttttggggaaggggaggagaggggagggcctcacactagcctcctgcatgttactaagactaggccctcctcttctttgctttcttctttctgcaaatggtaccactgtttatattctagaccaggcctctccaacagaaatacagtgcagggtgcacatgcaatttaaaattttctagttgccagattaacacaaatatgaagaaatgggtgaaatcaattttaataatatatttaactcagcagattcaaaatgttatttcaacatgtaatcaatgtgtttgaatcactgtgatattctgcacacattctttctcttactcaggctttggaatctggtgtttgcttcacacttacagcacctctcaattcagagacttaccacatttcaagtgctctgtagccacrtgtagctagtggccaccatattggacaggatggtttcagatcctgggcttaaaacttcagacctctctgcaccctatccctcttgctttttttttgagacagagtctcactctgtcacccaggctggagtgcagtggcgtgatcttggctcactgcaacctctgcctcccaggttcaagtgattctcctgcctcagcctcctgagtagctgggattacaggtgcacaccaccatgcccagctaatttttgtatttttagcagagacagggtttcactatgttggccaggctggtctcaaactcctgacctcaagtgatctgcccaccttggtctcccaaagtgctgggattacaggcgtgagccactgcacccagctccctcttgcctcttatccagtctgtcctcagatcttatgttttcttcctttccaaagtctgtgcttgtgcctgtgtttcttccccaagcccacagccaccagcctggttgaggccttcctcattttatgccttatctattttagcatggcaatgggctggcctcaaaactctcatctatggtttaaagtccttgctttcctgaaggttacgatacttaaggaaagttagaaaataaacaaatacactaaaaaatatatacataatatgtcgggtaccatgaatgctgtgagctaaagaagaaactgttatatcccatgaagaaaagcaaatcagaggaaaagggaaagttgtcaagggtggggggaaaggagatcccattttatgtgaggtggtgataaggtgacaattgagcagagacctaaatataatcacaaaagtaattgcaattttgcaccaacctaatataatgaagaactgagccatgcagttcattggggggttagggagtaggggggaagaatattctgggcagagaatagcaagtgcaaaggccctgaggcaggagtgcactggggatgctggagaaacgtgagaaaggcagccaacctggggcacagtgagggttgaaagtgcaggaaggaggtgaggtcagagaaaccacaatatatgtggctttgggggccaaggcaygggctttggatttcatcctaagtggaatgagaatccgttaaaagcttttgcttatgatctgacatattttaaaaggatcactcaggctttctgtgtagagactggaggtaggaaccagttaggaggcaggaaaacaatactgggagaccattatatatttattttagacccattgaaaacacagtggggccctcagatgacagcagtgatggggagaggtcagccccccaccgtcaggctcaccctggcactcatttcgggcatttttgtgcatttctagagatagagtttgttgtaaccaagtgagttatagagaaacgtcacactttgagactaattcaggagtcctttattagctggcgaacgagagacrgctagcgctcaaaattctctcagccccgaggaaggggctagatttgttttataccgtggtctaaatagggaagggggagtttagctgaagcaatttttacagaagcataactggcaaaaagttaaaaaattaattggttacaaaagcagttacaaaaaataaccagttccaggtgtaggggcttaaactatcacaaagagataaatgcaggggctttaggtgccatccaccgagcacgtccccaggagctgctggtgcagcttgcctcaatgtcttatcggtaagtgcattcctggacrtgctttgagtcagtttacacyagtcatgcccttaaggaagggaggtaaaggggctgtaagtgaaggaactaaaatggagtctgtctggctctttcagctaagagaracaatcaggttaaaacaaggtagagtatcacaagttcacgtgcagtctatctgaacctgcacattttcatatttttctgaacctatgacatgcataattctgaacaaagaaaatatgataggtcctsttctaagagggtccttctaaggttcaggggcaccatgcatcgtgctgagctatgttgcacttggtgttatgatgcctattgagtataaagaccaaacgaggctgggtgtggtggctcatgcctgtgatgtcagcactttgggaggccgaggcaggcagatcacttgaggccaggagttcgagaayagcctggtcatcgtggtgaaaccctgtctctactaaaatacaaaaattagctgggcgtggttgtgcacacctgtaatcccagctcaggaggccaaggcacaagaatcactcgaacctgggaggcagaggttgcagtgaactgagatcacaccactgcgctccagccctggtgacggagtgagaaaaaaaaaaaaagaccaaatgagcacgtggttactctgatattatgatgacgggaattgttaggcataacagaaaaaggtaaattctaggccaattatgaagctggtcttggttactttttcaatcyyccccccwcccatcttccatccccctgacatttgctgggcacccagtgtctttaagtttcctggctcccactgtggtacccgctgaggcctgccctctgagccacaccctgcatcttctgccaattcttttcctgtacaaaacttacctgtcctgtggctcagtccttcaaggtcctgcttcaaggcactttctgagaaattaatcgggtgatgctataatagctgctaatagttaatttcccggtaacactgacttttggactgaaggccatcagtgacttacttgaaggagtgaacaagatgagaacttcagaccctatggccaggtcattggaggaggtgttttcactaaaaattagaacattatctctcatcctgcagattccactgcatagtttactgtcttgcagtggaaggccgaccctgcgtyagctctgtaatgaacaaggcatgatttcctgcccctccaccgcctctgctcttttgtaagcagtgtgcctccccatcctcagctgggaatcatgatcattagcttagtttccaccaactaaccaatacacacaccttggtcagattacctgtacatttcagaaacaaactttttttttttaaccatctgggaataaactatatgtgttttcaaaatatttgtgtattttgggcccagattttctttttggcttttctactaaagttctggcctttgaggatctgcttactgctcagtgtgggaccgcttccctcacctgaagtgcagggttggggcggaagggttttctacagcttaaggaatgtcctgcctgttgactttcctgttgccatggcgatggcctgtgcaaacatgagccctcactttgcatctgctgctccccggcctattagcaaacagttcccagctgcctcggtcagctgggctccatgcccacacccgcatgggctagacccaggcagtcccaggctcacagckcctgtgggcagtgacacctccccacccctcaggcactgggagcgggttgccttgttcagtgtggactctcctcttcctcactttacagtcatccaaccagccattcagagggaatgagggtgagaaaggagacagaggagcctcttggtcacataaggaacatgaaatgttattttttagaggaaatgtcagagtggaaagattttcccagaggctgaagaatgaaagttccctttgcaggcagccaatggttatagctttgtgaggacttagcatgtgccaagggctgtgcccagccctttgcattcattaccccaattgatcctcacacacacctcatatgatgggtcctatttttcctcagagaggtttagtaacctgctcaaggtcacacagcaggtgtgtgttagagtcagctcatctatatccaggcctgtacacttgacttttatgttatactgaaagcctctgactacctatagtaaacaaaatgtaggtagaatgatcaattatctctgctgaaatagaagtgatttttcttcctaattttgacaaaaaaaaatttaattctcaatatcagtgtattgctaccttttataagctccaccctaggtaaaaattttaagcatttttatactgttgagtaggaagtcacttatgcctatattctgcaatggaccagatatatgaagagactatatctcatctcatttgctcttcacagtgaccttgagaagtagagagtagacttgagcctcagaggggtggaggctgggaccctgatctgttggcatcctggccctacccttgagttcctaaaagtgccatcttcaagaacctgtacatgtagaaataaaagatattgacaagttttcagatttgtgtgtctgtgtgtatgcacacgtggacacacatgcccaggagaaaaaagaggtactgcgtagagtttttgcatttgctgttccctttgcgtggaatgctccttccctcaaactgcaatagatgtaaaatcttgtcattgggcctcaccatgtctgatcatccagcctagagcagcccctccctgtcactctttatcttattactctgttttattcttccaaagcccttcttattagggagctcatgtgagtgtaagaatgggaaaaggagtctgtgtgagcaaatacatgctagaattgtgttttagacaagtactcagggtatgtgctggtccacacacctgctatatgtagctcagcattcaccaccatctgaaatgttcttttctatttacttattcatttgttctctctctactggatagtaaactccatgtcactcttgttcaatgccgtaagaccagcacttagcacagtgcctggcatatagtaggctctaaataaacgtttgttggatgaatgagtgaacaagtgagtttatgatgctcctacgtggatgacatttaccatttaagaagcaccttgcagctgtcctgtcagctcactggtaatgggccaccagtgtggaatctgtccacctcggctctctgaaacagcaccctagttccaacttgggtttaagctgcaaaggggtcaggatacaaaggtcagaacacaagagaaacaaacctctctcacaaagctcatgccattttgtagagagatgtggaactcaaggctgagctcacaggaaggcaggagagcatggtatttgaaagttgggattctggagccaggcagaagccgattagagacccagctctactgattactagtgggtgacctgggcaagttacttaccctctccaggcctcagaattctcatccttaaattgactgtagtttggaattgactgtagttccgttatgctaagggattagatttaccctcccacctgacacaactaaaacaaaatacatgcaacagtagttttcagatgttggactttgctggcacagaacagtgatctctaagagatgggagataaatgaggtgagccctgagagttcccagcttaatgcctngagagactcatttccatgctgcaatgcaagaaaagggatccttgttgtctcccagagttggagaggtgcaggtgggagtctagagatgccaaggttagtctaaagatgccaaggttactagtggaccaagaggagagaaacacagmcacacacacacacacacacacasagagagagagagagagagagagaagaaagargagagaagagagaggagagacagagagagcacttcagagacttgcagagaattccccttgaatcttcagctgagaactgagtgaggaaactgcttgaggcaggactagaaagagtttatgttcccgccaaccgggggaaacaccttgtaattcatagggaaggattttgcctccmtaatgtaggtagaaaacaatcaatagaaactgacccagaaatggcacacaatcagtagacatggacagtaaaacaagtattataattctttaaaaaaaattttttgtgagacagagtctcactctgttgcccatgctggagtgcagtggcackatctcagcttactgcaacctccgcctccgggttcaagtgattctcctacctcagcctctggagtagctggaattacaggcacacgccaccatgcccagctaatttatgtattttttttaccagagacggggtttcaccattttggccaggctggtctcgaactcctggcctcatgtgacccgcccccctcggcctcccaaagtactgggattacaggcataagccaccgtgccccgctgagtgttggaattctattctatagattcaagaaggtggagaattgcttgagcatgctagtagggacatggaagataatttaaaaaaattaacttggactgctagagatgacaattacaatgtctgaaataaagtgaccataattatctgtctcagaatttgcatgtctagtattctttctgccctccaaatacatgtacttgtgcatgcaaaaccaccattatatatacttccacaccaatgcagaacaaagttagaaacagtttctgaatataaatctcaagcaaggcatctgttttgccgtattgtaggaaggagataacaaaaaggcctgacaatatacctagaaggaaatgtattccagttcttgtgtaagaggtgtgggcatgtggccagctgtacaatcatgagattagacagaactttggttttgcttcttgttggttgggtgactcttggcaaatttcttaatctttataatggggactgtgatacttcctcaataaatagtagatatagggcaaatttgatataattaagaaaaaattacttcaatttcctgatgaacaacaaaatagctaattcttttcttctaggtttactgtgtgtcagggacgatgttaaaactgtttcagttacaatcgcatttaatccttatatcaactatgagtccgtcagacagtctgatcttcaactcacagatgagaaaaatgtggctgaaagaggttcattaaattgtaaaaggtcactcagctctttaagtggaagcatgtggattttacataggtatgttaaaatcctcttacacagagcccagactttccaaggtttattctgtgtgtgtgtgtgtgtgtgtgtgtgtgtgtgtgtgtgtgtgtgttcaggttgagggccagggtgctaaaacttgaaagtgagaggttgttcgggggaatatagaattaaaggaaaaggatatagaattaaataaaaaaaggaaaagacctagcttacgttgtgaaatgtactaactctcggccgggcacggtgactcacgcctgtaattctagcactttgggaggccgaggcaggtggatcacgaggtcaggagttcgagaccagcctggccaacatgggcaaacccccgtctctactaaaaatacaaatattagctgcgtgtggtggcaagcgcctgtaatcccagctactcgggaggctgaggtaggagaatcgcttgaatgcagaaggcagaggttgcagtgagccgagaccgtgccattgcactccggcctgggtgacagagtgagactctgtctcaaaaaaaaaaaaaaaaaaaagatacaaaaattagccaggcatggtggcgggcacctgtaatcccagctactccagagactgaggcaggagaatcgcttgaattcaagaggtggagcttgcaatgagctgagattgcaccactgcactccagcctgggcaacggcgtgagactccgtctccaaaaaaaaaaagaaatgtactaactccctagcttgttttaaattagaaaaaacaaaagactgcgtttggaataaaattaatttggtagggcaaagtgtggtattgcttataagacgtttttcattccctagtatatgaaataccttgtctttaagcttttattacttttatttctcctagttataaagctcatttctgaccttgccccatgtaaatgtgacagtgggagaaggtggtctttcttctcctggggttggttggtgaggaaggataggatagcccatggattgaaacaggttcttctcactggagtagcttctcaggctgtacaaaaatctaaactagaagcagatgttactgtggggcagaactctcagttctgatttctttttagttctgtattagagcaatgacactgaaatgatctgagctggtttgggctggctgtctctatacggggagaggctgaactgcactttttggaaggcagattaagtagctgctgcaatcctgttggtatctgttaagatcttgtgattaaataagattgggccacagccctggagaaagatacccagagaggctgaaagagaaaggcatctcataaaggcaagagctgtaattatcttctgatggctctttggcgggtgatctcttaggacaggaagatttacaacctgtaaataatttgcaaggtcattggactatcttcaatgatgtatcagctaatttattcatgccacaaatatttactaatgcctactatgtgtcagacacagctctagacactgggggtactccataccttttatggagctaacatctgagtagagggaacagataaatacacatatgacataacagatggtgataagtgatacgaagaaaataaaggaaggtaaaggagagaaaacagcagggtgaggtctgagtgggtgctggtttagatagggttgttgtataagggtttgttttgggggttttttttttcgagacggagtcttgctctgtcgacaggctggagtgcagtggcacaatcccggctcactgcaacctctgcctcccgggttcaagtgattcttctgccccagcctcccgagtagctaggactacaggcgcccgccaccacgcccgactaatttttttatttttagtagaaatggggtttcaccatattggccaggatggtcttgatctcttgacctcgtgatccacctgcctcggcctcacaaagtgctgggattacaggcatgagccactgcacccagcctggggaatcttttataatgggttatgaagtttacagacttcattcagattccactaaattggattttatgagaattcagctgcagctgacatttacctctggtctaactctgaaaagaaaaattgtttcccaaaaggatttgtggtatatgtagtattaagggtggggaagggctatttaatgtaggtaagataaagaactggttttaagaactttacatagtgattacatagaaatggatgtgggtagttacaaagggttcttatctattcattcatgcccacctgcccagccccctgctgattcagaccagctttcactgccaagtactagccaggagccctgtcttcatatgctttttatacatctctttttctagcatagtgtctgaaataataatacaaggtgactgttaagcacttgccatatcatccttttaatccctgcaacaataccattaagtaggagctgtcattatccccattttatagatgaggaaactgaagctcggagaagttaacctgtacgcagcctgagtctgaattagtcaggcctgcctgcctccacgttcctagtcatcaggcaaagctgtccctccttatcttacaaggttcaagttcatgaaagagtgaataaatggatggatgaaaaaactactactttgattctaacggttgagggaattaactggagacagagcatcggaactccactgaaccatcagagcaggcaggcaggcaggcaggcacagaattggtcaggtgaaaataacaaaatagcaggtgaccatttcttcaagaaataatattcagcatctcctccatgccagaggagttagcctgctcctcgcagccacagactctggcctcaatgcctcactgacccggagggctttggtgaggagacctgggcttccactcagccctttgcaggtgttacctgcaaaggtaacagtgataccatagtggccagagttgcagaggtgggaggggctgggaaaaagagcacagtagatgctggccacgaaaatcgtgcaaatcctgccacagccttcaggctatgtcagtgattccaaaaccagggcgtggagtgagctaaaagtagaggcgagacttgtgccagccaggtttgggaatcacggttgaggatcagtgtttctaccttttaaaaagccacaccccctttcgatgagcaggaaaagagccgcaaggttctctggcagtcctggcctggagtcaggagcggaagttcctggggggagcgcaggtcactaggccttcctaggaggttttcatggagtttgcctgctacagtttgttctattaaataattggacttcgatgcgtggttctcaaacgtgagcctggattcccatgctgaatgttttcaaaaccactcaagcccccctctccccagatcccgcgttgccttctgccttccctatccctagccctctacctcctccactttactcccacagccattgggagtcactgtctagaccattgtttctcggacttcctgggtattaagaattaccgaaaggaaaaagtcggactcagggatctgggaatctgcagacgccctggtgagggacgtctggggaagcacattctgagaaatgttttgggagacgatgcggaggccgagtgagggtgggcgggcaagtgcaagtggaggggtgaaccgaggcgcagccctttgcggggattttaccttagcaatagtttcctgtgatacgagctgctgccatgggcgtgttgagaaagaattattcagtgacacctggtacagtatgggcaggaaggcttcattcaggactgagttagctcaagtgacccctgcaacggagactcgtgggaaggaagagagatggggtgccactcagatacagcatgggcaagtaggaattgatagccaaggaggagtgtggggggtcagtggatggaaaattcctaagaggaaatgtcacagtcagggggattctggctaacccaacctaacaggattcttgctgaggacatcacgtgggggatggcagagaatgagaaacccgatcagatatggagggtgatcagatctcacggatgggggttgtttgctaaactgaccgagtaggattctctgctaacactggatttcataaggaagcacaggcttaggaggaggctcaggagctccactcaagtttggccaagcaaagactctttgtcagctgacacggcgtctcctaccagtctagttcacagggagcatccttggctctcctgccttttggcgggggatcagggcaggagcttgacagatactggcccaggagagggagaagtgctggggagggagatggggtccagccttggaaccccagggccataggcctgccaaaatgacaaggcacggccaactgagagcccctgcttcgagggtgggaagctcaccatctttttaggtttcctacaggggacctaggagcagcctggaatcgtgtttgtccccagtcaggttgggattgctgttcctgcttagaggtcgggaagttgagaccgtgctgcgatctctagaggcagaaacagtgcaacatgtgatttatttctcagcctccaacacattttttccttccttcatgaaggaatttccaagttactcctcctccagaaatcatgtgggctgtgtctctgctgcatagaggaacaacttcgtatacgtgagctcccctgagtaagagtcagccggcaaagcccttactcactccagaggcatgcggcccttcacatttgcgccgtgctaaaggggagaacattttccatttctcttttgtaaacaaactatactctgtctattttaagaagaagaagaaagaagaaaaaaaaaacagtttaagcggctcttaaccaatacttgcaagactaagttgactggtttacaattaaactctttcattcccccaatcataacatctcattttcaagtagttgctcccattgtgtaatatttgatgtcacatagagactcgactccaaactctatgacattcgygggctgaaagacaaaggagcatgactggctttttcttcactttgaagacatctgcagtttattaattccacaaggaaagctggagggccagaggacgtcgagattctttcactaaaaaatttccttttgagacagtagtcctgttttagtgttggttggagttcatggggagacttacttttccatgaaaatatagagcaaggcttccccctcactgtcacactataatattctagcatttttatagcattagtaatagaaaagaaaaaagactcttggtttagtgtcacctcctttaaaggaaattggcttatggtcagaccaaactgttcttatcccctgtgtaagaggccaagtcatcatttcccagtttttcacagtattttgtatccaggcaacgtcacagaaaataggcccagccaggagtgctctgggagtcactgcagagctcagacttatccatggggcgtattttcttcaattcacaatgaaaactcctagaagttctgtttgaatttttcctgaagtcagcttgttgtaaaaatgtttttgggattaaagtctttgcaggccgtcatctaaacacactatctttacttcagaaaaaaataataaataaataaatccagttttcttttatgtgtcccccctacaaaagcatcagaattttaggagaaagcaaatctttctttccaaataggatatggaactaaagatttctaaaagaagaaattgaggttagcctttataattggtttctgttattttactcccttcctggtcagtgatctgttactaccctctctgggggaagggaaactagcggatactgattgggtcagaatggaggttgtaaaaccactcaaggccataaaaggtcagcaggaaggctttgtgttttaggyaagcctgctctttccagttaaccataagccccactattgtattacatagcacgagttgcattccacatttctgttattggcctaaccttctctcctgacactcttgtgtgaattctagtttgattcacgacattataagacaatctctttgaaggcagaaaccctgcctagcattctagatggtctaacacgaacatgttctaggagatttttttccctctaaattagagagtaggactttaaaaaaaaaragagagaaaataatttattattattattattattatttttgagacaaggtcttgctctgttgcccaggctgaaatgcaatggaacattcacgactcactcagcctcccaagtagctggggctactggtgtgagccactacaaccagctaatttttcattttttgtgtgtgccaaggctggtctggagctccttggactcaagtgatcctcctacctcagcttcccaaagtggtgagatgacaggtgtgagccactgcacctggccagaaaagaaatatttaacattagatagtttcctgtagacatatatagaaagcatcacatatacaagcctagcaacagattgttagagctggaaagcatttgagaaattttttgcttcaatccacttgtttgcaaataacgaagagttgggtgacttagccaagtacttcaagaaagtggggacacagagttatgaatagaacaggagttgttttcaacctggggcagttttgccctccagggaacaactggcaatgtgcctcgaagtttttgatgatcacaaatggtatctagctgaacagtatagcctcccataaaaataattaacgggttcaaaatgtcagtagtgctgaggtcgagacacgctggtccaaccccaggctggccctctttctacttcagcattgtcccagcatgttgcactgtttgttctaagatttgtttattgatgacagagattcaggtcattttgactttagcagaagcaaatcagtacatattcaagtgtgcagtgttgctgtcttagtcctagggttaggctatgaattatgaaattgcaaggaatgaagtccagtttgtttccacatctttcatcgcatttagacatttaataccagttggatgacttttaaacctctagtttttacgttttgattttcttgaaaactcaatttgctgatttcatgacttaaaaaccatggaaataaattctccttaatactcgtgctgtgtggctgagagagatgtggaagagattttcggggctttcaccttgtttggaggctcatctgttttgtctggtggagatggagtaatgggtgtcttcagtatgtcacgggaataaaaatctaagtaaggagaaaaaaaatactcctgtaaaaaagcctaaaaaacatactgatctaaaaacatactctgtaaaattcccatccaatctttttttctgttaatgtaaaagatagttttatttttaaaatttccttaaaagataatttattgttttgagaaaaaaataataacaataaattatggttttgtaacatgtagaagttaaatgtatgacagcagcaggaaaagcaataacaacaacaaaacaggagaaaattcccaccaattctcagcattgactgagaattaatttctgtattgaccaaaaagggctgaaaagttccctattgtccctctggaggcaaaaattttcttttccattgccaactacagattcttttttgttttttttttttttttgagacagggtcttgctctgttgcccaggctggagtgcagtggcctgatcttggctcactgcaacctctgcctcacggttcaagtgattctcctgcctcagcctcccaagtagctgggattacaggtgcgcaccaccacacctggctaatttgttgtatttgtagtagagacggggtttcaccatgttggccaggctggtcttgaactcctggcctcaagtgatccacccacctyggcctcccaaagtgctaggattacagacatgagccaccgcacctggccccarctacaaattctgcttgtgatattagaagggatgagagtccatcgcagttgttgatcgtcttgtgtggtgttctttacaagaaagtgcacttttccaagaaaccatgtacagrsggctcctgtcattgggtaaattgggtgaaacagggtgctatagcaatttcctggtcttgtgcaatatcctattcatagaaagtgaaggcacttattaatattgccaagtctctggacctatgtggttgggttacagaccccagcgttaaaatctagtcctatttctgaagactgaagaggattggggagaataatacagttgctgctaacatctatcacttccaaaagatgtgcctatgytgccatgtggcgtacccggagcacctctgagaaacaacttttactttctaatttttaaatatactgtattatattttaaaataaaatgcatttccacaagatgaattttcctgattatcatgtttgcccaaaagcccagagttacatagaaatgttcaattacagtttcctcacccggatattttggcataaggaatctcttctatcactttaaggactcaatgtttagctttctatttttatgctaatgattttctatgttatctgctagtacaagtcagtgccgatgtagacaggatataagtaacagttaaaaattctaaatattgggccaggcgcggcggctcacgcctgtaatcccagcactttgagaggctgaggcaggtggatcacctgaggttgggagttctagaccagcctaaccaacatggagaaatcccatctctactgaaaaaatacaaaatgagctgggcttggtggcgcatgcctgtaatcccagctactcgaggggctaaggcaggagaattgcttaaacccgggaggcggaggttgtggtgagctgagatcacgccgttgcactccaggctggtcaataagaacgaaactccatctcaaaataaataaataaataaataaaacattctaaatatttcttctgtccgttttcgggatacatactgaaagcatgtgactctcttgtctttctgattggatttcacacaaggaacttcctcgctttacctactctcattcatgtttcatgttataaccccaatttacaggctctttttcacaggttacatttttatatagactggctaatgtgtgttctatatgtgtttttgatcatgttccccaactataaaaatgttttgagtattaattctcaatatatgtagacttatttattctttccttcattcaggaacctgctgttaagtatctactataatctggtactgtgttagagtagtgagtaaaacaggcaagaatccctgagtcgagggggctttcctcatgagcagagacatgagggtacttctgtaccaatatgttaggtatgataggagatagatgggtaagtggcagaggctgatattatccaccaagttctaggaagagagaagtacacacactgaacgtttgaatgctgcaccatcaaacaggggacagcaagctaaccctatcagtgaactagcaacctatttacaaccctagaaggtctacttggggggatattttcacagtgggcaaagatttatgggtccttttacatttctattacagagaaatgccttcctctcttactgaattttgtcctacttttctctcttcctggattctggcggggggtagtggggtgctatatttagtctttcttttttctttttctttttttttgagacaaggtctcactctgtcgcccagcctgggtacagtgatacaatcatagctcactgcaagctcaacctcctgggttcaagtgagcttcccatcttattcttccatgtagctgggattacaggcatgcatcatcacaccccattaattttttaactttttgtagagatggggtctcatgatcttgcccaggctggtctcaaactcctggactcaattgatccttctacctcagcctcccaaagtgctgggatttcaggcataagccactgtgtctggccactctattcagtctttacctcttgcccctctatctcattcatgactgttgaaatttcaggctgagagtggtgactcacgcctgtaatcccagcactttgggaagctgaggtgggcagatcacctgaggtcagagttcaagaccaccagcctggccaacatggcgaaaccccatctctaggaaaaatacaaaaattagctgggcgtggtggtgggtgcctataatcccagctatttgggaggctgaggtgggagaatcacttgtacctgggaggtggaggctgcagtgagtggagatcaccccagtgcactccagcctgggtgacacagcaagagtctgtctcaaaaaaaaaaaaaaaaagaaaagaaagaaatttcataggcaccagagtttgactcttgtaatggagaagtgatggcagatatgtttactgccaaaatgccctgcgaggctaatagcaaaatggcccacatctcattatagtgacttcaatgatttaacagatgaagaggtaggggttgagaggtcctgagtcattggaagcctatctcctacttaggctgctatgtgctttcctgttttccctgcagattaattggcacggcgactgtagccctgaaggacctgactggtgaccagagcagatccctgccgtacaagctgatctccctgctaaatgaaaaagggcaagatactggggtgagtgttttctctcttattgaatggctttgaagtgagatgattgagcaaaatttcattaagaaaaaggtctaaggccgggcgtggtggctcacacctgtaatcccagcactttgggaggccagcacttttgggtggatcacctgaggtcaggagttcgaggccagcctggccaacatgccgaaaccccatcccaactaaaaatacaaaaattagctgggcatggtggttggtgtctgtaatcccagctacttgggaggctgaggcaggagactcgcttgaacccaggagatggaggttgtagtgagccgagatcatgccattgcactccagcctgggtgacaagagagaaactccatctcaaacaaaaaaaaaaaaaaaaagaaaagaaaaatgtctaaattgtcagaaccaattggtaaaaaagaaaaaagaaaagaaaaggaaaaggtatcaattggtaattagctaaccacacacacaaaaaatctggttttgagatttttctggtgatctttctcaagtgtgtgtgctttaaataaaaaactgggcccgtttgcaaacgacatggaccttattttatactttcaatcacaraactagcaaatttgatagatttgattttctatgagataattctatagagtgagggtgaccccctctaggtgtagctctgtgcttagccatgtkggtgttaacatttgtgtggttatgtataattctgtgtgtcagatattctttgaaacattctgtagaaggcagttcattgacataagcttggaatatgaagactgtaatatcataatctttttttttttttttttttgagatggagtctcactccgtcacccaggctggagggcagtggcatgatctcggctcactgcaacctctgcctcctgggttcaagtgattcttctacctcagcctcctgagtagctgggattataggcacgtgccaccatgcccagttaatttttatgtttttagtagagatggagtttcaccatattggttaggctggtctcgaactcctgacctcaggtgatcctcccacttcgacctaccaaagtgctgggattacaggcatgagccaccacgcctggcctcataatctttattacattgggtgctggatgttttctggtcacagcctctctcaataagtacatcttgctgggcgcggtggctcacgcctgtaatcccagcactttgggaggctgaggcgggcggatcttgaggtcaggagatccagaccatcctggctaacatggtgaaaccccatctctactaaaaatacaaaaaattagccaggcatggtggcacgtgcctgtagtcccatctacttgggaggctgaggcagaagaatcgctcgaatccaggaggccgaggttgcagtgagccaagatcgcgccactgcactccagcctgggcaacagagcaagactccatctcaaaaaaaaaaaaattaaaaaaataagtacatcttaatattttctgatgcaagaccagaattctctttctctagtgcatgtgctttaaaaaaaaatgactcaagtgtcgcaagtcccagatttcatataattaataagaagcactcataaagatactgtacttggcccataacttccaaccccttcattttccaatcaatttatttttcttgggagcctgggcaaagggagagaaatttacattaaaagatgcagtccctgtaagcaaagctaggctctcaacagccatatgagagaaaggcagttttgctgatctggtctctaaaacttatagatttgccacaaatcagcattgtaatcaaaacacacatttaaaatgttggctatcatctgtttacccaaaacctagctgagagaaatgattctgaggaaagatggtataagtcaatgatttttctgccttctttttttaaagcacagaagaaagcatatgtagacccctagaatggcagaactgttgtgattcagtggagtgtgttagtccatttggcactgctataaaggaatacctgaggctgggtaatttataaagaaaagaggtttatttggctcacagttctgcaggctgtacaagcatggcaccgatatctgctcagcttctggtgaggcctcaggaagcttttactcgtgggggaaggtggagaggaagcaggcgtgacacatagtgagaaagggagcaagagagaagagggggaaggggccagaccctttttaataaccagaccttgcaataactaatagaatgagaactcactcattactgcaagaatggcaccaagcccttcgtgagggatccgcccccatgacccaaaaactcccaccagggcccaactccactattggaggtcacatttcaacatgagatttggaggcaacaaacatctgaaccatatcatggagtaaggaaagtaaatggcctcaagccctgccccctgtaattcctcttacccttttgggggtccctggagcacctctgggaatcctgaggttatagaacacagcatgaaaaccacagatcaagggggtggttgtctgtgtgttcttctaggtttgaaaagtttgattcttagattcagtttagcaactaagcccttcastgctccctgcrttcagccatgagatgctgctcttatgattctttgtgtgctgtgaaactgtggctagggtcrtattccttatcctgttcagtcccttccagagcagtagttccaagacacacgatgtgccagtatatgagggagtattcactgatgaacagaaaaatggaaaaagggcaatgcactgtgtgtgtgtgtgtgtgtgtgtgtgtgtgtgtgtgtttaccagatgtaggaaaagtggcaaatgaaagcataggatgtgtatttaaattcacatacaggctgggcaaggtggctcacgcctataatcccagcactttgggaggctgaggtgggtggatcatctgaggtcaggagtttgagaccagcctggccaacatggtgaaaccccgtctctattaaaaaaaaaaacaaaaattagctgggcatggtggcacgtgcttgtaatcccagctacccaggaggctgaagcaggagaatcactggaacccgggtgtgaggcggaggctgcagtgagctgagattgtgccattgtgctccagcctgggcaacagagtgagactctgtctcaaaaaaaaaaaaaaaaattcacataaaaaacgaataatttctcagtgtaactatgtcctaaatatgatgtcctgtccagatgtccagattttatctggtcaccttgtgtgtgtgtgcatatgtgtgtgtgtacgtgtgtgccatccttatttgcaaaggactccctttattctgaggtttgtctcttctcatttttggtgttaaaatgcctctcttttataaaatgattgtgatagtagatgatagttgtgggcaggtgtttggcaaaatacaagttagcaacccaatgtcgatttcccctagcaaattgtttgaaattttgtgggtccatgaaattaaaaagtactgtatacagcaaactctgccctaaaataatgctccatgtgagaaattgatctcagctcttataagtaggaataacattgtctcttgtaaggaactagtatgtttccttctgttggtagtgaaagctacataatgttttcagtttcccttttcatttggctctaggcatttcggaggtcacagattatgcaacagaaatggcaattatatttaactttatggtttgcatatttgtttcctctttagccagattcaattctcctttttttatcctattttatgaatcacaactttatatacatgttttgttagtcactttttttttttttttttttttgagacggagtctagctctgtcacgcaggctggagtgcagtggcacgatcttggctcactgcaacctccgcctcccgagttcaagagattctccggcctcagccccctgagcagctgggattacaggcacctgccaccaagcccagctaatttttgtatttttagtagagatggggttttactgtgttggccaagctggtctcaaactcctgaccttgtgatccacccaccttggcctcccagtgctgggattaaaagtgcaagccattgcacccagccttgttagtcacttaaagttctctctgtttttttttgttttgttttgttttgttttaagacagagtctccccrggcacggtggctcattcctgtaatcccagcactttgggaggctgaggtgggcagatcacgtggtcaggagatcgaaaccagcctggccaacaagatgaaaccccatctctactaaaaatacaaaatattagccgggcatgatggtgcacgcctgtattcccagccattcgggaggctgaggcaggagaattgcttgaacccaggcggcagaggctgcagtgagccgagattgcgccctgcactccagcctgggcgacagagtgagactctgtctcaaaaaaaaaaaaaaaaaaaaagacagtctcgttcttttgcctaggcgggagtgagtggcacgatctcagctcactgcaacctccgcccccttcaggttcaagcaattcttctgcctcagcctctgagtagctgggattacaggtgcctgccaccatgcccagttaatttttgtatttttagtagagacaaggtttcgccatgttggccaggttggtgtcgaactcctgacctcaggtgatccacccgcttcggcctcccaaagtgctaggattacaggcatgagccaccgtgcccagccctaaaattcttctttaaaaagaagcatgaaaataaatctcagcaattcataatgaaataagcaatgagcaaacaaataaattaatcatttacagtgaccctctgtaattgtaattctgtgatgggagggcatctccagtctaggatggaggtgtgtgacaattcacacctgcttgtcacaactttactctgttgatgaggtggccccttagcaaggatacacttggcaacctgtgacagggagctacttccccaccctgccttggctgtcagtgggaggataggaacagtcgagcttgtgtccctctccccgtttccagcctcgcttacctactccctctctcttaccccttccaagactttggctcctgctgaagtcacttgcattgagtctataacatgctggtgccctgcactgataatatttgcaacgaattatttctacccaggccaccattgacttggtgatcggctatgatccgccttctgctccacatccaaatgacctgagcgggcccagcgtgccaggcatgggaggtaagctgacccttctgaaggcccagccacccccagggggaggctgctaaagacacacrggagagtgtctggagaaaccctgccattgatcacaagcctgtagctccctgcccacccagacaggggccccgmgaggcaggtggggctgcctgaattgggacattgcaattgtttatgaaatgcccttcaaggtagaggggaagggtgaaccaaccctttactgaacaacctcacggtgagcacaaaaagcacatgccggctccagcagaatgtcccagggctttgcttcaggtttgtggcttccaccccatacagtgtctccaggctgtttggctcaaggagtggcccctctgctctcctctgtgtgtctcctcacctcccaaaggtgccaccaccgggctctgctctcagcaccagtctcatgggcatggctttcgactggaacctccttcactgtctcccctaaccccggccccatcttgtccccaaacagccccaggtcctctaagcaattgcttctcttcagcatagcccgcattgtccttggtctctgacatgggttgccagtcattcagggccatcaggtgccagtctaggtggggttggggctgagggctcagggagggagggcctacaagacaatcagtcctctcatgcagctgagtcggaccccctctcagtgttttcccaggatgacgtgatgctaaaagtctctgtcccttcctcagccgtaagatgcatgaccaaggcacagtctcggcatgtgtcccaggaagggaggggccccttatctcaccacactcacctgcttccttgaaactctccctcctggctgggcgtggtggctcatgcctgtaatcccaacactttgggaggccaaggcaggtgaatcacctggggtcaggagttcgagaccagcctggccaacatggtgaaaccttgtctctaataagaattcaaaaaaattggccaggtgtggtggtgaaggcctgtaatcccagctactcgggaggctgagacaggagaattgcttgaacccatgaggaggaggtttcagtgagccgagattgtgccactgcactccagcctgggcaacagagtgaaactccgtctcaaaaaaaaaaaaaaaaaaaaaaaaaaatggaattctccctcctgggaggaagtcctgcacttgttgctgaggtggctcctcggggctcatcttcttcttgcttctcttggttgggaacttggctctccggccgcccgagggttcactttacacctgcagcagcaccctccctgcctgtcctgcccagtcccacctgacttctcatcttgctcagcctgacctccgcccctgcccctgcttatgcacccattatgaatgttttggcccattttttgactaagtagttgtgagtttccagtgagggttaggtggcttcctcttggtgacaagactgagatggccccagcacatcagcagcatgctctgcccatcgccctcttcctagcggcaccctgagcattctacttggctttggacactcagccctgcgggagcrctgcagtggctcaagaacatccatggctccctttgcttccacagcagtgatgacaaaaaaaaacaaacaaaaaaccacgaaacacagaggacacaggccagcaccagtaacaccatcaggggcagaactgagtggtcccacccatttccctcagacctccgctgccgatgactattgtcaccagcatttgtatctgtgtgggaaaggcactaggcgctttctggcctgcacaaggcagccctcattgatgggctatctggagtagcctctgaattggaaagatcagggcatctttcttcatactgtcgtttctcctaagctagaccctgtttattagtttcctaggtctgctgtcctaaactaccgcaaactgggtggcttaagcaacagaaatattctctcgcagttctggaaatcaaaagtctgaaatcaaggtgtcagcagggctagttccttctggagcctctcagcctttctcccagcttctgttggttgcccgccttccttggcatctgtggcttgtagatgcgtcaccccagtctctgcctctgctgtcacatggtgttctacctgtgtgtcttggtgtctttgttgcttttttcccctctaggatatagctcctgagtggctcaaggatcttcctctctatgtgtctgtttttgattttttggtttgttttttttttttttagacagagtctggctctgtcgcccaggctggagtgcagtggcacgatctcggctcactgcaagctccgcctccagggttcacgccattcttctgcctcagcctcccgagtagctgggactataggcgcccgccaccacgtccagctaattttttgtatttttagaagagacagggtttcaccgtgttagccaggatggtctcaatctcctgacctcgtgatccacccaccttggcctcccaaagtgctgggattacaggcgtaaaccactgcactcggctttttttttttttttttttttttttttcagatggagtcttgctctgtcatctaggctggagtgcagtggtgcagtctcagcttattgcaacctctgcccctaggttcaaacaattctcgtgcctcggcctcccgagaaggtgggattacaggcgcccgcgaccacacccgcttaatttttgtatttttagtagagatagagtttcaccatgttggtcaggctggtcttgaactcctgacctcaagtgatctgcttgccttggcctcccaaagtgctgggattacaggtgtgagtcactgcacccgacccctctctgtgtgtccatgtccaaatttcttataaggcactggtcattggattgggacccacccgaatcaagttaagataaggtcactgtggattagggtgagtcctaaccttctcttaaggtccgtaaccttatcttaactgtacagaaaccttatttccaaataagatcacattctgaggttccagtggacatgaattttgaggggacagtattcaacccagtacactggcagataaaagacaatttcatatgttgattccattccaagagccaaaatattaaatgggtcctcttgtgttaccccttctgccaggcctttaggaaaaaaaaaatactgtggttcattcaagtaaaaagagtaaacttaaagagatcagcgccrcacsatttgttagtatttataaagtaagaacattgcttgctgggtttattttattttatttttttgagatggaatattgctttgtyacccaggccggagtgcagtgacatgatctctgtttactgtaccctccgtgtcccaggttcaagtgattctcatgcctcagcctcccaagtagctggtattacaggtgtgcaccactatgcccggctaattttgtatttttagtagagttggggtttcaccatattggccaggctggtctcgaactcctgacttcaggtgaaatacccaccttggcctcccaaagtgctgggattacaggtatgagccaccacgcctggccccaactattgaacttttaaacctgctggcgagaaaatccctgccacccaaggctccttctcctttcctcttggtttaagcctttgtttgtagcaccagtgctcccagcaggacagtagactgaaggagtccaccatccccttaggagtctggctcacagcgggctcagcaccagggaactgcacaagcgcagcccagctctcccacggaagttctttagaatccctgactttgctcagctaagacaggaaatgaaccaaaacttgggttccttgtatttggatttcaaacaaagaaggtcaccaagtgttggtctgcaaatgagctgtgtctgcagggcaattttatttttaaatgcaagatgacagagtgaaatttctatgtttgatcttagccaaaagtctgagaagtaatgtgaaatttctttattacaaaaaataaaccgggctctttgatctggaagtgctgcctttgttctataaaatgaatgtttgccggggctcggtcaaaggtggcattctgtgtgtcggcttcctaatctggctaagagaaactttccttcagcatttaaaaaaaaaaaacaaacctctaatagcctcgactatctagatgtttcaagggaaaacatttcttttccctaacatagtgtcttagtctgtttgcattgctataaaggaatacctgaggctgggtaagttataaagaaaagaagtttatttggctcatggttcttcagactgtacaagaagcatggtgccagcctctgcttctggtgagcgcttcaagaagcttccactcatgggggaaggggaaggggagccagcatcacatgatcagagaggaggaaaatgagagagaaggcaagggtgccactctcttttaaacaaccagctctcaggtgaactcattcattactgcggagaagccaccaagcctttcaggagggatccacccccatgacccaaacaccttccagtaggccccacctccaacactggggatcagatttcaacataagatttcgaggggacagatatccaaattatatcacatggtaattcagttcaactgagcaaaaggtatctttgagcacctactgcaaccccctgctagggaagacaccaggagaaaaaacaacttacaatcttgggggaatataagacaaacaaatatgagacagagaacagcaagacagccatacctcttggcattgcataccttaatgacataagcaggacatctggcccagaatttgctttttttcccttcaattaactttctttctttctttcttttttttgaagtggaatctcagtctgtcgcccaggctggaacgcagtggagtaatcttggctcattgcaacctccacctccccggttcaaacaattcttgtgctcagccacctgagtagctggtattacaggcatgtgccaccatgcctggctaattttttaatttttagtagagacagggttttgccatgttgcccaggctggtcttgaactcctgacctcaagtgatccacctgccttggcctcccaaagtgctgggattacagtcatgagccactgcacccggcctcccttcaactgacttttaaagaaaccctaaaactttaccattctatgtaaaagtaatgtctgcttcttctgatttatatattttcaaattcttaaaatttgagcttgtttttctttcctcgagcaaaaaagaaatatctgcttaataaaatgtaaatgtcacagagatacatgacacggaaagtgaaaatctctgcgtcccatcctcctgagataaccactgccagcaacttctgctattgattttaaaggttcttctccacatagtggctcctgcagaggagaaattagaagtatttatgctggaatacaaaagttaagatttttaggaaaatttgcccctgccatttgtagaagctagctatgatcacatatcacaggaagtgaacacctgagggcttcttttttaaggaattctttcttagagcttttatatgaagatgacaaaaggtagagaccttagggcactggtggcttgactgaaagtgtgtgttgtcaaagatgttcttttcactgacccccctggaagactgttcccatgacagaggggagggctgacccagtctccaggcttgacctgaaaacctgttaccatggcaacttaattcgccagatgtcagtctgcttaactggagcctacattcccgtagctggaagaaactatttttaaaatctcacgtctatttttgaagcaccatctgttaaatttgcgctctgtccaaacatagacattcaaaaactcattcatagccagacttcactgcttcaaatgtctttcattccacgaatcccaaagtcatttgcttaaaattaatttttttaatggagtttttgctctgttgcccagtgatctcagctcactgaaacctctacctcctgggttcaagggattctcctgcctcagcctcccaagtagctgggattacaggcaccggccaccacgcctggctaattttttaaatttttagtagagatgaggtttcaccatgttgaccaagctggtcttgaactcccgacctcaggtgatccgccagcctcggcctcccaaagtgctgggattacaggcatgagccaccatgcccagccttaaaattaaatttgatccagttcagaaaatatttattgacacctgcctatgggacatacagaggtgagaaagccattgttttaccaccaaggagcttgcagttcagtaggaaggtaagagataaacatgaataactatagcccagagctgaatgtaatacattcctccagagagattgaccaaattgttatataggaaacaattgctttcagaaagtactttttcagctgtgtattgcaactctgtattcatggtgcctagcacagcccttgagaagtcataattgttaataaatgcttggttggttgagtgaatgaatgagtgagtgaatgatagatgggcactgaatatggtttaaaaatttttttttaagaagggcattttggggccgggcacggtggctcatgcctgtaatcccagcacttcaggaggccaaggtgggtggatcacctgaggtcaggagttcgagaccagcctgaccaatatggtgaaaccctgtctctactgaaaatataaaaattagccgggcgtggttgcatgcatctgtaatcccagctactctggaggctgagacagcagaactgcttgaacccaggaggcggaggttgcagtgagccgagattgcgccatggcactctagcctgggcgatagaacaatactccgtctcaaaaaaaataaaaagaagaaaaaaggaagggcattttggggaacactagtgaatatgccaaagctcctggctcattcagaagtgtgttgaaagtgaagcatgttcctgagggtagtaggtcccaggctgggatatttgtccttgatgggaagaccatggggctccatgaaaggtactccatgacaagggactgacttggtcagagcctaactggaaaatgatccatgtgccagaagattgttgcaggcactgtttccaggattgggtttctaatcaagtggctttgtctagtaaactgattatattagtccaatttttctctaggatatttaggaaaatcaaagtgctcatcataaacaagtggttctcaacatttagacacagtgaaatcatcaagggatatctctaaacgtgcagtcatctggcgcccatctccagagagtttaatatagctcatctggaggggagccccgagtctgtatggagagcctgatgcaggcagatttcggagttcactttgagaaacgctgcagtcgtacattttgcctgctgaacgtgatgttgtccagagggagacatagatctctgggctttgttatctagactggctcacagcctgattcctcaattgccccgcaggactgcatttgcatccctgcttcttaggttcctccatggtacctttgctctgrtctacatattggaacatgctagaaaattcttagggcacatttattgttatttacccaggaattggggtggggtaatgaattgcttacagtaggacacaaacatttatttataaaacttttaacattttagaaattcagaaaaaaattattctacattccagctaagaaaatgtgttatctccaaaatattacatgttttccygcttcaaaacttaccctttcctgttctgcattgtccttttagcttacactgaagataatatgatatcagccctttgttgtgcttgggcaatgacctttggctcaaagtgataaaattctggcttaaccagtaccaccacttaacaagacttcatcttgaaaagcagaattaggatcaaaggcagaggccaggcaccgtggctcatgcctgaaataccaggactttgggaggccgaggcaggaggatcacttgagcctgggatcacttgagactagcctgggcaacataatgagactccatctctccaaaaaaataaaaatagttagctgggtgtgatgatgyacgtctgtaatttcagccactctaggggctgaggtgggaggattgtttgagcctgggaggagatgagaggagaggcagaatgtttggataaagggggctgccaggggctgaagtggggtctgtgttccagccaggaggatcccagtccagccagggtgaccagcaagtgctccttttcctcagccattcctaggagttgccttcactgggaagctctaacagggatccccctccctggcaaggtgcagacaaagtgggatgatggaggtggggggacaatgacctgcagctctggtgacatctgatatctgagtgactgatatcccactctcttctgcttggtagggagaagtggtgctagagaacagtatgggagcctggaggaagaagggacattgatatgcactggggaaaggcacagttggggatgccaaaggcaaacttgactgtatcacgaggtcctctagggctgccaactcttcagcactgagtgggtggacagatgccatgtaggcaagtgtcattatcacaagtgactgcacacaagggcagttggcaggaatattgctgctgagcgtctggaaagaggatcacaatacatctcaggaatgattacattgctggagctatgatggagaaccatttccaaatgttagcggaaacatcacaagtaaagaagagtggatcacatgcagttactgatattcagaaaggagacaggtcagtgttggatgcagtgagaagctttgtaggatttgaccaagtgacrttataattattggagaggcaggatggcattcctacaagggagttgtgaagagcttgtcatagccggagatggacagtgaggaatcttgaaccactgtgaatcaacagatctggatttgagcattggctccactatcaagctgtgtgacagtaggcatgtcacttaacctctctgagcctcaagttcctttcttacaacatcaggaggttggatttaataatatgtagggtctcttccagctccgaagttctatgattctattaaaatggcctggtcatggccgggtgcagtggctcacgcctataatcccagcactttgagagactsaggtgggtggatcacttgaggtcaggagttcaagaccagcctggccaacatggcaaaactctgtctctattaaaaatacaaaaattagccaggcgtggtggtgtgcgcctatagtcccagctacttgggagattgaggctggagaatcccttgaacccaggaggtgaaggatgcagtgagccaaggtcatgccactgcactccagcctgggtgacaaagtgagactctgtctcaaaaaaaaaaaaaaaaaagcctgatcaaagccagggttcatatattataagaagatgggatgagagaagtttctttttctttttcttttttcttcagatggagtctcgctctgttgccgaggctggagtgcagtggcgcgatctcggctcactgcaacctctgcctctgggctcaagtgattctcctgcctcagcctcccgagtagctgggattacaggcgcctgccaccacacctggctaatttttttttwaaattttatttttagagaaggggttttgccctgttggccaggctggtcttgaactcctgacctcaggtgatccacccgccttggcctcccaaagtggggattacaggcatgagccacgacgcccggccgagagaagtttctttggtgattacttctgtttgcgaatgccaggatgagcagctgcgctttggttcaaataggctgaatcaaagagcagaaagtgtttcaaggattaaatgaacaaatgctgcagaaagtttgagtaagaagagacctgaggctggaccgttggattttgcaacatgaaagtctttagtggcctagacaagagcagttttggtggactaggagggcagagggctggctggaagaagcatgagaatcagagacagagtgaagaatgtgagtaaaaatgattcttctgaggagtttgctcccaagaggggcaggaaaaatggagcagtaactgtagggggcaccgtggagtcaatgaaagttttgttttttaatattctgggtgatatttcagcgtgtttatattttgatgggaatgatccagtagaaagggggaaaccgatgaacgtataaagaggcaaaactccttaagtagcaacaggagataggatctgtgcaaatgcggaagagttggcttcaagtcagggagcacagatagttcagtgactaattgtagcaggagagaaggcaacagatacaggtagatgattgatttggagttggaaagatgtggaaattatcttctaattgccaattttctcaatgaaataagaagccaggtcattagtggacaatgagaaagatagaaagggtgttggaagctttcaagatgcaaaacaggtggccgttcagaaaggtaaagtgatttgactgtgctggttaattagtggccatctcagaccaggattcaggaaagttttgggatagatatcttggaaatgtggtaagatggccaggcagccctgtgaggacacttacagtttgtgatcaggaaattaaagtgagatcagtccagtgagatgtgtgtgcttcccagccaagttcagctggctgggtgcagaggtgaagtcagtggagggttgaataaaccaggtaagcacagtgaagtgagagggggaaagggatcgaggggcatgcagtggggtggttgcagtgttaggtggcaggatctaacctggggtaggggtaaagcaaagacatggaggaagtggggtgcagggaaggcagtgtgctcattagattggggctgcttgtgggctggagtaagagaggaagcaaattggaaagayacaaaagatggcctctcagccaggcgcggtggctcacgcttataatcccagcactttgggaggccgaggagggtggatcacttgaggtcaggagttcgaggccagcctggccaacatggygaaaccccgtctctactaaaaatacaaaaattagcagggcgtggtggcaggtgcctgtaatcccagctactcaggaggctgaggtaggagaatcacttgaacctgggaagcagaggctgcagtgagctgaaattgtaccactacactccagcctggatgacacagtgagactccacctcaaaaaaacaaacaaacaaacaaacaaaaacacaaaaccacaaaaaacaacaaaaaagatggcctctctagtggactgaatagtggccctctaaaatgcatgtctatatggaacctcagaatatgaccttatttggaaacagggtctttgcagatgtaattagttaagataaagtcacactaaattcagtgactgtagtttcttgtttgtttgttttgttttttgagacagaggctctctctgatgcccaggctggagtgcaggggcatgatctcagctcactgcaacctctgccttccaggttcaagcgattctcctgcctcagcctcccaagtagctgggaccacaggtgcacgccaccacacctggctaattttttaatatttttagtagaaacggggctttgccatgttgaccaggctggtcttgaactcctggcctcaggtgatccacccgcctcagcctcccaaagtgctgggtttacaggtgtgagccgccgaacctggcccacttgttcttatgagaagacgggaggacacagaaggagaaaggcygtgtgaccacagaggcagagactggagttatgcagccacaggcagggcatgctcaggattgccgggagccactggctaggaagagacaggaaggatttttccctcgaggcttcagagagagaaygtctctgccaacatcttgattttatacttgtaaggtttggaactgtcggggaatacatttctttcttttcttttctttttcttacctttctttttctttccttgctctgtcacccaggacagagtgcaagggcatgatcatggctcactgcagcctcgacctcctgggctcagatggtcctcccatcttagcctcccraatagctcagactacaggtgtgcaccaccacacccggctagtttttaaattttttttgtagagatggggggtctccctatgttgcccaggctggtctcaaactcttgggctcaagcgatcctcctgcttcggcctcccaaagtactgggattagaggtgtgagcccctgcgcctagccagagaatacatttctattgttttaagtcacccagtttgtgggacttcctgcgacagccttcagaagctaatacaaccagcagcttcctgttcagtgggtgattcctgacttggtgtggccctctgtggttgtgaaagagttgctctttgtagatccacttggctgtggatcacattcaggcctgggtctcacgaacagggcctgccagcacaactgctagcatttcactcatgacacagcttgcacatcagggtgtgtttaacagtgccataggggccccctcattctttgtggaacccatagcattctttgtggagcccgtaccattgtttaatcctctgcagcttcctgccacataaaggggaggtttcctgcttgaatattcttctgctgcaaggcacagaggctggctgtcaccatggcttaggctggtttcctctgacccatccctttagcctaaagtctgaatagcagaagacgttctttgttatctgcaggctgattctagagcatccactgagaatgtaataagtacttgtccagagtccagcattgcaaaggggtatgattgacccygactttttctcctgcttactgccataaacaatcaccagcctaaaatgctgtaattatggcaaggaggaagtacaaatcaccagcctaaaatgctataattatggcaaggaggaagtaccacttaggcccaggatgatggaaggaagttcgtcttcgytgcttggaggaacccaacagctgtcagccccagccattgctcggtccaggacaggtttaccgaggggaagcgcctggcccccagtgcttccccgaggctggtgccaaggttgggaggagcaccccttcagccatctgggtgttctttcctgagagttgttcagtagtttttccaaatgtgaaggcacatttgtgcctgggatcctgttccccttcccatttrtttactcattccacatttatcaagcactttctatatactttgtgtaatgagttctgtaaggcatggggcagaaacaaagaagcaaaggcaagctccttgcttctgaaatgcctgggagtaggggaagcctatgggttgacaagcaggtgcaagactatgtggtgaggactagaaagaacaatgtgtggcgggtaggagagagcgggactaactccatctggaagaggtggggagggcatgttggaagacagtaagtttcatctgaaacttaagaaggagaggaacttacctggtagagagtaggatgaagaagattccaagagcttggatccaggtgccctaagagagacagcaggtaagcccttcttttgaagtctcttcaagaataggcaagaggaggtccagatcatcttgcagaggacaaagattccttatctttgacttccatgaggttttcccagtagcctgaaaaagatgttgaggtactaggagcataacatgtccttcacctacagcctggttttaaacccagttttataccagagaggcagtgtgaaaacttggtcctggttttagctcagcttctaataacttaaccacaggcaagttgccttagctttctggacctcagtttttctgtctgtaaaatggggtgaagggtaggttggatcaaggatctctaaggtcccttctaggacaacattctgtgggtccatggctacttgaaggaagtgtgaagtgaggatctacagagtgttgagtcaaaggatcagaggacagagtagggagtcacactcagtgagtaggagacaaaaacaggggcccacagaagaacctgaaaaagcagatcgggggaggagagctgcaatgatctaaaaatatgtatatgagcactggtgtccaaggctgtggaagatccaatatggagatacagaaaagggcacggagcttggcaaagagaggtgattgacttttgaagaacagaagccaggctaggatgggcgaagcatgaatgaatggatgatgaggagcagggcccaccctgggctaaattgcaaagcagtgcatgtggaggcccccttttcccttgtggctgcctcttcctcactttgggacccctgcctgctgtgctgcccatggactgctccagtgccccatccccacaccccccatagctggttccaggaagtgtcctgtgctccagaagaagccccttccaattgcagtggtctgaatggttgtgtccctccacaattcacacattgaaatcctaaccctgaacgtgatgatattaggcagtgaggcctttagggaggtgattaggtcacggggccagagccctcatgcatgggattagtgccgtgatcaaaatgggctcaagggagctcctttgcttcttccatcatgggaggcagagaaggctccaactgcaaaccaagaagtgggccctcaccagacactgaatccgcyggtgccttgatcttggacttccccacctccagaactgtgagaaataaatttctgttttctaaaagccacccaggttgtggtattttgttatagcagcccaagcaggtgaagacaccaaccaaaactgattacacagcaaaactaaaaaataaacagttaatttattgggtgcttctgtatgccagatactgtgctaaaggcttcgcctatagataattacacctttacagtaaccctgtggtaaatactattattttcccctctttacaaatgaagaaactgaagcttagagaaattaagaaacttactcagactcacatagctcgaaagtggagggtggggagtggattgagcctaggccacgtggcttcagagcccaagatttcaagagctatgctacatagtaatctgatgaaactcattcataccaggatgtgaatgactgacaggtgactgtccttggaaattaaatctctttcataatcttgcatcgtagagaaggagtttcagaatccaaaagcagggttctagacagggtggcttgtcttctaggctctcttagattatattgtacagattaccagaagttctaactctttgtgtattaagaaaagaaaagctaaagtttgtcagcgagtttcaaagagctcgtgaataaaagaaagaggagaggtagtaggcagagttgatttttggtttttggttttgtagggagagaaagatctgtgtctacttgaaggcagaggaaaagctgcaatagagacggaacccccagaggtacacaagagagaggagacatttggggagcctgaaaataatcaggaggtagtaggatctgcaaatattcaggaggtagcaggatctaatgcatggcagagggttgagattttcactctgctgagcagggtaaaccttttcctgagtgcagagggaaggtagagggataaaggaggggacacgtgtgtgttaaagtgacaaaccaggaggaggaaggaagagcaagatgatcaccttggtgcttggcaagaaaatgaggagagtttctcttctgccattagggtggaaagagcagttgtgaattaggaggctcaagcaggaaacagtacaaatagatcacgagcagatctctagagagaagatctgcagtgggagggatggagttgaagcttgtcattgcaagactgcagtgttccgtgatgtttcttcctttttccatcctaacactaatgagaactcagcaatccctggctgggtccaacggtgccatctcctctcattgtccctgtgatctctgccattctcttggtctcttcgaaggcaacctgagcaacagccccgatgtactgtgaacacattttcctaaagaatttttccaagtcacaagaagtcccaagtcagtgtcaccaagaggatctccttcacctgccactttaggaacacttaaaacataatggcrgacaaaaccgtgtcctggaaacctgagcctttggacatttacaggataagggctatccctcactgggtttctttctgatattttaggagatggggaagaagatgaaggtgatgaagacaggttggacaatgcagtcaggggccctgggcccaaggggccagttgggacggtgtcggaagctcagcttgctcggaggctcaccaaagtaaagaacagccggcggatgctgtcaaataagccacaggacttccaggtagcaacggcctggcgttctgcttctttgtttaatctttatattgcccatcttctggcaattgcagtgatgtttcagtggacctattccaatggacaatggctcaaccggtaaagagagatgtcagtgtataaacccagtaagaaaagctctccatctttcttctgcaggcacaagtgggtttagtctagccagctgatggtctccagagaaataaaactataattctccttccctttggcagaaggaaagagctaatcaaagaatagaagcgcaaatactgtgtttttcgcagctctgggccctgtcttagatttggaaggcagctatggagttagttcatcactaggctcagcaagaccaggtgcatgactggagtctgagcagtgacctccacctgccctgccctttcccaggccggctttgaatgatttcatccctacagctgctcttggtctctataacccaaccccagttcccatcttgggaatgaccctaggtggctccacccaattggtagcacctggtatagcacaaagctgccctggcctggtgttagcaatcctaataggtgaaggaaatgaagcaacacctsaggatcctaaggatcccacrtgctgggaaaggttgggtaaccatcccccttctgtgctgcagatccgcgtccgagtgattgagggccgacagttaagtggyaacaacataaggcctgtggtcaaagttcacgtctgtggccagacacaccgaacaagaatcaagagaggaaacaaccctttttttgatgaggtaaaggggttgagagggcatgtttctgctcatgagtcccactggggagggaaacacgggagcagcttcactggtgaagacaccactgagttccaagtagagatcacaggaacaaaactaggtgtgaccatgtgaacgcatggcagggtcttggaaaaagccctggagtttaagcttcatggtaaacccacttctgctattggaaaaggagaaataggtaagtaacaaatatagcttttttttttttttgagatggaatttcgctcttgttgcccaggctggagtgcagtggcgtgatctcggctcactgcaacctccacctccggggttcaagtgattcttctgcctcagcctcccaagtcgctgggattacaggcatgcaccaccacacctggctaattttatattttcagtagaggtttcactatgttggtcagtctggtctcgaactcctgaactcaagtgatccacccgccaacaaagtgctgggattacaggcatgagccaccgcgcccggccagcatttatttaaataaaattgttcacttgggacaatctaaaagatatctagcttttagatatctaaaagctaaatgatgtgaagatccaaggctaagcaggtatgggggtacacacctgtaatcccaacactcaagaggctgagacgggaggagtgcttgagcccagattttcaagaccagcctgggcaatatagtgagatgcctttaaaaaaaggaaaattacctggtcccctctgtcagtggttctcagagatgctgttgcctttctggtgtttttgtgayaacttcttgatgatcccttcgacccttatgagagaggacrtgatgtctcctaaatctacctttgcttattctaattagcagggtgtctctgagggacaactctcgtgactaatccagttttttagaggtgtcaaaacgtacttggctgcaaaaataatatatgttaaaggaaagcagttattagcacacaggggctttgtttgttttgccccccrtactgataaatttttttttttttttttttttgagacagagtctggctctgtcgcccaggctggagtgcagtggcgtgatgttggcttactgcaagctctgcctcttgggttcacgccattctcctgcctcagcctcccgagtagctgggactacaggcgcccgccaccacgcccagctaattttttttttttttgtatttttagtagagacggggtttcaccatgttggccaggatggtctcgatctcttgacctcgtcatccacccacctcggcctcccatagtgctgggattacaggcgtgagccaccacacccggcctttttttttttttttttttttttgagacagagtctctgttgccaaggctggagtgtggtggtgcaatctcagctcattgcaacctccacctcccaggctaaggcaatcctctctcacctcagcctcgcaagtagctgggactacaggcacacaccaccacgctcagctaatatttgtatttttagtaaagatggggttttgccatgtttcccaggctggtctcaaactcctggcctcaggtgttccacctaccttggcctcccaaagtgctgggattacaggcatgagccactgcgccctgcctcccatactgagaacttagcctgttctactgccctcttttataacactcctcaaaaatacatgataccttgayaatcatctcaaatgccacaaaactccatgactgggctgtggggagaaaygatatatttagggaacttttcagagtcttggccaactgtgctgaggagacacatttctgggattcctcaggcctatgtctcctgctctgttctccagcccaggcctgtcttaccacactacctcttcattccctacggctctaatcccagctctggcgtttgtccttttttttttcctacttctttattcagaaaagaaatgatttcttctatgccgcgtttctatttcttcctcttcgttcaaactggcttccagctctgcagaaggtcctattttcttctcacctctaacctctaacctctcccctcaaaggaatcgcagaygacagcaggcagccaagtacagtagtatacacattctcatgagaggtaggggctgcacagagatggggcactggaaatggacttcagggaaggcagagagattcacgttggagggcaagactggatgggggggggaggaggcaagatgctggattacttgggcctaacgcgtaaaccctgtctatgcattgataatgcaggcttcctgttgactcagctgcattcccaggagcccagcaaacatctccaccttcctcagaattttcccattttaatgagtttgagggggattagacctcttggcaaaagagaagtccagtacattaatcgataaaaaaattttacgggataggagaaacaaaagtaagatgataaaaacaatatatatatatatatatatatatatatatatatataaaagaggtttactaaaaaaatttctagcctggccaggcgtggtggctcacgcctgtaatactggcactttgggaggccgaggtgggtagatcattggagatcaggagttcaagaccagcctggacaacatggtgaaaccccgtctctactaaaaatacaaacaattagccgggtgtggtggcacacacctgtagtcccagctactcaggaggctgaggtaggagaattgcttgaacctgggaggcrgaggttgcagtgagccaagattgggccactgcactccagcctgggtgacagagcgagactctgtctcacaacaaaaaattagcctggcatggtgatgggtggctgtaatcmcagctactcgggaggttgaggcaggagaattgcttaaagcctggaggcggaggttacagtgagccaagatcgtgccactgcactccagcctgggcaacagagagagactccgtcaaaaaaaaaaaaaaaaaaaaaatcctagcctgtatatatctttttaaccaagtaatattaaacttgttatcaccaataataggaacaaaaatgatgtggtgtcctcatgtgagataatggaagtaatcaacatcacctgtgtcaagtcttgtcaaatggccaatttgcatccgacagtgaggaaacattcacacaaatctagactgtgggatattctacaaaacaacgggcatggtggctcacgcctgtaatcccagtactttgggaggccaagccaggaggatcacttgaggcctgtagttcaagaccagcccgagcaacatagtgaaacttcatctctatttaaagaagaacaaaaggcaagaaaaaacacaagaaacaaaaaaggaaatagcactgttctatatttttatatagcttccttttggaagctgaagagactcaaaaacgaaatgcaacgtatgattcttgcatagawcctagatttctttgaaaagctaaagtttttttgtagggatgattggagaaatttgaaaattgactctgttagatgttaaatttcttggttatgataatggtgttgcaattctataggaggatgtccttgctcttaggagatgcatgtaaatgtattttgaaggggtgaagtgtcatgatctctaaagctttcttgcaaatagttcagtttaaaaaagagataaagcaaatgtccaaaaatggaacaattggtgaacataggtraaaggtggtatttattttaccattctttcagctgtcctgtagattagaaatattcctaagtaaaaagttggaggaaaaagtctcagttggagtaagtgttcaatcttttaggattaacatttattagcctaacatggttaaacctcctatatacctaatattcatatcccaagaatcaaccttcttaaaattagcttttacaatgtggtcaatattgactttgctgaggcactaacttaatctaatgggcaaaattgtcttgaaaggtgctttcttggagtaaaattagagtcactagacactaatagagctaaagatattagagaaatttaaaacacactccaggtcatgccagctctaagcgctcattttgataagcattgcagcatgaagtcaccttggatctttttccctttttttttttttttttttttgagatggcctctcactatattgtcctggctggtcttgaactcctgggctcaagcactcctcccatctcagcctactgagtgttgggattacaggggtgtaccccgatacctgcttagctttggatctttacattatttagcttttagatatctagccccaggtgaacaattttctttagttaagtaaatgctrtatttgttacttacccttttctcctttttccaacatgaagaagtgggtttaccatgaagcttaaactgcagggcttaaactccaggccttgccatgtgttcacatggtcaaacctaattttgaatttgtgttttgcattttttagragggcccccaaaattatagyatcagattcccctaacccgaatcccctgttaacatttaaacatctgctctattgttttggcagttgtttttctacaatgtcaacatgaccccttctgaattgatggatgagatcatcagcatccgggtaagggtcagcaagtaggaaggtactgctyactcactgccaggcaaagccaatcatttcttcactactcttctttcttccaggtttataattctcactctctgmgggcagattgtctgatgggggaatttaaggtgagtgacaacagtctgcttcattcaacttacagaaagatgagaactttcataatagaaatctgattcctatgtacgcatcttggtggcatcttgggaatgtgtaagggttcagcatgatgacacttgctgaaggctgcttggggcttgtctatttccaaagtataacagtgaacagagctctcaaagcaagatgccctgaagctgccatatcagggcccttcccagggttgtatctggatggaagcaaatccactgccacaaagggaaggggtgttgaccatggcaagaagtccaccatctacctccacttactgggggccccaaagctccatctgcaaagccaattatggtaaattcagagtgtgaaaggaaagccaaacaaggcaagaggttcagggtgcttctataagtagctctcactggaatgaaaggacaaatacttggttggcttcttcccagcaattctacatggaataggctgcctctccaagaaaggagcaccagtcactagaagtcctagaggatgatctgggtcaggcagacctgtgttcataccctgtctgccaccaagtagccacatgtcccagaggaactcaatctctctgatccttagtttcttcatctgtaaaatgggatcattgagaaaattaaatgagatagtatgtgtaaagcacctagtacagcacctggcacattgaagtgcccagtcaatggttatattaatagtagcattagctggaggagaaggaggaggaggaggagaaytggacaggaaattgggccaggtgaatttctgtaggatgaccaatggtcccactttgcctgggactttagtggkaaaactgaggataacccaggcaaactgggtcatattggtcactctgcttctgtggtcccttccagccctaagactagctcattcattcaatagtgacttactgagggtcttccatgtgccacacatcagacaaggcactggggatacagagaggataagacrgaaatgttgggtctcaaggaaatttaagtgtaatcaagacatgatatttaaatataatgatggcttctttaaagtgactagactgattttaaaatctacttagactactttcgattattgttttcccagattgatgttggatttgtttatgatgaacctggtaagtaatgttctccccatcaatatgaagtcttaaattcattccttctaactctgaagatgattctaagaatcaagacaatttgggggggatcaaagaattaaagttaaaggaatttttwaaaaaatattttcttaatgagggagaggagaggatacttagtgggaataaataacagtagcttagaaaaaatgtctaattttttatcttaacattcaaaatagatgatttctatgttttgtgaggatattttgatcttatcaaaattaaattataaaactcgttggtacaacttagagagtcttgtttgagttacacgaggacagaatggtgggggtggggtgtagggagagtacaaaacagaagacstgaaagtggacactcatctggggaatttggtgtgtcgtgaagaggcttccaagaaaatgcagcttatcttatggcagaggaatcacagacttatcagtacmtttttagcatgtccatttccttttactccttctstattttaggccatgctgtcatgagaaagtggcttcttctcaatgacccggaagatascagttcaggttctaaaggttatatgaaagtcagcatgtttgtcctgggaaccggagatgagcctcctgtgagtccctacattctctactttctacacttctcactaaaaaagaaggccaagagttaagcatgtgggcatgggtaattgtgaaatggagcacagcttcccgtcaataccctcagattccccctattcttcagaagctgttcttttcttcatcatggaattattgttctagcttacttaaactcttatctgatgtctatgagtgagcatttaattgagaatcgatgaatgtgtttttacaacgtccttgcctcattagaaagactgcttttatctagaaagcatgacctacttgcagaattaggcattgctacctaaatagttagtgattattctaggaaactgggtggcaaactgcagaatataagtggccagagagaagttgaagggacatcaggawcacacmcacacacacacacacacacacacgcacaggctcttactatttggtgctcataaaatgacagaatgatacaaaaacatgagcattgattttgtggagcagttttgaggttgaaggaaaactggtggctgatggcaggctgaactcttaagccccaaacacaggaaatcttaatggaaacgattctgaatggtttcattttataagcattaatttggctttttccaagtgctgcttttctgtatgtataatttaaatcatgtgcccctaatagcctgagagacgagatcgtgataatgacagtgatgatgtggagagtaatttgttactccctgctggcattgccctccggtgggtgaccttcttgctgaaaatctaccgagctgaggacatcccccagagtatgtactgatttaatcttgccccagaattgttgattatgtgtgtgatgaaatgtgttaaaaatcaaactttaatagtgattcgtgtccctatcgtatgtttttcttctgaaagggcttcatgggcttattttcattcattctggcccagttgaaagctacctgagcaggctcatggcacagctagttggttgctgatcatgttccttgttgagtacctgcctttggcccatttgactctctctcttgctattctatatcttctctttattctagaggatgctaaagagatatgagcagtcagcacttccaaccccttttatcccaaatgaaaatgtgaactgttattatcaaatcaaggtgtttgctatccagctataaaaaaaaaatagcagaaattagctgggcatggtggcgggtgcctataatcccagctacctgggaggctgaggcatgagaatcacttgaacccaggaggcggaggttgccgtgagccacaccactgcactccagcctgggcaacagagtgagactccatctcaaaaaaaaaaaaaaaamaaaacatgctgagcaaagggtagtaatgtcccaatgactagaagtctgccactattgtattatgaaatatattcagcaagagactggttgcatttaagggatcgcttctagtgattccatttataggaactagtgtggttatccctctgtcactgctgatggcccagcctccyatttgccttgctgggcctgtctggttcctgctgggctctgggacatgggacccttctccaagtccccaggaggctgcactcactatacaggccatggatctcttcaggatttgctgcttttcttgggaatccttttcctcttttaagatcctatggtcttaaaagatagtattgtagggcctccccatacccacctttctctcaaaaatgtgtcaaatgggctggaggcagtgggtcatgcctataatcccagcactttggaaggccaaggtaggagcactgcttgaggccaaaagttcaagaccagcctgggcaacatagcaagactactgtctctatttaaaaaaaaaaaaaaaagaagaagaagaagaaagaaatacataaaataaggtaaattaaaatcctgatctctatttactttttagcttaactatagattgtagttgattaaatatattatttgtgattatgtcaaattttcttgaatttctctgaaacagactaggactatatcattttgacctagagcacctttctcccaattgaaagcaggcctgagtttgagaatcatcttttactctcactgaatgaactttgttgtattttttttcctccataaaagatcaagtttttgttttattttattttattttgagatagagcctcactctgtcacctaggctggaggctggcatatactggcttgrtcttggctaactgcaagattcaagtgattctcatgcctcagcctcccaagtggccgggattacaggcatgtgccaccacacctggctaatttttgtttgtttgttttgagatggagtcttgctctgtcaccaggctggactgcagtggtgtgatcttggctcactgcaatctccgcctcccaggttcaagcagttctcctgcctcagcctcccgagtagctgggattacaggcgcgtgccaccacacccagctaatttttgtattttcaatagagaaggggtttcaccatgttgaccaggatggccttgctcttctgacctcatgatccaccagccttggcctctcaaagtcctgggattacaggcatgagccactgcgcctagcctgttgcaactattttgatgtataagagaacttttaaaattttgccaaatttctgggaattgaatttaatttctgctgtataactattaccttccagtggatgatgccttctcacagacagtaaaggaaatatttggaggcaatgcagataagaaaaatctcgtggatccttttgtagaagtttcctttgctggaaaaaaggtttgtacatgatctaaatgcagatgctgctagkaataaatatctaaaactactgtgctttccttggagtgaattcctgcttactctttgttaaaatagccccctgatgagccaggcactctgmgggaacacagattatctgagyctgaacacgccagacttctccacaggtttattttggagtggaaagtatgcagaacacaaattagaaaattcaatcttttgagagattaaaatagggaaggctaccactgaatttctgraattgsttttcaggtccaaacgttatcttaaccttaggcaagctctctggccagccacacccatccctggtaaatgttgtaggacrgagyccccccccagtgccctgttgccccttcctgtcatgtttctcaccytccatgccccagtaaactgttgaaaccagagaatgggtcagggaagccccatcccactcccctgaaaatatctgggagactcttggtgtagggacagctataaccaccacttttacctacagagatggtcaaagattrgagagttgagagttgggtgagattctacagtagaataatagcacatcatggacagttatagacaaaaagaactagcatcttttatgtgttcgaaccatataattatgaaagcaagatycggcaaaccacatacacatacacatatgactggtgcttttttctaaaagattcagtgggtgtggtagaaaagccttcagctctggggcaaaatgaggcctgaattaaattcaggctttaccccacttcataggcaggcaaatcgtttaccctctgagtttccatttcctgaactataaagggagataataayaatcacaggattgttgagaggtttgattcattcaaaaagtcattaagtaccagattctgtcccatgtgctgggatatagaaacgaacacatgggaatagaagagacagacaataaacaagcaaacaagaaactgaataattttaaatggtgcccagtgctacaaagaaaacaaagcagggacaagaagtgattggtgcaggggaggagtgtttatccaggttatcaggtgagactcctggagaaagtgacagttgagcagaggcctggatatgcagrgawyggggagggaggcatccaggcagggagaagggcgatggaagggccccaaggaagaaaatgttagcagggaaggcctgcccatgtggctgcgrtagagccagcaagcggggaaaactaggaggtcagtgagaagtagggttgggacagtagggcttcatcagcccagkgaaggattggggctttatttgaagtgtactttgagggccccctgaagatgttacacagaagtgacatgaaagtcaggaggcaagagagggtgtggagttcagatagacaaccgcaggtgtcctggggrgaaacatttcaggatcrgcttgaagacattccaggatctgcttgaagacggaagtgtcagggtgtggctgattctggttctgagcctgaccacctgaatgaagagcgatggaaagactggaacaagagtcagtttggggtagagggcagggaggctggcgggcagggtcaaaagatctgtctggatgtgttaatggtagatgcttcccaaacggtatgtaacaaatgctctatcaaccttatctcttgcttttttacattaatctaatgttagaagcctgacaattgaaaactaattaaaaaaaggttaaaagcaagctcctagtgcctcgaaacagcaatgattaatattaaacccatgtcatattttacaaatcatcaaraaaaataaagtttaaccaggttcctaagtatataagtaaactgctaaagtcataatctagtatgcatagattgtaaacttttagaaattagaaacttgaaaacctacacttttgctttggtgattttacaggtttgtacaaacataattgagaaaaatgcaaacccagagtggaatcaggtcgtcaatcttcagatcaaggtttgactttattttctttctgaaaaagtaagaatacttacttaataattactaaatcattgagaaataactacttttttctgtctyatttttttagtttccttcagtgtgtgaaaaaataaaactaacaatatatgactggtgagttgaaaatacgtatgtgtctaattcaacataaaataaacattggatattgtgaaacrttactctggattgtctctttctggtattttgctttccttccagaggagaggataaattgctcctggaacygggygtttcttaaaacraaatttaataatagtgttactgcaaaaaaagcttcgattatttcggttcaactgctcataaacaaaagaaggggaacgtgctgaaaatgccccaagataagaaatcagggatttaawtatcattaggctgtccagaatagacttcagaaatacagtcaagcatttcttgggaagaatcaccaaaacattctgagagcaattcattgttattgtttaaaaagaaaatggtaaaactacctcaatgaaggcaaggaaaagtccttgaaatgttctgatagaatttttagtagaccagccttctagcactgattggccataacaagaccattcttggaatgttctagttggatgtagcattcagcaggcacccttagctccctgacagtggaaacatgacaaatatcgttaccatcatcatgatcatcacaatcataattatgtaatgtgcctataattgattaattcattttatgacaatggtattgagtgtagccataggcacatctcttggcctctctgtacaattgcaatttcataacttcagaataaattaccttactagaccagtgtttccaaagggtgactggaggaccatctgtatcagaatcaattgggatacacttataaatgcaaattcttagtccccactctaggcttattgaattaaaaatgtgggcaggagatgagggtgagaagtctctagttgattactaagtacaataaagtttgaggcccactagacgtgattatttctgaagtctggggtattttccagctctaacttttttttaattgttgaaatgaagacatatcttcctagatggagctctgaaycttttattttttatttttttatttttattttttacacagggaccgtcttactaaaaatgatgtagttggaacaacatatctacacctctctaaaattgctgcctctggtggggaagtggaaggtaagtcactcaacagatctagaacaagactggatacagaacttttctccagtctgagaaaaaaatgaactggggtagccacctcacagtaggtttgktttcttagaagccaaatgtgatgaacctagtgaaccatttcaatgatgttttggtgatggcctgcaaaacaattaatcattgaagtatataagtaaactgctaaaatcataatctagtatgcatatattgtaaacttttagaaaaaaatgaaatttacagtttgaagattttcagctttcttgctcccatccaaaacttctttcccaatagcggttttatgaaatttttgtgtcaayacagagagctagcaccttattttttagagtggcattgacccaagtccacccaaatataaaataatactcccttctcaaccgaatcccttggcaggaacrgtaaggtcagatgccaatgaaccatgtagtcctcactccctaagataatgtgtatttggtctttactctgacaagcattgatagccaacacattgttctttctgttgttttccaaacaattttcttgagaactatttgcctatacctggcattatggttttgtgcatatgccagaaattgtaacagggaatgaaggaaagcagttaagatgataagagaaaaaattaatgttaacacagtaataccagcagcttatttattttttgagatagagtctcgctctgtcacccaggctggagtgcagtggcgtgatctcagctcgctgcaacgtctgcctcccaggttcaagcagttctcctgcctcagcctccygagtagctgggactacaggcgcatgccaccacgcccagctaatttttgtatttgtagtagagacagagttttaccatgttggccaggatggtctccatctcctgacctggtgatccaccctcctcggcctcccaaagtgctgggattacaggcgtgagccaccgtgtccagcccaggagcttattttttgtgaccaaaacaaaaattattgtaattgccaatagattaaatatattgagagattaaacacatgaaacaaagtgagagactttgagacaaaattttatcttgggcaactcaaggttcctctcatccttaycttgtttaaggtctttttataggttttgaaaaaacattgttaattcaagcaatggataacataaataagaacctggttattatatatatacatataatactatatatacatgcatatatatatacacactatatgtatgtatatatagtattagatattagagagaaggtaaagaaggtattagagatatggtgaagaacatatagatttcctctctccagaagtgaaaaaaaaaagcaatcagaagacgaggtggtggccgggcccagtggctcactcctgtaatcccagcactttgggaggctgaggtgggtggatcacgaggtcaggagatcgagaccatcctggctaacacggtgaaaccccgtctccattaaaaatacaaaaaattctccgggcgtggtggtgggcacatgtagtcccagctactctggaggctgaggcaggagaatggcgtgagccagggaggcggagcttgcagtgagccgagatcgcgccactgcactccagcctgggcgacagagcaagactctgtctcaaaaaaaaaaaaaaaaaaaaaaaaaaaaagacaagatggtgaccaaaggagatatagtacaattataaatgtacatggctgggcgcagtggctcatgcctgtaatcccagcactttgggaggccaaggtgggtggatcctttgaggtcaggagtttgagaccaggctggccaacatggtgaaactccatctctactaaaaatacaaaaattagccgggtgtggtggcaggkgtctgtaatcccagttactcaggaggctgaggcaggagaatcacttgaatcctggaggtggaggttgcagtgagccgagattgcaccattacactccagcctggacaacagagcaagaccccatctcgaatgaataaatgaatgaataaacaaataaatagctatatgtggcattattttaagcaaatggtagaaggtaagaaagagattccatctgaatgttctctgctgagtagcatagtgattataacactggagctgcaaggaaggaaatgtaatcacagacctttccttttctctgcagagaatatttatatggttgctagaatgtaagcactatttattgtattttgatttttaaaatttaacctatagccaaagctctgaacaaagtgtagatgtcatcacccattacagtgtaaaagtgtggaagatagagatgagaagcagaaggaggaaggggagtggaggtagggcaggggtgctaatagtctcttctcttcaagtcaggaatctaaatatgactatagatggaatcacaaaggtgaccattacacgaaataaaaatcatgctggaactatatggggggagggtaaagatgactgaaatccattattcatgagaagtcattaaataatatctaaagataattattcagaaatagtggcataagcattttgcttagtgacatggtggtaacatccagaagaactaaaaacagagattgctacaagcagttttagcttctgtctctggggcctctcattgcaggccctgcagaccatggggttacagggccttaaaataacaacgagctgtcaacatcrccctccccccgacaaagaaacaaaccatgctttcaatcaaataatgtgcaataaactccaggcctttgcttacacagcctcagaccacatttacttggattttctgatgttggtcccaactaagccgtaagataagtaaatgttttattaaaaacgtgaaatgctggtaacttcgccaggccccctctgtccccgggaagctagctcttctgcttcctggctgccttggtgctgggtgagattgagttattcatgtgtggtggytctgcccggstcattttgcatttaaccgatgagaattgtatacattacaaaagggtcayatgtgacttgggtctgaatttgggatttttctggtgttgctaaatcacwtacctggcactggatttgattaacgttttcaatgtctgttttataatgcccgtgttcttcttgtttaaccagtcatatttttactatatagatttctcatcttcgggaactggggctgcatcatatacaggtttatgcttcgtaattttgctctctgttatatcttcctagctaatattrtcttattaagaatgtatcgactgtctttagaacttttttttgacattttgckgtctcaacatagttttgctaaagtaataatttttgtgtaagtgccatacggttgtcctgcacggctaagcttaaaagaaatatgctaaccaggctttgctccatgtcccatgctttcagctaaatgcacaccatcgtatttggctttattgcaaataattgattgtgagatataacattttctgttattgtttatgttcagtaagtagagaaatggaccactaaatcaattgttctgaaatgtatcaagtaactttcccccaatttcaacgtgaatctctaggttgaaaaatactgaacgttttttactttgcaccctgaagatcttcacctcccccaaaatgagggatcataacacattctttggtttgcacagaactcgtcattttttgcaagtttgctcaatactgtcacacacttgaccatcacaattctcctagggcagatgtttttgttcccctaatagatgaagactctgaggtttagagaggttcattatctgtcagataagcatgattcgccctgccataataatctcscagggttgtggtaagaagggaaagagatattgcatgtgggaaagctttgcaaactctgaagctgtgtgcaaatataaggtgatatcatgtaattatgtaattgacacaatgcccaattcttatttgctttaaacaatctatttcattataatcagactttatatgaatattaagtagtccttagatttgcagtgracttggcagatgtgcaagcactttattcctttatttgtttaaccaatcaatgaatatttatgtagtagtatcacatgatagaaccagtagtaggtgtttaggaaatcaaaataaaacatacttaaatcctgccactccccctgaaaagtgatactttagtcacagagatgtgcagctatgtaggattctagaaactaaaacatacagtaattatttrtaggaatccaaaacatgaaggggattcaaaaaggtaaaggaggcatggaaaatattgttggaaagtgggttgtagctaggtcagaggaaatccttgatggccagggtaaaggatttttattttattttrtataggcttttcagcaaggacattgggaagtytgatgtgtccactgtgcattaaacggactaggaaactttggaggcaggaagagatttagcttatgagagaatgggttttctttttttgtttctttcttttttttttctgagatggagttttgctccagtcaaccaggctggagtgcaatggcatgatcttggttcgctgcaacctacacctcttggattcaagtgattctcctggcccagcctccctagtagctggaattacaggcacctgccaccatgcctggctaattttttttgtrtttttagtagagatggggtttcgccatgttggccaggctggtctagaactcctgaacctcaggtgatccgtctgcctcagcctcccaaagtactgggattacaggcgtgagccaccatgcctggcctagagaatgggttatcccaggagactatactaagatgtgagcacatagaaggwgagttccttctgttaatgcacaatgaaacaagtcaaaggggtaacawaccagaaaagagatttgttggacaaaaataattaagcccctggcattaagctgatatgcagtggatcattcttgacaatttgtgtttcaatccctggggatctttaacaaaaagcaaatacacatgacagcacagtcaytcaagggaaccaggtggaggagaagtgaggttagaccaaaggaatggatggggtagtggagggtgtccttttctgagctttgaaactcaagatctggggttaaatctgccaatttgtgggacttttgacaagttgcatcacttctgtgggctttggcttgcccatccataatgtgacatgactatggtgccatagctttaacatccattcttactggaatattctgtgattcaacttcttcctcttttttttttttaaatcttttttgtgtgtgattcagcttctaaaaataacttccttttctctctgtgagtctctgctttaattctctattcgcacccaacatccctccactaaaacaaaatattctagcacacagaaagaagtccaaaccctacttattagtgatcaattaatcrtctttgcaatgttccatatgccacaatggataaagccaagccaatttatatgttcatgtataatagtcattcctcctgtttatctgtcttgaagatgataacatgattcagagaaatctctgttggagaaactgttggtccctctttgygtttcataagagatttccaaacaagtgtgacatgtggcatcctaggctgttaccaagtctcaaccttaggctgcgtgcactagttttgtacatcttaattttctaaattttcatttaaatgtttctttttttcttgctgtcttcactgagattgctattcagctcttttctgcctgtgtccatgatttctgtctccccacaaatgtgtacacgcccatttaaacatgcagagagcttcacgtaatgaaaatgactgtgcagtatatgtctatagggttaggtaaattatttattaatgggcatcattctgatgacgctgctccacatttatctttctcccttagttttaagcatagagttggaaagggccatagatatgatctggtcaacctcatcgatagcaggaattatcctgagaacatgctgaaagataggctgaagcctttgcctcaacatttcttctaattgtccctaatgcagcctgtcccattgtttgtcatttcgaattcacagaaagttctgccttatacagagtgaaccaaagctgatctccctgtagctcccagcagtggtccttactctgcttctggagacaagtccatccctctcccatggggggccattcaggctattgaaggcaactcttatatttccccaccctcacccgcagtttccccattttcagctatttaattatattgcccttagtgcccttcattgaggagttgtcttgctaagaccaggtagcaaaaataaggagcttatcagatgaccaccagagatagaaagcaatgaatgggaatcttcatgtcatttatgaatatcacatggtcttacaaccacaggcaggcagtttattattacatataaaatttaaaaatgtcttatatttttaacagcatctgctagagttatactaactactgaagattaaatgacactttagaagaacaaataaagttcataaaatatgtcatttaagtgacttcccaaaacaatataatcttttgccccaattggcaatggcatgtttaatacaatgcccattataaacttgcaaaaatgtgaaggtcaacttcaaagtctaattgctctttatttaaatagcattatctttttataaaaataagtttatctgcgctacccccaaatgtttttatttaatattttatgtagcaataagaaaagagaaatatggcaaacctcatggtgcttacaacttgcattaatacaactaactcccaaaatggaggaaaatagtctcacctaactaactaataactaatatttatttcaatagattgaatgttaaaagcctaacacctcatgatgatgtttctctctcagtaaacacaggagaaacagaggtaggctttgttccaacgtttggaccttgttacctgaatctttatggaagccccagrgagtacacgggattcccagacccctatgatgagctgaatactggaaaggttggtttctcaattaaggtggttattaatcagcattggttaaggtgattatttcttcttataatgtctgatcaagtattgcaggatagaagtttcatactccctaagacttmgaatgcaaagataggaaaagactgtggagatcatctcactgggggatggccaatggccaatggccatttcccccaacttctrtgcttatggtagacatcaataatcaatgctggctctctttcctaataagcccctgggctgccttggaattcttttcaacatcatattccaggaatttaccaagcactaggcagtggcatgcmccctgaaaccctttattacccttgatctgatcaatcctttcatttcatagatgaagacatggaagcccagagatgggagatgctctttttaccacaacagaagccaaatgtcttttaggttatctcccaaggctcaagaaagagaccaagctagagagaaaaagccctcagaggggaagggtaaaagactggctgtggaggtggggacccttccgtcctttccagaaggttctattgccagcactgctgggtatggtgggagaagtatccactcttcatcctcaggctcagctgcacccagaacttcttcctcctacatcttcctcctttacttcctggctattctgagacttgccctggttgccagcatggcagcctccctattctgagaagaggagaaaagcagccaagttaacccagataaatgcagagcttccctgctgaagtacggtgaagggagacttagagccccatccaccccccaccccccacctcccagcctccacaaactccttctggagctagagcatggtttgaagacctctgaccttggtcacagctaagatctttttcagccctagcatcccaaggtactctttgagatctgtcctaaagccaatggctctctttcaaacaccagagacctgaatccagctgggagagttgccgactgattcatttcgaaggttagggccatgggaaggagaaactttttgcagttgtattagcctgactagagacacagaattctttttgctgttgctgcctagaggaataatcctggattattgcctttcagggggaaggagttgcctacagaggcaggatcttggttgaattagccacttttcttgagaagacaccaccagataaaaagcttgagcccatttcaaatgatgacctgctggttgttgaggtaaatgttaaagtgtgagtaatgcatggtatagaaaaggagacctccagggactgaaggggtagctgggggagtcggaaggcaacccaactcacaatgaggccctcatctggatgtttctacaacagccctatgaggatcgcttcatcctttgagatgttaataccctattgaaaactggcaagaacactgatacccacaaactgaatgacctgtttgctaactggcgttgggggtcatggggaagtggccataacagccacttcttgctggcaccaagagctgtaggtgccacytctactcatttccattttcagaggtggctggtgggcctcaggcttcccagcacaggagggcaggtgtgctgagggcccacactgcartggctgtgaaccccgcttcctccttgaagacaggaaatcttcccagttgacttccccaaccatttctgagaatccaggtcgatgcctgtgtgttccacaaatctgaatcatttgccagcacagccagctcatggatgcccctctgcccgcggccctccttgctgggttgcaaatcaccgccagccccccagctgccccaggctgctgttgccctctgttccaagcacacaggacaggccctgccctgatttcaccactttacagcagaaaccaaacagcaacttttaaaaagctttcactttcagtttttgggataagaatacgaaaatacagtaaaaagggtgacaacgtggttgcgaaatgtggctattctcaaagctcatggggtcaggctggtgttmtgggtccctgacagtcagccttcctgtctactcgcagcctgtctccttgtggcaggactgggttctccatgctctyccccaaactcccgtggtacccagaacacgttttcatctgagtccaggcccaactgccgtgagttctccagcgagccagggccttctccctctagtcgtctgatgtctgcctgttacatctgccccctttgcaggatgattgacagggagaatagccacaccctttaacagaaactatcccttcttccccagagcaatgtggccttgctcattgactcccagaaggcagccgtatcaggaggttagcatccaaagcagtctgttctggattcctcagcctttacatgttgggaacatctgtggtccagtgcttgagctgcaccaatttcattcctgtctcctcctttgagaggaaaggagcaggctcctgagactgccctctctccaccccccagcctcaggaaggaacctagcatcaccacagcagcaagccacggggcatccgtgtaacttcacatggggaaaataaatagttcttccccatgaattactacagcaaagatgatcatttgttttgtttttttactaaagagacacggagccaaaagtcaataaggtcctggtcatagtctttctattccacaacattacccactctgaagtccaggaattgcaatagatcttgaggaaaaattaagaaaaggaaaaaagagggcgggagagtgagaaaagggacagtttgcatgctagttacagccaggatcatgcaaaagaatagccagaaaccacttggaggcctccgtggagacacatggtggttcttgacttgagtagttacagattggagttagctcttgaaatattggttggaattcagggttattcagaaatgccaccatggacactcaaccattatagtacctcttttatttggttccatcaccagaatgtaatttaagttcatgctgcttctctttgttttaaataaccatagttgcagggagaaggagaaagaggcccaagaaaatattttttaaatgctttattaactggaatgcaaaaccaaattagttttcttcactgcaaatagttaaacacatacaggcaaagaagcttatttcattaatttagtgtaaaagcaaaaaaaaaaaaagtcaacaatatatattgcccacagtatatgtcaacagaataaaagaacagctttttattgactggtaaaacagaattcattttctttgctctaaattaaacacagacagcaaaatagctcatctttttaattaaataaatataaatcaaaagtgaaatgaagcaaaawttttaaaaacctaacagtgttacagaataggagagaaatgaggattctgaagacatagccacacttcaagcaacaggagccccaggagagagtgaaatgagcagatctgtgcacctgccagaaggacttaacgaatgcagtcaacctacaaacatgctcatgacccttgtctgtcttgcaaaggtcctctgttctggattatgtgcagctaacaaaactttttggtaaagctaaagaggctgcaacaaatgggcaaattttttgccaaactgccaagtgctccccatctttctaaagcagagctgagctattgctcccggtgggcctggtcaagagaggctgcagtgcaggagggatgcagcagattcagcctggccacttccacagtaagaatcaggcagacagaagatcaagtgttgccaacccagtgttattctaatacccgctggcttctggaacctctgccctgccactaaaggactccattttttgtctccaggatcaagagtctgttcttggactgctttctccctgctcctctttccccattttccttggatgtgaccgaatgtattttgggagcattctatgcacttgcattctctctcctactcaactacaatctccttgagagctctcattggtctggcccacattaagggctcaaaaatattgctagaaacagcaccttcaggttcttccagctgctccatcaggtatcagctcccttcagtagacataccgaaggtggcatgctgggcagtgttcattggtacctgatcttgtcactgacctttaatgtcccatgccttgtgtgtccacagccactttcaacaactcttagcccttatcggtatcttgcttgacagaaatcacctccttttgcaaatcgactgctgaaactctactttataccaccttatcyacaaggtgcactagtcactgatgatcagaaagagagccccaaggccctaaccccacctaagtccaatagactacaacttacattcttcttttttttttttttttctgagacagagtttcactcttgttgcccaggctggagtgcaatggtgtgaccttggctcactgcaacctccacctcctgggttcaagtgattctcttgcctcagcctcctgagtagctgggattacaggcacctctcacyatgcccagctaawtttttgtatttttagtagagatagagtttcaccatgttggccaggctggtctcaaactcctgacctcaggtaatccgccgccagcctcggcctcccaaagtgctgggattaaaggcgtaaaccaccacgcccagcccaatttatattatttcattttctcttgttgtaggcagatcttgtcccaggctctgtacttctctgaatggtgtttattgttccttcctctctctacctctttgtgccctgagggcagagaggaagtgggaaaggtctgagggagcggcagaattctcagctgcctgaatcatcgagggtagcctggctctggcacaggtgagcagatggtagcgttgcycctcctggaatctgggcttgcacrgtgatccagcggctccatcttcagcggcttgctcatagtgagtcccttctctgttgggaattgtgctgatggccagaagcccaaactattgcttttagggctcagactctccagggtgagggtcctatcagggattctgtgggtcattttgcaagctctgcgtgagagcwwccatggggttctaatggaatcctggctatgtggaggcctacggggtagagccggcccagctgggagtatcatccccgtagttcccaccccacctccaagcctccccatgatccttctccatcctgtgcagtccctggcttaacagatggctctggcttaaataccggtcattttctcctgggtcctgactcaggccacaaattatgtttcctatttttagctctttcccttttctcctatcatcctagttggtttacaaagaagttatgctgtatgtagttatgactaatccaaataacttcctactttttcattttgacacaattcaaacccaaacccagaatttccacatcattctggaccacgggtattccagggggcttcgctgtgggtagttaagcagagctcttgacaagtagcgtgcacccccaatcctcccttatcaaggtgacagtggactaagctagggaggcttttagactcacaatgctcccgtcaaagcttcctcaggtcattcaatgtgcagctcaggttacaaaccagtgtttagagagactttttagaaagattgaggcctagaggggatttgacaaaaccctattggagggttctattataccatgtcaaaaactcctttaaccaaaatggagactctgtaatagaaggatgtccaggggttcttcaagaccacaagcttcagtcactgtcagaagttcttaaaacagtccttaaaaatttaaaaattccagccaggcacggtggctcatgcctgtaatcccagcactttgggaggccgaggcaggcaggtcacttgaggtcaggagttagagaccagcctggccaactatggtaaaaccccgtgtctactaaaaatacaaaaattagccaggtgtggtgacacacgcctgtaatcccagctacttgggaggctgaggcaggagaatcacttgaatccaggaggcagaggttgcaatgagccgagatcaagccactgtactccagccagggtgacagagcgagacacagtctaaaaaaaaagaattaaaaattccacttctgggtatatacccaaaataattgaacgcagagactgggtaccaccagagttctagaatagacacaggatgcggatcgtattgcatggcagaatgcacgggacataatgaaacacagcaacctaaaccattgcatggctctttggtaaaagaaggcacagtgcctgaagatctgtggagatatggctcataaagaaggagatatgccagctgagcaaggatttggggcaggatatggattcaagagattttatgtgcccatgaaggaaggcttgaagggctcatggtcatttctggtaggctgataggcactcaatgtggttatcgttgaccctatcttcaactctcttagtaaaccagtaatttaaaaagaaaaaggaaggtttaatttcccatttcaatttaaaataaatttacccagtttccttatttttatttacatctgacatgaaaatctttattgttatttctgaytagaaaatcaatagtttagctgggtgcrgtggcacgcacctgtagtcgcagctagttgggaggccagagggtcacttgtgcccaagaagtcgaagctgtagtaagccgtgatcatgccattgcactccaacctaggtgacagcatgagaccctgtctcaaaaaaaaagaaaatagagaaaaaaaaattaatgcttcattcaaaatcattaaaaatgtataagttagaaagtaaagtttgmcataatctctctaccttcttcaacataactactgttaacaatttgagttatattcctccagaccttctttatgaatatgcctttatgaatattaaaatatctatttaatagatttacttaaaatatactctctttttttgagatggagtcttgctctgtcacccaggctggatgcagtggcacgatatcggctcactgcaacctctacctcctgagttcaagagattctcgtgcctcagcctcccgagtagctgagattacaggtgtgcaccaccacgyccagctaatttttgtatttttagtagagacagggtttcaccatgttggccaggctggtcttgaactcctgacctcaagtgatccaaccacctcgggctcccaaagtgatgggattacaggcatgagccaccgtacccagcccaaaaaatatactsttttttcatggttgcacatatggacctaattaagtctttttatgaaccttcattctattttatggatataacataacttgtttaacaagtggtctactgaaagacttgtgtactgttttcatttcttcccctccatttcaatcaatgctgccaggaacatcctagtgcttctatctttgctcacttgtatgagtgcaagaggaacagctgggtccaagaacattctcccctgtcatttaattcagcactaattattaggtgtagaattgcgtctcctagaaatccacatgtaaataagaacaaatggcctttcactgaaccttatgtctgctcatactttatagaaataccagcgaaggcggaagtacagcctgtctgccgtgtttcattcagccaccatgttgcaagatgttggtgaggccattcagtttgaagtcagcattgggaactatggcaacaagtttgacaccacctgtaagcctttggcatcaacaactcagtacagcygtgctgtatttgatggtaagattggcactaacagttctctccacacgtttacaatgggtgcaccacgggaccggaagcaagcactgtgtcttccctctggcactgttctacgcagcctatggttagtggaaaggaaaaggttgaatgaggaagagagtgtggttggggttcaggcaccttaaagactggccagacccaagaagttgcaggtcccattsscagaggctgaaccccaatgctaccctctccccacccagctttaacaatggttttgccatgtaagaccccaaggtagccactgtgctaagttctgagctccgcaaagcagctcctacccctacgaagccccaaatctttcttaggctgagtagtggaaaatgaatgggactctggatcagctactgggaaatcatgcttctggtcttcactctgttactcaccagcttgtgaccttaaccgtgtcactgaattctaaccctcagtttcttcgtcttctctggagttgacrtgaggattaaatagctgtatttgaacaaagatgggtgagaaacagtccctgattttaaggagcttacattctagtgtataaaataaatcataatagaaagcaaagtatgagaacttccaataaaactgtcaacaaatggtttgagagtacagagaagggagagaggaatactgatcaaatttcccaacagtattgccagagttttaacttaatttttgtacaagcagttttaaaatgtaagacatcctaggaaacatcagctaataattcttaatcacagtaaggctctagtaccaaaccctatgtagccagctaaagctttccaagaacagaaaattcttttcttttgccccagttccaacaaaaacatttatttagaataacagtttttagggactaacatgttcagtctagcttcctatgtcatctgtattttctactaccacgttaagaaaccatctttgatgttcagatgcatggccctgaatcactaaacgatcctgagattgctgtgctcagtttactagggtgtctcagagaaaatttcagaacagcctgaatgaaaaagagcttcctagtcttcagttgcttaattgagtcaaattaaagaaccagaccacctcaagctattccccaagcctgtggattaatcagcagctcagtctgcacatctctttaataaacatgctgtctattttaagtgttcagtgttcattgacccccaatgttttataccaggcaactactattattacttgccttgggcccacaccaagccagttgttaccctgacttcatactgggaggatattagtcatcgcctggatgcggtgaacactctcctagctatggcagaacggctggtaagtttctctttttctgcatttccttttcaccaagcagggtgaattaggtattaggatggaggccaggccactataacacaagaaagtgctcagtacagtgatcaataaggtaagagcaatgtctctaggaacagtggaggtagatggtcctaagttagtatggaggttcagtggtattggrgacccaggctcttacccccggttgctctgccatcactcaggagttatcattgtctgcatggtagaggcagctcactactacatctgccctccagcctgaggggagggctggtaaacagtggggagaagatgacataggcctttctcttgaagggaaggatgcagaagtcatactcttaatttctactcactttccactggccagaatccagtcatacagccacatgtgactccaacgaaggtggaaaatgttagtcttatgcctgggcaggcatatgcccagataaaaattttcttactttggaagaggggaggattaaaaaggtaggagtggggtggaacaggaactcatagtttctgccgtaatttttgtgtagagagaatggttcattccaatagcaatatgaaactctgagaactttgcagtggaaatctccactgcaggaagaggtagctttgaggaaccagtgtctgacacattccactcttgctgcagactagaggaacttcttttgtttggaggttggggatttccttgggtgaaaactgcatayatatgatatctgtgattatctgtctagttgacattggtcaactagattggtgaggagaagggggatatgtctgtgatatttctaattaagcaaaaatactaagttacttgggccaggtgcagtggctcacgccagtaatcccagcactttgggataccaaggtgggcagatcatttgagatcaggagttagagaccagcctggccagcatggtgaaaccctgtctctactaaaaatacaaaagaaattacctgggcatggtgatgtgagcctataatcccagctactagggtggctgagacaggagaatcacttgaacccgggagacggaggttgcagtgagccaagatggcgccattgcactccagcctggacaaattgagactctgtctaaaaagataaatatatacatatatatatatatatatatatacacacacacacatacacacacacatatacacatatactaagttactcctatcaggtagtgctaaaatccatctggcattggtgttttgatttcaacattatgttaatattaattttttaaagatctaatctctaccagggctggaccaaaacatatggggtttcaggagtatacttgatctaaaactcgacrgcaaaatctgaaatatcattttatgttataaaggcaatctgggaggataactataggtttaaattgacttaatcataactgtcctgaaaataaagttgcaattgataggcaatgtacatctcaaaggcatttgtggagaattagttgcacctgtgttctaattgtgtttgagatgctcttcagcaattttcatcctggttcttcttatcagctctctccactgaccaggctgcctaatctggacaggatggtggctttcccttttccctgattaggacttttgacagtcatggtaggctcttcctcawcttctctgttggcaggtgctcaatggaatagaaccatatgttttgagcttatcttgtactttctctgccccagtccgtaaatcgctatttctccaagcagctttttcctttgagtggggaatagcattttagaaacaaaatctgggtatacagtgctcactactactgaaatatcattgcttctaggccttctcagcaaacgaatttgcacagacacatgtatgtctatttatttctatatctatcaatatattaaaagctatgacttcataaagatacttccaattccagtccaataccacaaggtttatcctagtcctctgtatttctatgtctctaactttcttctccaacagtgagaaatctggcctttgttatcctcaatatatttactccttggttcaatcctaaaatctgtagataaaccactgtgaaaaataagcctactaattagagttcaatatgtttatgggttttttttttctkccttttaacaaagtgtacatagtcaaaatactgtgttccaaaagttacttgggttagtttagtgtaattatgttattcatctgaaatgtaattagatctgttttatttctggttatattccactttagggttccctctcctatctttgctggtttcattttatttgttttttgaatatacaaaaatatttacatgatttcacaggttaaactatatgaaaaggtataatggcataatgaacaattatcaattatttcctctcttttcaaattcttcagcaaacaaatatagaagctctaaaatcagggatacaaggtaaaattcctgcaaaccagctggctgaattgtggctgaagctgatagatgaagttatagaagacacgaggtacagtgatcttacgcctatctcagaattttcatccaggcgctcctccctgaaattctaagactgtaaatcctgtggaattgtttctagtgtttgtctaagaagtgattttgaattattcaaacttcgwaaaaagtcctcactgggaggagtgcctgaatcaccaccaggaaaagctccactttctgatttggtgccagttctcaagtagcctagggaggctgaggccccactcccagaagcacgtcccaggcagcctcaggcaagggatggggagcggagaaagaagcaagcctgagcctctgcttctcatcaacccaagaatgacccccaccctggagaagggtgacttctggctcctacggagaatgggatctgggagtggagcattgattttaccattcagaacaatatctctaattcataaacatatttttagaaacmgcccttttacttgctcttttactgaatgcctgatgaacactgtggccaagcctctgttaggcaaaaccagtagatttgacttgaaccagcggacctttcataactgattcggggaaacagctcagatcttttagcatatggaaatcaaagggggaagtgattcgttccaaactcattttaaatattggttaataaagcagtggacagggaagttccgaaagaaaagcatattgaatgctttccacaagcaaaaaggcctttattccccacactgggctaacaccctaagtcaccctgtcttcttgtgcctcctagtggtaaagccaggtaattgaaacgcaaccaaaatcaaagtactgctggggtgcttgtttaagttctgaatgttaragctgggtcctaagggatcatgtccttcagtctccttatcttgtaaatgagaaaacagaggcccaaagaggagaaatgacatatctgatgcccagagctgggtttgccaactcagcccctcttcctgccatgtatttcacagtagacatctatttgttcaaggccccaagtgtgacttttgaactaacagcttccagatatctttttgcctcaragtctcactctggggaattaacccttcaaatacaatgccgtagttatttatgaaaccaaacagaaacatttggtaataactttcatggagaaawtgtctgtgaattttaagatttgcagagcaaaccacagtcatctatttatacttctgatatgagctgtttttgaggaatcaaattggaatctttctaaactttatgtaacaggaaattcagtgtctaagggaagttgtgctaggattttcttcattgaagaagctaggtgaaattcaagtgagtggaaattctaggtaaggacactgtgaatcagagcttcgtgaacctggtggaaatcctcaccctgtgtcccaccagatgccatggtgggaggcaaggcctggcagcagaaggctaattctggctctagctcagccattctcaggaacccttgggggtctcatcacaacacatccaagttctcatattgaatggagatttggcctacatggttggttcataaatctttctggagttcatgggcccctttgagaatctgatgagatgatggtgataataaagatgacaacragatgatgatgaggatggcaacattgtttagacgttgctatgcaactattctaaatcctttccatacagcaactcatttccttctcacaacagccctaaaaagcatgtcccacatttgaaaataggaggacaaggaagtaagtgactggtcaagacaatagaactagtaaagaatggagccacgattagtacccaggttgttggctccaaagcctatgttcatcattacatcacactacgtgttgacacagatagacacagttttctttataagttccagagtttcacagaccttcgagacccacccatagattgcttaaaggcccaggattccctaagttaagtatgcttcagctaaatggtctctagcctcccttcttcttccatcattttgtggktctgtaaaatgattctaggaagcaaaagaagggaaagccagtttctctcagctgccactgtttccatcttctttccagtgactccttgggccgtaggttaaaccctaagrcctaaaatggctttgggattttaatctccctgtattccttatgaacatcaagagaccggcaggtctgctctggcaatgccagatacactctactccagcgtaaaccagkcagtgcttgtagattcagttaggaggttgatgtggtttgcaagatggaaatccaacataaatgtatttgacagttctgaagcctaaaattaggttattcttcaaatcctctgtttctttttttcttcrtttttctagatacacgttgcctctcacagaaggaaaagccaacgtcacagttctcgatactcagatccgaaagctgcggtccaggtctctctcccaaatacatgaggcggctgtgaggatgaggtcggaagccacagatgtgaagtccacactggcagaaattgaggactggcttgataaattaatgcagctgactgaagaggtaggacttttaaactacacaaacgtcacctgatatggaagaagggctctgcgaaatgrcaccaagaataggatggtggaaagagaatctactacattatcttggatattgagcagctctgacagattgtaaaaatcagggagtaactgggctgaggatgctaatgatgaatgtgattgaaatcagagcaggggaagaattttgagttggtgatcttggaaatgtcttcaaaagtggacaaatcattatcattttcatggtactgtcggagaatattttgaatgrtctttgcagttcacaggattaaaatgtcagctttggctggggttgggaagacctgaatttgaaccttggttctaccatgtataacattgggcaagttattcaacctctctgagcctcagtttccccatctgtaaaatggagataaacatagcacttactagttagctttgttgtgtgaagattttaaaaagatggtgggtgtacaaatgtccatgaatgatagactggattaagaaaatgtggcacatatacaccatggactactatgcagccataaaaaaggatgagtacatgtcctttgcagggacatggatgaaggtggaaaccatcattctcagcaaactatcacaaggacagaaaaccaaacaccgcatgttctcactcataggtgggaactgaacaatgagaacatttggacacagggtggggaacatcacacaccrgggcctgtcagcrggatagggggctgggggagggatagcattaagagaaatacctaacgtaaatgatgagttgatgggtgcagcaaaccaacatggcacatgtatacctatgtaacaaacctgcacattgtgcacatgtaccctagaacttaaagtataaaaaaaaawggtaggtgtaaagggcttagcacagttgagggcatacagtaagtgctggataaatgctggcctccactaacttcggtggactagaagaatgaggaagtaaggagacgactcctcctgtctctcagaaatcagagggttgggtaggtagtcatatatttgtgggtagaaatacgcttgaaaaagcacacaggattataggtaatttcattttctactttgtatgctttggtactttcacagtgttctatagtggacttaggcagtttttttataccactgtgtgccaatagggacatttgcatatccagctctggaagctggattatcttctttataataaaaaaagaggtttttgaaaacaaaattaatatttcagatttgacaaatattggatggtgagccagagactctttatcctgtaaaatatatgcaatctgtaaccttttgactgctgctggtggctttcttcaaatgatgcttgagataagatggaatattttctaagatacctcccagagaagagtaggagggacttttgctaggtgaagctgcgcctctgcttctcgcccttccctttggccagccacagtctgcctcccagccctgcaaactcacagtgcggtcctagaagatgggagctcaggaatttgagacagagccctaaccacagcgtttctttgctaaatgaatccctgagggtccagcctgcagggtcttcrgtccctctccatttagactaaccatggctgtgcttcctcttccatccaatcctcatgaccagccacagaacagcatgcctgacatcatcatctggatgatccggggagagaagagactggcctatgcacgaattcccgcacatcaggtcttgtactccaccagtggtgagaatgcatctggaaaatactgtgggaaaacccaaaccatctttctgaaggtacatatcttcactgtgtcatgtgaaacacactaaatgcaaaagctgtattcctgagaagggtctgctttatatcatttgcaaatcattgaatggtaagggtgattgggatcaattctagcccatcctggtccctctctctggggcaataattctgagagagagtgatctgaggttggccagctttcaatcaaggacacctccttagatgtctttgtgacattaatataaacatggcattgtgaatgctttgctttctggcatgaatatttcacttctaatatttcacacaaggcaatgcctttcttcctttcattctagtgaatgttggggaaagaaagagaaagcagtagggatggttcatggaatctgttgctctaacctaatgagcaatagattgaatcaatttcaatttgatgaaccaatcaaattgaacatttttgacaatcgtaactttagggaagagattctgaatacttttagagtcatagactctcttaagtgcctgacgagagccacaggccttctcctccagggaaatgcacactgcatgttcagctaatattttgcatagaatttaggagcttcatacaacccataagcctgttccagggccccgtattragaactctgtgtgtgtatatggggaatcaaaggtgagcctagggccraaacaaagaaatcagaatagttcccatctatatgttttgacgtcatctctctggccaaccccaactggagttctttgcatttgggacagagaaataacaattaagaagagaaaaagcagagttggagagastgttctcttcaaacaaggagattctgctaacttttaataaatttactcattgctctttaatcaggagggtgtaaatagaatcagagtgattatcttctttcaagtgtctcttggtagaataaattttacttaagatagaaccacaattataattgacctcagcagtgggtggaagcaaactgattaataaataaagcttcacagggggtgggagaggagacaaaggcaccttctctgtgttaggttttagaagttagtggataaacagcaaaatgcttttaagagaatgttttgtatatttattgattttgttaatactcattacacagtttagggagctgtttaactcatgagtttttttggtcttgagatccctttatactttaaaaaaaaagkttgaaggccccagagagctttggtttatgtgggttatacctatgaatatttactataatagagatcgaagctgataaatttttaaaatatttattgatttaactgtaacaataacccgttactaacataaattacaycaattacatatttaatttaaaatgttaataaactacatatttttacaaaatacattttgtgtaaaaaatcagaaagcagagtgagactgttttgcatttttgcaaacttctttaatgtcttgctgaacagaaacataactggattctctcatcttcttgtgcatttaagctgatggaattagttatttggttgaagtatatgataaggatctggcgtcacatagatatgtagttggaaaagggaggagtattataataaccttttcagataattatgaatattcatctttgatataacactaaactcaagtggtagcttttaaaaggttaattgcagtgtgacatctgaaaccatatcaatgaatttttcatactcagctacgttaaaatccttggtctttcttggactttgaatgactcttttattcatgcatgattttgtaacataatgyacaatcatttggaaaattcactgagttatgtagatcactgagttatgacacatttcatcatacaatattgaaaaaaacacactttgaaatcacatttgttaatatcacttatcagaaagtctatgtgttgggaagctatcaaacttattgttacagattcatgttttccaacactctattattttacgtgaaagctggaattttgtcatcaccaacaaataaagagttattttccttggagtgagaggttcactttgtttatgtttaaaaaaaaaatccttgccccatactcaaattggaataaccatgtttacctgtcaatcgcagttttaagtaaaagtgatatttcatttttcaaaaatctagttcaacttacaactcaaaaaattgcacaagagctttttctcaagacaaccatcatatgccaatatgcagcagaagtgcttcgcatgtacttcccatctcatcacacaaaatattaacaagacatgtattcaagggtcgagatttaataagattggtaatcttggctgggcacagtggtgtacgcctgtcatcccagcactctgggaggctgaggtgggtgggtcgtttgagttcaggagtttaagacccaccagggcaacatggcaagacccccgtctctacaaaaaaaatacaaaaattagccaggcatggtggcatgcatctgtgatcccagctactctggcagctggggagggaggatcgcttgagccctggaggtcaagggtgcagtgagccgagattgagccactgcactccagcaacagagtgagactctgtctcaaaaaaaaaaaaaaaaaaaaattagtaatcattactgcttgatcaacagaatccttttatttttatgtttttgcacataaaaagggaaagataattctttagtgaaactggaattttgtttctttactgagattgctgttattattactattacttttactgttactactaggtccagtttggcaatccggccttgattcctgctacagtgcaggagttttttccactgttgcttttgcaccaccagtgcaagtgtcaatacagtaaagaagataaataccatgttagtgttattagaaaaattgttttgaccttgtggacctcctgaaaaggtctcagggacaggcaggaatctatggatcacactgtgagatctgctgctttaattgtgattttaatctttgctgtagggtcatctggaaatgtttkaactgaagcaaacataaaattagactggtgaaagcaatgattagatgttccctctgtttttggctttaacwtaatgtcacagtctttgctgtgcctaatgtaacatcacatgctattgttcatctcacagtatccacaggagaaaaacaacgggccaaaggtgcctgtggagttgcgagtgaacatctggctaggcttaagtgctgtggagaagaagtttaacagcttcgcagaaggaactttcaccgtctttgctgaaatggtacctttaatgatttcactatcttttcttctttggtcgggggaggggcacttttacttttcacctttatggaaaacatttacataccaaaaacaaccacagccctccttaccatcccctaaaatcccatcgaagggatcttaacctaagggataagagaagatgctcctgagattttatagtcaacattggaacacaccatggtgattaacacttttgtgtgataattccaagagatgacttagatgccttccacttctaccacaatcttactagcaatactgaaaatgggtgtctttctagctctcaaaactagaactctgtaataatcttattggttcctgatgctgggacactaagtagagtatacacacacacacacacaccaacccaggagaggggacacttgagatgttcagatcttgataagcttacttggggtagagtgtcttaaaacccctgaagacccatttcacacttaagggaagcctcagataggcttgtccaggggcaaaaaaaaaaaaaaaaaaaagctgtctgaatacttctaaaacaatagagataatttgtaaaaccttcactgagcttaaaatccatgtagttaatgaaaagtctcattacaattaaaccaatgaaaataatgttcacaaatgtttacagctaaaagtagaattgttttgattttttatgctatttttaactcaagtgcttattgacttaaatttaccagatgtattyggtgggtctcttctgataactttcagatgaacaccactctacagataggccttcatgctccaagaaatgaggtgaagactgtcatcattttagctagtctagaaatctattcctgctactcactgctatacctgacaactggttcaggattgtggctctgatctgcttgctaggcaagacaacccttgaccmtcttttatttttactttttattcattcagcagttcctggcacataacaggtcccaatacctgtttattgaatgaataaataaatgatgacaatttatctgtcctactgtccacccaaccattcattcctccatccctccatctgtccatcggagcttttagggagtggtggcttcatgctaggcactgagccaggtaaccagctgctgaagatgatgaagaagccaagcctggtcctcaaggatctcacaatctattgcaatgattgcaaaactaggtctcttgttaagcatgcagactcccaggggcaccctggggattctgattgtgtagcttgggttagggattagcagcagtggtgattccaacatggggcgagagtggggaccactttaagaaacagtagaatgtgtgggaaacatacaagcccttgcagctcaggcttagaggtgctagtgaagatagagggtgtgctggaggccactagggaggccctgaatggaggatgttgatgtccagccagctggattgtgtggagtaggggcttcatggcataggtaaggagaggctcattcctgccttcctgtaggatttcttggcatctacctgccctccagctctgtggctgggtctaaactggagaaagcagccctgagcaatgatcgaccagcccagggcttccttccactctttcccatttttggatccttccctgcatagagtgaagcctgagcttcaactyatgtagagagatgatccactcatttctgttgttctgtgtgactcacctgttgagtaccagcagaggcacattaataataatggaaattttactggctcttgccttcatgtgctaataatactagcacgtaattttctacaaaattcccccccacccccgagatttctgggagtctatgaggtgcttcacatgtgcttgctcatgaatacttttttcttactgtcctgccccagtcctgctgactaaagccacagccctcaaagccacttgaggctcccatctccactgctgctgataccctcttgtccatgccaagtctttgcctggattttactaaggctatgctggcttccaagcagaacaggaggaatgtcttgctctccattctgtgtccatgtcatgtgaccccaagccttaaggtcccttaggataacagttcctttagtttctgcctgaagctcatctcccctccaggctgacagccagtatctgagataagcaccattgtgtcctcttgattccaatttcctaatcaggcccccactcaaatctcctcctttctccttcagccaaaagctttcctatggcttatgcaaatcatcttctcagtggattcatcagcagacaattggaaattctagtttggatccaaacatggacacccaccacactggcaaatctctaccctttccatggttgccatgatgaagagcagaccgtcatagatttatagattctaacttggaaaggaatgccctaaaagccagagtctgccattgccattcagcctgcttcccagagaggccttggtctccttgccacattccagatggaattaaggctcataacttttaggtctaataagggctgggtattaaaggaccttcatgtttcagatgggttttttggtggactgcctgggaaatggcaacattaattgtatattgtttctacagggaaatgtgccccaagttctcagcagtagacttacaaataaattttataaaatctgctcattcataagctgaggactttcataggatttaaaagataaggttcgcgaactatcttgagccattcaaaattataatagaagcaactaggatgctatatcgctatttacaaagcacgttcgcaatcatttgcacatttaaactccagaatgactctataggagaggtagcattatcctcagatttcagatgagaacactgagtcctagaaagttgaatgatttatccgaagttgcataatcagtaatagctcaagttaggtccataccttctgagcataaagcttttttctgctttctgtagttgtctagcctaagtcctcgatgaacttgaaaatgtatgtgctagctttatyttttgctctctgatggtgtttctccaattttatctcttttttaatagtatgaaaatcaagctctcatgtttggaaaatggggtacttctggattagtaggacgtcataagttttctgatgtcacaggaaaaataaaactcaagagggaattttttctgcctccaaaaggctgggaatgggaaggagagtggatagttgatcctgaaagaaggtaagttgtccattttctgagtaaaaaggatagcaatgaaatctttctctagaaattgctaaatatattatatctccgtcatcatcttgataatagttatgtaacacccactgagcagaactaagtccattgaaatttgtagaaagttgaaagatgttccaccataagacaggctaatataaaaagcacctggtaactaacattttgagaaattattatgcttgactgtgtcaggcagtgtgctgggcactggcgtcatcttacttaatctttactacagccctacaagggaggcagtggcaagaaggatctgagatttgaccctacttgcaagcgaacaaggtcccccgtcacagtttcacagatgccgrcacatgactcctgggttagaataaaagaactttattgcccacagcaatagcaatgccagagtattgatatttgctcgactttttcatgcccgaattcccacagagtaacatgaagagggccagatgacacttgtacacacagtggattgagttatatgagagaactctargcttaggggacttgaaktttttataatgggcagtaagcaggctggccctttgctgtgcagagagagactatcttagtgttccccatataaacatctttgagaagatagcccataacaaaggtagtcagtgcctgagctcacaagatgcgcagaaacacaagagactcgcagagaattatctcccaacaagtagtagtattatctccactttgcaaatgaggaaactgagatctagaaagattaaataacttgtccaaaggcacattgcttgtcaatggtatagtaggggctagaatccaagtctagcgtgggcacccaaaccagtactcaactattatgctagaatgtctgcaagaaatggtaggaggtatactgtaagtggatgaattycatatatgtgaactayatctcaaaagctgttattaaaaagaaagaaaaaaataaacagtagaaggtggtaaagatggttcccctggagtctgggggacactgtagcctgtttgctaaatgttgccagtaacattagaaccagcattccctcttcttgccatcttatgacagcagccttgagttgggagggaaaaaccttgtgaagttgaattttaaggcctccaactagagtttggtctctctgttgttcatttcctgtaattgcataggcattagggagggaggagggaagagaaaatactgctctcttaagacccaaacgtgcttgcttgcatgtgattgctttcaattcaggcagcttgctctgggtggagttgggggaaattggtgagggaaaggaaaatggggtttgaattggctggaaggaaggaaggttagtgaggacagggaaagggtagggaaattgtgatagaaaaagcagaaggtcaaagcatgtcagggctggatggaatcctacaggcagcagccagggcttttattctccttytttgaggcccagagacgtgatgcccaattcatataagtgattgggactgtttgtttttttgattcctttcctgtgctggattctaggggagaatacagcagagaaaagatgcagaaacaataaagggaaaaaaaaccctcayttgagtaggtacctggcagaagacttgagtcaaagttggagcctctgtaactttcctctgcgggttgtccaaagaattccaaatccaagaggaaaattaacatggcagagagtcagtatggatttcccaaatgcccaaatggagtttggagtctgaaatgacctggtttggctgtctacctaggaactctccagaaaacttaaactcctcccttcagtttgtgttatgtagaccaagcaagccacatgtggcttcatgagaccgtctacactctgttttaaaaaatagtggggacagctcccttttcttttgaactgttagccaagagtttcattgagataaagctgagcagcccggaactgaaacagaaacatggaaggcgttgtctgtggtctctgtaagaagctgcccacaatactgttttcccagaccccatcctcattactgagaaggagcaaccttgttaatttgaggagttctttatgatttaggtcacattgttccagcaggctctttcttcaaaggaatgtcaaaagcgattagtacaaagaggaatttggagtcagaaccaacaggggtaaagcgaggagggaagtggtgccactcccagggtgtagatgcttcctgagtgttggcaatcgccgaggctgccggttacccggtctccttgggtaacttgagccctccccgccccacagcttgctgactgaggcagatgcaggtcacacggagttcactgatgaagtctatcagaacgagagccgctaccccgggggcgactggaagccggccgaggacacctacacggatgcggtgagtggcctgctccggagagaaactctcacctgtcacctctgatcgtgatstgcggggaacccagcagccacctggcttgggctttaacctctcctcygctccatcttatgttctgaagagtcttccacttatagcttaagccacacaagtgccacaataagtattttctttagaatagaaatgaggcctatttaactcgatgttggaacatggtatagtttggattgtgcaaattttttaggtaaatttttattattatctaattagggttctgttgttgtttgagggttttttgagataggctctttctgtttcccaggctggaacgcagtggtgcgatcatagctcactctaacctcaaattcctgggctcaagcagtcctcctgcctcagcctccccagtagctgggactacaggcacatgccaccatgctggactaattttttatttttttgtagagatgggttcttattatgttgcccatgcgggtcttgaactcctggcttcaagcaatcctccagcctcagcttcccaaagtgctgggattataggcatgagacaccaagctcagcctagtttttaatagtataacaaatgaaatgtttctgtctttaaaaaatccaagcagcattaaaggaaatcaaaagtarttattctccccaatccatattccactccccaaagataaccattgatgtctgttttctgttcataaacaaggatataacttcctttttccctgcctaaatagaattgtgttgcacacacagtttcatagcttgtatttttcacttaacaatatatcttggacattttttatgtcaatgcatatagatctatgagcttttaaaaaatggttgcagaatgttttattatatgtacctactataattcatttaatcccctctttctgggcatttaggtgcttttggttttgagtcgttggtttttataagcaatgtaacagtgaacatccttaaacatacatttttgtatgtttatgaacgtttwtctgtagggaagatccttgcatttggttggtctaggtttaaatgcatataaaattttgataaaattttataaccttcaaaaaggttttataaattcatattttcaacaaaattacaagaagcccatttgcctaaatattcmtcatcccgctttataatctttgccacatgaataagtggtatcctgttatttcaattttcactctcttaatttaaagtaaagctgagtattttttcatgtttatgggccgcctttatttcctttacttaggaactttcttttcataactctcttcatttttatgcaaacttaaktcaatattttagataaattttgctaattgtatataattaacattatgaacctccagtagcatttccccatactcaaaaacatgtgtctgccgggtgtggtgggtcacacctgtaatcccagcacttcgggaggctgaggtgggtggatcgctgaaggtcaggagtttgagatcagcctggccaacatgatgaaaccccatctgtactaaaaatacaaaaattagccaagtgtggtggcaggtgcctgtaatcccagctacttgggaggctgaggcaggagaatcgcttgaacctgggaggggaggttgcagtgactcgagattgcaccactgcactccagcctgggcgacagagcaaaactctgtctcaaaaaaaacaaaaacaggccaggtgtggttgctcacgcctgtaatcccagcactttgggaggccgaggtgggcagatcatgaggtcaggagtttgagaccagcctggctaacatggtgaaaccctgtctctactaaaaatacaaaaattagctgggcatggtggcgcacacctgtaaatcccagctactcaagaggttaaggcaggagaattgcttgaacccaggaggcagaggttgcagtgagccgagattaygccactgcactccagcctgggcaacagagcgaggctctgtctcaaaacaaagaaacaaacaaccatgtgtcttgaatgttttacccattctctgatgggttctatcccatgtaacccctcataaagagagttgcaccatttcataatattaagttgaaccataagaaattgctgagattcaaccactttgacctataacaacagcartttcacatgattgaacctastactattccctaatagtaaaaacaaaaggtagtttaaactaatttttatttagcagttgtgaataaataaagattagagatttttctgagtgaaatggatctctaagatggtatctaagtaaaggtgtgaatgccatagttaaatgaggaactatattggaccctttgcctcttactgacactatggcttacctctcttctttgtttttatttttgttttgtaagaacggcgataaagcagcatcacccagcgagttgacttgtcctccaggttgggaatgggaagatgatgcatggtcttatgacataaatcgagcggtggatgagaaaggtaacattgtacatctgtgacctgattggggctctgcagcagggccttggttaaccaggataaagtttcctggagggaggggcctcacttctgttggtctatggcaggagtccccagcccccaggccagactggtaccagttcatggccttttaggaacaaggccgcacagcaggaggtgagcggcgggcaagtgagcattaccacctgagctctgcctcctgtcagatccgtggcagcattagattctcctaagagtgcgaaccctattgtgaactgcacgtgagaggggtctaggttgtgtgctcctcatgggaatctagccatcctccctctaccccacaaccctgtccatagaaaaattgtctcccatggaaccggtccttggtgacagaaaggttggggaccgctggtcygtggcatctgggtcatgtggtaccgtctgtgactaaycaaatgtagaatccaagggaaaggcaagtgtatggacaagtgctaagtgagcagggggtgttaagagtgaaaaacatcagrtgatggggccaactggtcaggttttgagatgcttggggatccaggatgagaatttgggagggagctggagtcaagattttctctattctaaccacaccccataacctccctgggaacatcacattcagggcccccctgacgcagaaaagagaactgtaaactacccttaaagtcttcctatgcagcaatgatgcagactactgatatagcttctgatatttgtctttttctgaaccataattaaagttaagtgaacaatagcatttggaattctcaaaagagaaaatctgattcattactttccttatgcatggtgcatagaactggcattgacccagaagatttcaaatcaattataagctcctcactgatctcgatgcacacaccagatctcagaataatcgttagcattgactgagcaatagctgtgtgctaagtatggccctaatgctttgcatatgtcattttgatagtgttaaaatactgtaaccctataatcccactttacagtggggaaattgggccataggcaggtttaccaacttgctggaaacttatttagttaacagccaacatgtggcgatgctaggatttgaacccaggctgtgcaaccgcacagtccacacgcttacctgctgtttcttcctgcctcttgaactgtgctttattcctaagtgcactcagttaccatgaatgactggaagcataaaagtaggggagaacatggccaccaaggaggcattttgaggagctgratgggaatgaggctgtattcagtttggctgaataacccagcaaagtgaaaacagccacatattcggtcatgatagtacagaacatctgagggcagggagagtgaacaaatgtttcctcgaggtttatttggtgatctggcaaatgcatctcttctgggtaaccattcacaaactctgttccaggctgggaatatggaatcaccattcctcctgatcataagcccaaatcctgggttgcagcagagaaaatgtaccacactcatagacggcgaaggctggtccgaaaacgcaagaaagatttaacacagactgcttcaagcaccgcaagggtaagagaagcaakggaagggagctggactggggagctctgycctcctgactacaaagtcccagctaactagccatttctgcagaaattatttgcaaatccagagcctaacactccactcaagggttctcaaagtgagcccaccccagccagcaatatcatcatcacctgggaatttgttagaactgtcccaccccaaacctcctgatttagaaatcctgggggcaggcccagccatctgtagttcagcaaaccatccaggtgattcccaggcaggctaaatgttgagaactgctacagaggtgttaaatggaaatgattttggcagcataatctagtagtrgtaataggtcaggacttggaacaagatgtgtaaagattcaaaccctgacttccctttctttctcatctgcaaaatgggaataatatctatgccttttaattagggtattgtaagctttaaatggaataataataaattaaatagaacagtaacactcaataataagtggcatgtatagaagtggctttctataatgctaggtactgagtatgcatcatctatgttctgtaaggtttggattttatgctcattttatagataatgctcacagagtttaaatagacttgctctgggccaagtgtttagtaagtgacaaagctggtgctggaacccgggctaagtccaaacaggaactctctctattccacagaatgggtaactccggtaggcactatgacattatttttattagatggtgagcttctggaagcaaagatggagccacagtcatctttgtatcctccttgctaactcagaaatatgctcccagtaaataatctagtcaaataaatgagctaatgaatgaatgagtctttttttttttaatttaagttccgagatacatgtgcagtacatgcaggtttgttacacaggtaaatgtgtgccatggtggtttgctgcacctatcaacccgtcgcctacatattaaacccagcatgcattagctatttatcctgatgcgctccctccacccgccggccccagtgtgtgttgttcccctccctgtgtccaagtgttctcattgttcagctcccacctgtaagtgagaacatgcggtgtttggttttctgttcctctgttaggttgctgaggataatggcttccagctscatccatgtccctgcaaaggacatgatctcgttcctttttatggctgcatagtattccatggtgtagatataccacattttcttcatccagtctatcattgatggacatttgggctgattccatgtctttgctattgtgaagagtgctgcaatgaaaataygcatgcatgtatctttataatagaatggtttatattcctctgggtatatacccagtaatgggattgctgggtcaaatggcatttctggttctaggtctttgaagaatcgccacactgtcttccacaatggtgraactaatttacactcccaccaacagtgtaaaagctttcctatttctccacagcctcaccatcatctgttgtttcttgaccttttaataatctctattctgactagtgtgagatggtatctcattgtggttttgatttgcatttctctagtgatcmgtgatgttgagctttttttcatgttttttggccacataaatgtcttcttttgaagatttatctgttcatgtcctttgcccactttttaatgtggttgttttttccttgtaaatttgcttaaattgcttgtagattctggatattagacctttgtcagatggatagattgcaaaaattttcttccattctgtaggttatctgttcactctgatgatagtttcttttgctgtgtagaagctctttagtttaatgaatgtctctctattgtttaattatccccgtctgacagggtgagaagtttctgaaggtgcttgaacgctcttcttccacacgagggcaccaagttgaagcgggaagaacactgagccatcagttagaaggctcaggatatggtccagttctaacgagtatttctgaggytttgatcatgtttcctaacctgccttactcttggctatgtgaaatttttcactgctactatttatgttactagagggtcaggtacaagattatgcttaacctgcattttacatttatttaaagtgaaaaaatagacccaacaataattacccacatggagctctcacttctcaggtcttgaatattattccacattgttttacgtttattaaatccagtcatatttttaagattttaaatcaaacttctgccatgaaaatgtcagctgcatgaaagcaaagaccctatctcttcttcactgtgtcctcagcccctaacacgatccctgtcacacagtgggcactcatatttgtcgaatgaagagaatataacattgaaaactgataccactggtaaatcaatagttcttaagctaaaaagtaccacacgaatttgttattagttattacagaaataacatattctgatcacttaattatcagttatggcagctattagctcaggcaagacatttaaacctgggagggggcatttaatttttttcctacatatgtaaaatggagatactaatgttttacaaactatatcacaatagcaacatttttatgaaataatgaagtgaggaaacagaaagcaatttgagaaagaatccacttgcttcacccacccccaaatctgaatgaggtgcacctcctgagggtatgtccacgactgtgctgtcattgcctggttatctctctgcactcctgcagtccatcagctctgcaaggcagaggtcctgtctgtttttttcttttctgtattcctgactctagctcagtacttggcacagagtagattttgaatactgtgtatctgttgattgatcatataacstgttttatcaaaataaggaatatcatcatcatcrtcgtcatcattaacatgtttacttctgttttaggccatggaggaattgcaagaccaagagggctgggaatatgcttctctaattggctggaaatttcactggaaacaacgtagttcagataccttccgccgcagacgctggaggagaaaaatggctccttcagaaacacatggtgcagctgccatctttaaacttgaaggtgcccttgtaagtactaggttgccagagcgcagatcatattggtgtagagaaaatatatgagtgttggatacagcactgccaactccatagaggtccctgtaaccctggtactataagatggcaaatattaacaggttgagggaaagccacacatcctgggtgctcaatacctcgtgtagaacgaatagaccattaacacaggagtgttctaagaaatactgctgtctacacacctgctttacctagtgttttccaaatatatctgttccaggacccttgtttcaggtgacacctattcacatcccaggcacaagttctttgaatcacatcttggaaactgcaactgttcaacaaaatattcatatgtatattcataaatatacagatgtcgggggaggaaatcagaagkctagctcacaaaattagagagcaatacggaagaacatactgaagcacagtaaagaagtcgggggaaaaagcaggcaggtggaaggaaggaataggagaatggcagtgggtgatctaaaacaatagggtggtcaggagccatttcccaacagcctatgtttgtatttctgcactctgaccccacagtattctgctgctgctgctctttctcttccttatcccatccttttactccctgtttatcctctacatttttcctttttttccctttctttcagtagcagggtttggcaaacctggactggaggtaggagggctggctcccacttcctgctcggctgctttccagctaagcgacttcagggaagtcacttgctatcctgggacttattcatctttaaaaatggggtgtttgcacgataacatctttaaaaagctagaattccatttgttattcttgcctcttggttggttgatttgcttttaggcagtgtttattgacttctctgctaattgactctgttaattgacttcagggggcagacactaccgaagatggggatgagaagagcctggagaaacagaagcacagtgccaccactgtgttcggagcaaacacccccattgtttcctgcaattttgacagtgagttttgttttatttttgatttattttatttthttttattttattttttcaagactgagtctggccctatcacccaggctggagtgcagtggtacgatcttggctcgctgcaacctcccaggttcaagcaattctcctgcctcagcctcctgagtagctgggactacaggcgcacgtcaccatgcctggctaattttttgtatttttgcatttcctccatgttagccaggctggtctcgacctcctgacctcaggtgatccacccgccttggcctaccaaagtgctgggattataggcgtgagccaccacacccagccagcagtgaattttaaacatgactttgtgaattccacttctgtaactcttatcttaaggaaactcttcaaatcactgaatatgatttttaaaatctcttcatgcaaacrtgactttcattttcatccttgatgaaaggagtttttaaaactacagttgaaaaccatatcacatataaggtgaagggtggtcagatcactgatattaacagtctatctcatatgtgctcattctgtctagtaagcccccaaaattraaattttaactataggaaaaaaggcaccaaaatttaaataatggttgatttcaataataattttcaggatttttggaatgagacagacctgctctacaataatattagcaaatgcttatataggtcttagcatgggctaggacctgtacatattataacttgtttaatcctcttaacaaccctgtaaggtaggtgctattattgttcccgttatacagaagaaggaaccaaggtacaggaagattaaataacttgcccaaagtcttatggcttgtaagcactagagagatttgaactcaggtagtagagctcccagaatctgtgcacggaatcataatgctctgctatctcacaaagagagagagagagagagagagagagagagagagagtgaatgtgtgagtgatagagacagagagaatataataataaaaggagtatgaatattttgaaatgtcaaagaatcttttagatgttaactgtttcccagatctgatgctgaagtagtatagaaagccccrtttctatagctgctggagacccagtttcattttaaaggtctgtgatgataagcagtaccctaaattcagttagtttataacaaaggtaatgttttcctgattgatacactttgcattgagcttactgtagtattttttaaaaataggatttttgtttttaagaccgagtctcactctgtcacccaggctggagtgcagtggtgtgatttcagctcactgaaacctctgtctccagggttcaagtgattctcgtgcctcagcctcctgagtagctaggattacagacgtgcaccaccatgcccagctaatttttgaatttttagtagagacacaagttttcaccatgttgaccaggctggtctcctaactcctggcctcaaacagtctgcctgcctaggactcccaaagttctgggattacaggcatgagccactgcacccagcctaaaaaataagttttattttacaggaaatagaactactttgggaggccacatcatcactattctatgtgctctttactgtggggaactataatagattcaagtsacccatttatcagaaacatgtattttttccaaatattccagtaaaatagcagtttacagtgttacgcttcttgtaagtaatctttatcctgtttttttaggartctacatctaccatctgcgctgctaygtctatcaagccagaaacctcttggctttagataaggatagcttttcaggtaaaggaaaaaaaatctacatgctacacatgattacatagcatgctattttgcttctgtgtttcgagtgaatgctytttgtcatttctaacaacaaaaaccctttacatgttgargttatttttgcatgcttgaagcaaactgctcagtcattagataaatcatcactgaatgctttaggcaccattgctgggtcctagtaatacatagaagatacttttggtactaatagatattaattgattaagtaataagaagcaccgagaaagtgatttctcatctctgtttatatacatggctgtgttttcatccctggaccctcaggttgattggtaagttaagatcctttaagtttttttgcaggctctttcaaggtatcaaaaagatgataagtttgcccatttgcctacagcaccaggctttgagcagtttggagttcattttaacctcctcctctgcctgctccccacattcccaataccataaaaccatgaggctttttcttctcttgcactgacacccagctgcttttgttgcttcggactggttctgagaggaaggctattggcaagggacaggggaggaggggagaacatgcctgtctggggatttgagtccttgccgctgaaccatggatagttcaggctatctggggagaattccagtttgggactcaaagcccagcagagtttccctgggccttctatgaaaacacctcttaacccatttcccatttgccccgagaaatgagtgctggcagcgagctgcacttttttattccaaacggaaagtttgttaaagcatttgactgacactctcatgtgctcacatcaattttgaagcgtgttccaagcactaatatttaccaatatttgtgaatggtttccttttcttagaaatttgagcagattcaaggttatctctgcaatatacatctccaacagggtctttgaagacattttcaaatattttccaccagggggcactctatcactgaaagttaaaaaaacatctttccaaagttcttgactaaagcttcataaaactctaagcacattccttgcagtttgagatagaagaattatcatcagggcaaaagcaaagggttcatatgatggctccactgctagaaaccaagcacttttggcttatacaagagtttcaggctagatattgtgttatttttcagataagtcagcccccaggcaactgcaaaaagtttgatgaaattatttagcaaggaggagaacatggattatttctccatacataatattgctttctctccattcttaagtatagtgagacaaagttttctgctgtcacagattgtaaactctatgagcatctgagcttttccggctgctgttatactcttgagacctggaactcaataaatatttgctgaataaatcgattaccatcaacattagaaacaactataataaaaactagcatttatcagatacttcctataggacaggctctgtcccaaatagctaacattccttatatcatttcatcctctcaacaccgtgaagcagatattactttcattgcatggaggaggggatcaacgtttaggaagattattttttccctcaaagttatgcagcaggggtgaagtgtgggtgttgaccccaggtgtatctgactgcagagcctcactcaaccatgagtgcagtacttttgcagagaaaaactatgggccccattaaccttggtggggacatactctaaagagtgacctctcagtacacatcagggtctcgcttcaggtgcctctgctgcagtgccagaaccttccatggggaactccctgctccctagaaaccctatctccaggcaggtkgtcagagcccactgtcattatatccagaggaaaagaatatggttgcactgagtggttctggggagttagattttagccgtggccccgttgttattctctttttctgttttagatccatatgctcatatctgtttcctccatcggagcaaaaccactgagatcatccattcaaccctgaatcccacgtgggaccaaacaattatattcgatgaagttgaaatctwtggggaaccccaaacagttctacagaatccacccaaagttatcatggaactttttgacaatgaccaagtggtaggtcgtttagaatttctaagataacttggggatgatggagatttgaagggatgattgtcggggaatttaaggatcactttgtttctctagggcaaagatgaatttttaggacgaagcattttcwctcctgtggtgaaactgaactcagaaatggacatcacacccaaacttytctgrcacccagtaatgaatggagacaaagcctgcggggatgttcttgtaactgcagagctgattctgaggggcaaggtacatygctgtgttcttcctcatgtattctgtcagctgcttaaaaygcatgttaattctaggcactgtttgcttgaactaaagtgaggcattgacatatccatgtttgtttcacaggatggctccaaccttcccattcttccccctcaaagggcgccaaatctrtacatggtcccccaggggatcaggcctgtggtccagctcactgccattgaggtatgctgctccccacgtgttactcatcaaatcaaacggatgtgactgcagracaggaatcttttgtatagaacatagaatcctgctgcatattttcttgctatctccaacttcctttacaacttgtccaaaaactggaggtattcatgggagtagaaggcttgttgaagcaacaaggacaggtcaattctaacattcctgagggcatctaaactcctcatttactgggagccagcaggtttctgagtttttcaggtcaactggagacctgggagagggaagatggacgagaagagaatgacggtgtatatgctgagagatgggggcatggcagggaggcagagatggaagttggatgggagcagtgagcaatgttgacatgtcagatacaagctgatgaccccaacaaggtggcttgatagacagtgtctggcccactctcaagactttccccgtccagtcaagcagctgttaacaccccaagatttcccttctctggctgtcctgctaagagttctcaaaggctgaggctatcacttcgaaatgcttccatgtcagacaccgtgttaagaagtttacaggtgggctggatgcagtagctcacgcctgtaattccagcactttgggaggccaaggcaggtggatcacttgaagtcaggagttcgaggccaacccggtcaacatggtggaaccctgcctctactaaaaatacaaaaattagctaggcatggtggcacacacctgtaatccyagctacttgggaagctgagacatgaaaatcacttgaactcagggggtggaggttgcagtgagcctagttcgtgccacygtaccccagcctgggtgacagagtgagactctgtctcaaaaaagaaaaaaaaaaagtttacaggtggtcatcaatataaccctatgacagataatacgrtcagtcttgtttgtagatgagacatagggaggtgagttaccttgtcagcattgacacagctattagatggcacagccaggatttgattcctatactcttaactgcattgcttttttaggggctcaggcaggagaaagaaaggggcaaaaccactttctttggatgacctacaagcttactaggataatgttcaaattaatcttaaagactttgccagtaattaagacagaatttttccttttgaatattatttttaaagtgctgagttaccttcccctctctttaaatygttttcatagattctagcttggggcttaagaaatatgaaaaacttccagatggcttctatcacatcccccagtcttgttgtggagtgtggaggagaaagggtggaatcggtggtgatcaaaaaccttaagaagacacccaactttccaagttctgttctcttcatgaaagtggtacagtatcgattctctgtgatcacccatgcgcgttgaaatatgaaagtatgtgcctcacacacacacacacaaacacagagtttatttccaaaacctgacaaatagaaaaaccctgccttatattcagcttgtcagtgactttttccccttaaattctcccactgtagtgatgatttcttaaagcttcaaaataactccagtggcacagaaatatctgtgagcaatacttacttatttctccagtaaactttccatctattcagctatctattacaagctgttggtcaaccccatgaaggcagaatattaacccccagtcatgcatggaccagatataccccctacaactgtgcatggaccagaaccttctggataaggactggctgtctggggaaggggcagctgtgggggaaggtatatggggtgatagggccatgaccttggcagcccataactgtgccccacctccaggtgcccctgggatggcaccttctttggtccattgaggctaccctctggttgttaaagatgtgagagcatcagatccagttcacagctctccatcacagaccccataatacctggggtgagaagaggccacccagtctttccatttttaaagcagttaatttcttaactttaaaaaaaaaatctttcttttttactctattatataaataggtgacataaagacagtttcttaccttgaagtgttggaagacctagaaccttcctttccccaccccagtcattttcctgaccttgatgtctccaatacagtgctcttgaactctagggtcacgtgctttaacctcttattttacattacagaggaggaaactgaggcctaaagaggggaaatgatttatccagtgtcatagtgttaggccacaccttctataccacagtgactatgtcctaactagtgacagctgcagtgtagggcttggtgcattcttacttggtacacctcgtctttaatcctgcggggtgaacattttcacctctcttatgcccaccttggggaaaagcaagaggtaacagatttacacaaggggatgtcgctagcaagtgagtggccagagtttgcacataggtccttacaaccccaatgcccatgctcccctccctatcatgcgacagacggcgagccaccgggatgctgccagccagggtcccaaagtggttgtccctgggccactccacctatccttgtctactccccacacctccctcaccttccaagttctagtctggaatctagccttggtcagcagagatgagaaaaaccactcaggtgaccccagtttctattcctgtgtcaagccagagatagaaattcacctgaaccacataccaaatgggcccctaggtcagctcatgattccccaatcaggcattgtcaccaaagccaccaaattccatgagagggagccagggggagttgaggagaaagtagcaatccatttttacactgaatttccagggcaaagagactctcagccacagttatttcccttagaagttcagttttgtcttgaccatttctaaagtctgctcagaacttggctagtagatgaccaaagccctgggctagttagccttgtgcatgtcccctcccaggaagcagagcacagggaagagtatagggcagtgactgagagtaaagagcatgggtcagtgattccacacttacaggacacagcatgggtcaggtactattctaagtactcttcacatagagtaattcaacaatgttactattactcatgaaataatgggggcatggaagggttagccaggtagttcatggtggcagtgccaggatttgacccaggcagtctggctgacagctcacgctcttaagcacggagctccttgcctggcacatgagtaactgaactattgcgagtcctctgggctgtgtggcagagagaatctggactggtccatctggggaatttttctcaaagctgccctcgtctggtcttgagaaatgaaacctacctttgtgacccccagttcttgcccaaggaggaattgtacatgcccccactggtgatcaaggtcatcgaccacaggcagtttgggcggaagcctgtcgtcggccagtgcaccatcgagcgcctggacygctttcgctgtgacccttatgcagggaaagaggacatcgtcccacagctcaaaggtaacatgcaaggctgtgcataagtctgggggcttttctttttttttttctttttttttttttttttgagacggagtctcgctctgtcgcccaggccggactgcggactgcagtggcgcaatctcggctcactgcaagctccgcttcccgggttcacgccattctcctgcctcagcctcccgagtagctgggactacaggcgcccgccaccgcgcccggctaattttttgtatttttagtagagacggggtttcaccttgttagccaggatggtctcgatctcctgacctcatgatccacccgcctcggcctcccaaagtgctgggattacaggcgtgagccaccgcgcccggccgtctggggrcttttcatgcatggctctgatttactctttacaaacctactcaaggtaagtcctggattcattgtctacattttacggatgagcaaactgcgtgagttgcggtgggttatggcactttcctaaggttctatcattcgtaagtggcagagctgggctggaatctcggccttgttttaggggtgggtggcatgctcgagggattcctctctgaagcgtcctgctcctgggtgaatgtaagacttcttttgaggaagtgttaagtgctcatgaatgttccctattcacctttcaacaagcagcttgcaaagcagggagagctgttcccacatcagtgatggggatgaagtcatttcctctgcctttcactgaatggttaggaagcactcactgactgccacgtgctgttctagatatctggggacagtggggaccaagaaaggcatgttcccctctcacaaagcaaaagtccagcagggaaggcaaacgaggaagtgtgcagttgcagtccagtgtgataaatatcttgatggggaaaacaggaagctccctgaccccatgaacactgagagaggaggagattttatttcagattgctttccacctgttggcctacctcattatcacatataattaatatgtaaatgatagagcagggcataatacttactttagatttccataataaataatagctagtgatacagcattttgcaattacccattcaatagttacttgcttttagcttaccatgtgctasggactgtgttaggggctgggggctacattgcatcagtgcaagagatcccagggcccctggcctcataaattagacaccgtgggagggctggaacagcctcattcggctgatccttggtggcttcaagactgaagcagatgtcttctatttaagcagctgtgtcactaactagttccattaaaactttcataagtgtkagtactgattttacagagcctctgaaattcatctgctgtgtaggtctgactaagcatcctggatccctgattcagagaagaggaaaaaaatccacagtcacatttaagcaaaactctacatgtgcttattaagaaatgtcccatataaaacattttatgctgaattgacggtgcctaaaatagcatttttgataacaacaaggattgttgtaattgcaggaattgtttcatttgaggttactaaatggagagaaaccactttcctggctttttttttcttactgttttcatgagagaaggttttttggtccaaatatgtgaaatcacccagagggtacaaatgctacacgctttctctggccccagaatcacttacgtggacctgtttgtgtctattgctcaggggtgggctgggtctaaggcagactgccctggctagcaattctatgtaatcaatgtagagtgtggtcaaggcttcagagagccccagaaaaggaaaatctggtcctttcataaaaccagtgataggttaagagttgagggcacttggatggcctcatgttggaagcacacagaataactttctcctcctgtcccttgggctttgtttccatgaggagggtgaagtggagaactgatcctctaggaaagaacttatgttcagttgtgttcctgtgaccctgccctctggttgtcttgttctgtactgttggacttgtcaggatctgcaggggagcttatcttggaagtgtagagactgcttacaggtctaggggtgccacgtggatctaaaactacctcacacagtaactgatatatcacagatgctcaggaaatgtcagtctcccctcctccccgctatccccctgatggttcctccaggctctggtgtggtggttaaaacacaagctttggagtcagccaaacctaggttacttactccccaacttaccactaattgtttcacctgaagcaagtgacttgcttgctgttagcttctgtttgttttaaaatttttaaaacagggataatggcacatattctacaggactattgaggtaytaagtgaggtcatgtaagtaaagtgtttagctcagtgcccagcacatggtgggtaccgaaaaaggtttgttgtttctcctcctttatgtcctgtatgtcaattgccagggtggttaarcagaaagttctgttggcttggcagagtttgttctgtctaggttctggccttctgttaaatgtcttcctgtttggtgcttcctcaataaatgggagatgtacctctcatcctacccccgccccagggtgaggctttggtatcccccacccctttagctgaatcaaatgtagtaagcccagggactactcctgagtccatgctctaacccccaaatcctgagtcacagatattctgggaattgtacataaagtcagggcatgtgtcttctccctctgcatacgctgttgagaataagggctgaataagccactgcaacctcaggcctgaaatatacaacaatccaccctgcttttcttttcctttcctttcccttctttttttttttttttttttttttttaatttaagttctgggatacatgtgcagaacgtgcaggtttgttacataggtatacacgtgccatgytggtttgctgcacccattaacctgttatctacattagatatttctccttcccytggcctctcacccctcctttcccttctttttcttatttttctcttctttattttctgtttcttaggaacaaacttcaagaaaagaagactcctttagatgtaggctctctgtatgttctcacttataagtaggagctaagctatgggaatacaaaggcatgcagagtggtacaatggacattggagactcagaagggggagggggataaaagactgcatactgggcacaatgkacactactcaggtgacaggtgcactacaatctcagaattcacaaccatataattcatccatgtaaccaaaaacctcttgtaccccaaaagctattgaaattaaaaaatgtcggttccccacttactcctgcaccctctaaagacatgtattgacacaattgttttttgagcactttctgtataggcactggactaattgtctaaaaacagtaatgaacatataatcccctagaaaatgtctaaaaccatattatgtttggggaaacgtgatggattgttggtttattttctacattcaggagttgtcctctctattctgtaagtcycatccaagaataaactctaccatccaycctatggctgttaaacttgaacttggagtagaatgttcaccactgtatttctctaagtatcttagattaagaaartatttgtcttgcagcctcccttctgtctgccccaccatgccgggacatcgttatcgaaatggaagacaccaaaccattactggcttctaaggtaggcttcagagctgatcagtggatgctgtcagttttatcttctatgcttagatgtctaagcatttggtgaattcagtcaaacaacagtttgttgcaattataatcatcagccaatccatttattgaggactgagtacagacaagagtctaaatcttgcacycatcaacagttatgatgacattgtgtagactagtagtcttcaaccctcactaataagtcacccagaatacttaaaataaaacccatgcccaggccccacctcccaagagggagagggayctagatatcagtatgtttttaaatctcctcaaatgattttaatatgctggcaggtctgagaaccacaggtgtggacagtctgagaaagatcatttgctagaaagcgaagtctgagaagcaaatttatagcattgcaacattcagatcagagataacatgcaacacgccagattcttccccctacataaagcagaattgtttgataaatttctaatgaccatatttatcagtgtatgggacacccaggtttttttattttcactgtggttttgaagtgaagaaattggttgaaataatcactcaaggccctattttagaactagctattccagccacttctacacgaaggaaagggggsaaaaagcctcagcccagaaaaaaggaaacaccaaatatctccctgtttctcttggcagttatgatgaacattcacagcgtgttttaatgtgcaaactagcccaaaaatgcacatgattgcactttaatatgttatgtccataaacagtgccttaaaaaaaaaatctacttccatcccactgcattaaactcactaacaactggaccatataaaatatagtctccacagccagcactgtgcagcagtgtgtttgattctactctctgtgaatcctacacagtcacaaacgacaatatcaaatttccaatctcatgggccaaaactactgtgatcactttgtaaaccaccccaaatatccctaataagatagtagtagccttggcagaagttaatatacttaagatcttttctgtagatttttacaactgctctagaaaaagacagtttaagatctcgctgtataatctgcctccaggtttgccatctctcatcgtcagtcaattcttattacatgccttcagtgtactcagtagccctaagaacaactgaggaacaggagaagaataaagtcaacaagctatgccagtattttcgttcacttyttaaccatagttaagaaatgtgactatgttactgtagcaacactttatgaaagttcagtttacatcatagagttaaacattgcaacatagcaggattggtgatggtagtatcagtcattcccactgtattgtaaattgctttaatcagcycgctctcctaacatctaaytgaggtacactgtgttgataagaaaggctggttgaaatctctaaaaatctgagtccacttgttcatcacagtagacatcgcacatctgtacaaagtcaaatgaacaaagttgcactttgaaagagccaataacaagcttgctgatgtcctgtattacatgtatatgtaatgtacatgtaatgygcatgtattaccacttcctcaattcaggccttgtatctgggtaaatggagggaatgcctcaaaaatmactatgctgttgctgggggctggaggctgtgtctctgagtgacagtgtcacactccggaaactcatggcattactctgtgatgtccatggaaattcttaacaaatgggctgagcactatcacaagaaaagtgagaaataagtcttcggggaaaattggtcaagtgctagccagataacatggacatgtgtacatggccatctcaacaattaccttccaattccagtgcttaagcagtatgtcaacagcactcagcaaaatggcttctccagcgacagtgcatgtatgtatgataagcaaatgcatgaggctgcctgggactgtgggaccttggcctaaagacttgaattattcttacaactctttccattagtagattttggagtgaaaagtgatctttaaacaaacgtgattgttttaagcctaaaagaagaatcttctgtgccatttaatgatttgattcccattgcaartttattattagatataataaagcaagtcacatcagttgcttccrtaacctttccacatgaactaatgatcatgtaggcatgaataaattctcccatactaattctaaagtttaaaatcagcaacttgtcttaaataatgccttttaggccrggcacagtggcttacgmctgtaatcccagcactttgggaggctgaggcaggtggatcacctgaggtcaggagtttgcgaccagcctggccaacatggtgaaaccccgtctctactaaaaatacaaaaaattagcyaggtgtggtggcaggcgcctgtaatcccagctactcgggaggctgaggcaggagaatcgcttgaacctgggaggcggaggttgcagggagccgagatcatgccattgcactctagcctgagcaacaagagcaaaacttagtctgaaaaaaaaaaaagccttttaaatcatgaactattattttccttgaaatggtttgaattgtgaacaaacagattctaaaaatctgatctcaggaaccattgagaatgtaagagtactttggaaataaaatcactctctccaaaatctcaattcagctgtgatgatttaacccttaatcttgctttggtatgaatctaatagaaagaattgatatatctatctgtccctctgcctctcttggcaattgcattgtgctgaacaaaaatcaatctggaaaataccaaggggcacctacggaagcagctccatggcctctcacatggcaaccggaggaagagcccttcaggatgaacataaagttaggatctcagaaaggggtctaggcagcatgtcttcaaactgctgctgaggacgagcttggctaatgctctaacagataccagaaccacattcaagccccccttcccagttcttcattctctcatctcctggatgggccctcagattggggtgggttctccattaaaaaaaatcacatgaaaggatttggccaatggaaacttgacatcctcataataaagcagttttgatggatgagtatttatttggtgctgtaacataggcrtggctggggggtacctgtatgataacattgcagtcaaacatatcttgtgacaggacagttttttgtggggaggagaattagaccaagttcggagatatatttwaggaactaaaasgaacgtaagatctggggtagggggatgagcagctccacaccctgctcctgtgtgagctgtgygctcccgactgggaaatgtctaactccatcgaaaacatgagatgaggggcagggaaggggctacttccaagcctttcattataatactgtgtgtaaccttttgcatattttcagaaaagaaaccagtaaggtgggttcagttgtgggctcatcctgacttagaaaattttaaataatttagcccattgaaatgttgataatataaggcatgcatgaataataatttttgcttctttctctttaaacttcatgttcctggggtctccatatctatgtgacctgttatatggtttgccctcttcctcacgggacatgtgcacgagcagctgacagaaaaggtaactatggtatacattttgctacatttaagattcatgtattttctgcccagaattttttttttctttttttgagaaggagtctcggtctttcacccaggctggagtgcagtggcgcgatcttggctcactgcaggctccgccccccggggttcacgccattctcctgcctcagcctcccgcgtagctggaactacaggcgcccaccacctcgcccggctaattttttgtatttttagtagagacggggtttcaccatgttagccaggatggtctcgatctcctgacctcgtgatccacccgcctcagcctcccaaagtgctgtgattacaggcgtgagccactgcgcccagcctgggaataatttttttctaaatctaggggggccgggcacagtggctcacgcctataatcccagcactttgggaggctgaagcaggcagatcacttgaggccaggagttcgagatcagcctggccaacatgcaaaaccctgtctctactaaaaatacaaacattcaccaggcgtggtggtgagtgcttgtaatcccagattttcgggaggctgaggcacgagaatcacttgaacctgggaggtggaggttgcaatgcagtgagctgagattgcaccactgtactccagcctgggcaacagagcgagactctgtcaaaatttaaaaaaagaactaaatccatgtgtaggttgctgacccataaaggggaagtaattctgtgtaagtatgtgtaacacacacgcattcacacacacacacacacacacacaaataagaagcatataatgtaacatataatataacatgaataaaaagtagccttttaaggccgggagtggtggctcacgcctgtaatcccagcactttgggaggctgaggtgagcggatcatgaggtcaggagttcgagaccagcctggccaatatggtgaaaccccatctctactaaaaatacaaaaagtagcctcgtatggtggcacatgcctgtagtgccagctactcgggaggctgaggcaggagaatcgcttgaagccagaaggcagaggttgcagtgagctgagatcatgacactgcactccagctgggcaacagagtgagactccgtctcaaaaaaaaaaaaaaaaaagtggtagcctttcttgtcccttcttcctttcccccaagaggctctactgcaggtgacattctgtgtttttttgtttgtttttttttttggcgttattatttccaaggtaggttaaaataagcaaagrgggggtctgataagaatctattcttgttataaatctgagtgggaggccttctatagtttgacaatattccacaagtgactctgacatgctgtcccttctgcccaaccaaggactacccattcaaaccagagattcccaacactgtctacrtattggactctcctggggaacttctgaaagcttattggatgccctggtctcaccccagactgattgcatctcctaggataggttgggagccctggtctaactgaaccatgatgcctcctgcctttcgtttcacgttttataattttcaaagctctttctcctaaagatcccatatgatttccagaacaacttttggaggtacatggaggcaggtagatgaaggcagcatgtgaatgctttgtccattgtgttattattgcattcagtggatgaagaaattgatgctcagagatgttaaacaacttgcccaagccagtacagcttgaaacataagggtatggcttataacrtaaaggaaggaacttgaattaaaaccagtttttccaatttttagctagtgagtattgtattacaaggcattactggctaaaagggctaagaaaatgagatagtagaaaacacatattggaggttttctttaaatttatatgtatatgtaaatatgaagtcaayagaataaaaatgtaaaaaccaacaaattaatagactgtgtgtaaaagacataagaacattatctagtatgattgtgggcattaaagccaaacacatttcatcggcccagaatggccatttcacctctagcttctgagtaggagagtcgtgaatgctttgtccattgtgcatgtaaacaaaagtcatataatctcacttttaacagkgtcagaagaacctatttcttcttaactattacaaatgcattttcctgcatcgattggaaatccaggacatcactaaagatttttccattttggcatgtctttaggaggaagaaatcgtggactggtggagtaaattttatgcytcctcaggggaacatgaaaaatgcggacagtatattcagaaaggctattccaagctcaaggtacctggatctatgctgctatgggtggagaatcracatcctttgaaactggccacaggcagagctaagaggatgactaaaaggtcccttgggtgggtgctaatgagcagggcccaggaaaacctctgtcttcccggagagccctcttgcatgagtttcggctttgccaagattccagggacttgaggacagctattgagttatggttacgtgactgccacattggggcttggaggcatctggcagatggttgggaatgggctggcaccacactaattaggccacgatgatccagtttgactcagggaaacccagaagtcatagtgctctttgcagaatgacacaagatgtcaacatgctttgttgtgtactttgaacagggwttggtttcacaagctgaaaagttgaatctgtcacatgtatgcagcataaaatcacagccgtgagaacatgtatacagcaggaagacaagcgactgagctaggcacggctgactagctctgagctttctgttcatgttwtgaattttctaattcttcattcaattttcagcctgtagtgtcctcaagcagaagcagwgctaaagttttcagaacagtgtatatgagaaaaaaaaactttagaatgagaaatatctggtcattgaaataattttccccatcaaagcaaaaaaaaaaaaaacccacaccttttcatgttattgtcataacytctcagtgtagcttaagaaatactagcatataaaggaccattcattcagaaaaatgatccaatgaggctgaaggatcagcctcacactccatcctccctcactccctcttcccttcctgcctgccttcttttcctcctgcctgcctgtcttcctacctttctttccttccttccttcctttccttcccttccttcctttcttctctttccttcctttcttctctttccttcctttctttccttcttccttccttcttttcttcctgccttccctcccttcttcctccctcctacctgcctcccttccttcttccttttctcctgccttcttccttccttctcctccttcatcctcttcccttcttgctttttaaaytgagaaatattttacatacgataaagtgatccattcaacaagttgtgattattgtatataccctatgtgaaccaccacccaaaacaagacagaacattcccattcccacagaaaacttccccgtgtccctttccagtcaattttccactatcctcatccctcctaggagcaactgattggatttctctcaccacaaactgattttgcctgattttacacttgctctaaatggacttgtatgatttatgttttgtgtgtctggccttttatccccacgttgtagttttgagactcatcatgtggttgtgtgtattcatagtttttcccttgtcattgctgagtagtattccattgtgtggatatgccacaagttatttttccattctcctgataatgaagctgctgtgaacattcttctaccatgtgtacgtgttttcacttgtcatcagtaaatgcctaggaatgcaatctctagatcatagaataggtggctacttaactccaaaagaaactaccagacattttccaaagtggttgtatctgtctacactcccgccagcgatttgggagttccggtcgccccatccacaacctcaggcccacttgatactgtcagcccttttgattttagaccttacctgcattttaatgagaaattaagactctgttggtggttttcagatatataattgtgaactagaaaatgtagcagaatttgagggcctgacagacttctcagatacgttcaagttgtaccgaggcaagtcggatgaaaatgaagatccttctgtggttggagagtttaaggtgagtaagatgtgtgttggtcccgtttaaaatccaccttcattttctatataggcctagaataaaggacaaccaggstctagggaggggcacatcctgcagcctctgagggatgctggcattttctatataggcctaggataaaggacaaccagggtctaggtaggggcacatcctgcagcctctgagggatgctggaaggtgccagaaaggaaaagggggaggggggccagagcactcgagccatctccgcatctcttcctgcctccctgctcacgccaagcagccttgactgagccatctccgcatctcttcctgcctccctgctcacgccaagcagccttgaatcctaagatacagtctctccaagatctagttcctctcttcatcctactgcccctaccatgctttcagcaggatcatcgtgacaacttctcacttgacagtccttgtcacctttctcgtcacactcctctccagcctccatgcaaccaaatctgatcttctctctggactactgaaaggctttgcttgggttttcacagtcaagtcgcaactcctttcaaaggcagagccagtctttcccaagctacatggtcccctgcctccctccccctcacacactccaccctcctgcctgggagagcctcgcccaagccccggacacaccttgtcctctcaataagtcggaggcttgggacaggctcttcttccttccctgggtgccctttctacctgctttgtggtctgacgaagtcctactcattcttttaagcgccagctcaaatgtcactctctttgtcaagtgttccctgattgcttcgggcagcgtgactcactcctgctctgggctcccacaggtctgggttcatgcctccatgaaagcatcttacacatggaaagtatctgctttataattgcccctccctgcaaccacgcttggcaaagtcatggcagatgtgctgctgctgctttataatcctttgcctgtagcagacattgctaagggacgagaggatgatgcctgatgtgtggtctcaaatccttctcagtacagcctcccaccaagcaatcacatatggcacaagagccaaccctactgaacatcgctgtgccagacgggagtctttgagttcttttgtgggtccctagtacctggcacatagtaggtgcttattccatgctgcttgactgaataaagaccactggaactaagacctgtatgttctgaatccggcttcagtgctttctcctggttttaaggcaaaatatgtggcctctccagcaggtcttgttggctcgctccttcaaaawacaatttttgtggcgttactatatgcctagtcctgtgttaggccctggagatagggtgatgaacaagactttatgctcccctcacccgtctctagaagcccacagtctaatgaaggatctagagaataaatagattatctcaatgcagaggccagtgctgtgccaggggtgagtatggggttggatgagagcacccagaggacataccaagcccaggagcagtcagggaggtttcctggaggaagtgacacctttcagctgagatttgaaagataaacaggagtttgcctgggagtgggaggtggagtacagaggtgctacaggaaaagcggaatcactgttggtatttcgttgggtttaaaatgtaattattgttattcctatcttcaaagaatgtgcagtatttcactctttctcaccaccacctcctccatcacactggcccatgttctcctcttgactcccartttctgctctgccctctcttctcccctgtgagctctcaaataattacttgagaatcatttcactttccctactggaaatatgcaaagtgcaatatacattatttctttcacaaaaggcagccttccatccttcaatcccacacccctggcggaggaggggacttcccaggagccctctacctgggccacccagggccctgtgagtccttctgtctctctcttttagggctcctttcggatctaccctctgccggatgaccccagcrtgccagcccctcccagacagtttcgggaattacctgacagcgtcccacaggaatgcacggttaggatttacattgttcgaggcttagagctccagccccaggacaacaatggcctggtaagagtttgggtgtggggccttctcctgtagcaakataattacagtcatcagccacaataattgtcatgttctttctttctgggcrtctgttatctcactaggggaaagatactccatcaaaacaatgtattcaggaggattgtccccatggggatttatctaagagcttgcggggrgcttaaggtcccctggttcatccttctcattttacaggtgtgagccaggactcccccccgccccctgccaccacccctgcacccacacaactggctgcatgccacccaaaggagagcattgctcccttgtcttaggcacrgggtgccatggcggccaccttgtcatcagctgggagtgggtgtggaggcgagctgagtctgtccctgaacttgacttcaccttgcgccctacaatgatgtaacatcccgtctattttgtcccacagtgtgacccttacataaaaataacactgggcaaaaaagtcattgaagaccgagatcactacattcccaacactctcaacccagtctttggcaggtaatatacattcttaaatgtttttctggccttcatttctccacggaacatgcatgaagactctaatatgtgtccaaccctgtcctaggctctgaaactgtgtttgtgaactagataaacattctagacaggggagcaggtaataaatagataaacccaaaataaaagaacttcacagaagtgaagaagcttggttctgatagcttgcagggtagacagacagcattagtactagtgttataggagcacaggccagttggagtttttccggggacccccctcccacctggctgtctgcggagctgtttatataaaacatctcaaaaaaatctcgcaactctgaggtgctattattattcctattttatttttttttaagacagagtcttgctgtcacccatgctggagtgcagtggcgtgatctcggctcactgcaagctccgcctcctgggttcacgccattctcctgcctcagcctcccgagtagctgggactacaggcaactgccaccacgcccggctaattttttttgtatttttagtagagacggggtttcaccgtgttagccagggtggtctcaatctcctgaccttgtgatctgcccgcctcgccctcccaaagtgctgggattacaggcgtgagccaccgcgacaggctgagactcagtgtttaatgtacttagcttttaagagaagagtgagggccaggcacgatggctcacacctgtaatcccagcacttagggaggccgaggttggtggatcacaaagtcagaagttcgagaccagcctggctaacctggtgaaaccccatctctacaaaataacaaaaattagctaggcatggtggtgtgtacctgtaatcccagctactcaggaggctgaggctggagaattgcttgaacctgggaggtggaggttgcagtgagctgagatcgcgccattgcactccagcctgggcgacagagcaagactccgtctcccaaaaaaaaaaaaaataaaagaatgaggatttgaactcagaccatctgaccccagtgtctgtgtggcacgccacggtctgatttccatctccatgtcaaacttattagctgctcagggcrgggattaccaacccgactgtacaggtgcagaaaacagggctcccagagctctattaatagaggtggggtaagtgatagagccgagatttagctagaaattctgctgactccaagccccatgcttttccaaccgccttggtgatgtttcacatttgtggcaaagccatcacctgtagaaaaatgttctctgtctgagacatttgtgaaaatgatgttttgttctcagaaccttgctgagtgagagaatactgtgttcttatttgctgcgtggcatatatttttatttctggctttattatcttgcccatatgcttctttccttctcgggtttgttggtttgtagccttacgtattctttctctgtcatgtgtcacacacacatacatgcacacacctgcccaycccccaccccccctacgccccccgcatgctgcacacccaaggccatgcacccgggccagggaatggaagtaatcctctggcaccgcaatatgatcgttttccttttcttccactgatccagccccgaggtctagacaggaaaaggcacgcagggcaggaaggagggctcccgtgagggagacagggaagcagggaaagccagctttgaagggagaaaggcaaccctgtctgaattgctcgtctcagaggagccaggcacaagcttaattaagtggcaggaaaagtcttgctcggaggcaccctggaaggaaggggtgctgtaggctctgctcggccaatcgctgtctggcggatgggcagacttcccctcatccagcagggtggagccaaggagatgccggctctgcagcccccagatggctccagtccatggcctcagtcttagggggtagcyttcttctccgcagagactcttggggactctggaacaggaattcaggaaggaacaacctttcctatgtgcgtggccgttactcagagtcctatccatcatggcagatcaccttcaaaagaatatcggtgtcttccacaggatattaattgatgttccaagaaaaaaaaatattccttagtaaaaccaagacacttgggtttaaaagttataattgcaggacttctcagaacctttagtttgtccagaagaactgcaaaagaagtggttctcaaccttatttgactgaagaattctttccagagaccacatatgatttgcttcttggaagttgggattggaaatgtgatgtttgggggcacatgtgggtaaggtgcttcatgtgtcatgactcaagcaccttttctcacatctgttttctgctcaaatggatcaacattcctggctctttgggcagggaccagtccacacaccagagtgcaaggagaaggggaggaggcagagaggaggcctctcacagcttctccttcaatagaacatattgagcaccttctccgggactgtccctctgtggatagtgcagatacagagcccaaagcccaccctctagcatacatcgcccacccaccacagaagcactgtctgactctttctcttcatctcaggagtgtttgcattttcatatgggttctatagaaaagccttaaagaactggagccaagggcatacccagtgggtctgggagaagaggggagcctttggggcaccctacatatcacaccctatggtgaatcacactcactcccctcccctgtgcttctgtggggtgagtcaaagatgttccatggggcagtggtctctattgaggcagaggagggaacctaggaggggcacaggtagggggctataagtcagggtacttgtgccttactcatctctgagctgggtggaggtgctctggtgaacagctaatgggcatgtgatgataaagttaataatataatacatcattattattatactggcattggagcgatgcactcatgtcagatgctctctaaatatttcttcacttgacacttatagcgacactgatgggagggattaytatcaccactttacagatgagaaaacttagcacagagaagtaactggtctagagtcccacagctggtaagcagcagaggtaggatttgaagctaggcatttaaagcccacaggtttccctgagcaagcatatgttctcttcttgttcttatttctrgtatgtactatttatcaagccacccaccaccacccaccctggttatcctgctcagatgtcctccagcagccatactacacacagcctgggaattctgtgcacagagccccagtttttgtgaggtactcagatggatcatgaagattctgaccttgcatttgtttatttaggatgtacgaactgagctgctacttacctcaagaaaaagacctgaaaatttctgtctatgattatgacacctttacccgggatgaaaaagtaggagaaacaattattgatctggaaaaccgattcctttcccgctttgggtcccactgcggcataccagaggagtactgtgtgtaagttgctttgactgtacaagaggcactttgctgcctctgacattggcacctggggaggcctaggccctctaccttagtgccttccttcactgagccactgctcctrtcactcagtyaggtatggatttcaatcgcaggattattctagggaatctccgggccacctcatggcccctattcacatcacagtgtgtgtaaaatggtggcagctggagcagtgctgtgcgctggggaatggcacagttagcagcccagagaccagttcccttgctccccgtcattgagcccctcctggatgtcaaggactgaggactggcaacgtttgatagcagggatttcctgtccttgggaaatagggattctttgtgccctctacttaattttgtgactccctcttcccctgcctggyatacagtgtctttccacagtatctgattaagacatagcttgcaatttctagtttatgagtttgcctattatgactagagtgatctcaactcctcacttttatggaggaggaaactgagggctaaataatattaaataaataaatacatttgtttctctgaggccaaaatagcatatgggtttttaggactctgaaatagatttctaggccaaagtcagagtgtagcgcagattttctgsacccactatatgggascacctaagagtacatgagcatgtatgtgtgaatctgagaagaacctgcaggctcctccgtaactccgagccacgtgatgctattcacagttctggagtcaatacstggcgagatcaactgagaccaacacagctgcttcaaaatgtcgccagattcaaaggcttcccacaacccatcctttccgaagatgggagtagaatcagatatgsaggacgagactacagcttggatgaatttggtgagcacctagctgtggattgtaaactggtacaaagtatagtaacccatatatattgctgggtttgggggagtgaatagacagagccagtaccctaattataccacatgagactgtgcacgtgacactaacaacagccacgtcagagttctgctgtcttgtcaagtgtcaaagtggacacattttcttgtctgctgtttcacttgccctttttagattatagccattagagctttatacaaagtactagtaatgaactaatttccatgtaatgcataattagctaaaaaaatgcccatacagtagtgcaggaatttcccttccrggtttatcccatcakttgttctgtcccttctcccagaagcttcagggatgytatggttggcttgaagagcctgctatgttcccatttggctcatgttcaagcttggggtcttgctctttcccaaccagcaatttataatccgacctgtcctgacgcatcaacagctagctacactatgacaaagactgcagtaagcatcatagagcatgcgaactgtgcttccatattttgcacgggggagggttacccagagggggcggtggcaagggcatgggatatccaggrggagctgaacaaacgtgcacaggaagaaaagtgctttctgctcctcagcttgattcgtgacattgtaaaaaacgatgttttgaggccgggcacagtggctcacacctgtaatctcagcactttgggaggtcgagtygggtggatcatttgaggtcaggagttcaagaccagcctgaccaacatggtgaaagcccaactctactaaaaatacaaaaacaaacaaacagaagagccgggtgtggtggcatgcacctgtaatcccagctactcaggaggctgaagcatgagaatcgcttgaacccaggaggcagaggttgcagtgagctgagatcgtgcctctgtaccccagcctgggcgacagagtgagatcctgtctcaaaaaacaaacaaacaaaaaaacttatgttttgtctttccattttaaagaggacttggtatcagggatgattagatgtttaagaaatgttgatgctgcttctaacatgtgaacttgcaaacaggattggaaataaattgggaagcatcatggtctaatggttaagggtacccccaaacaatcaaacaactcccccgtcatggggattgttccagttactattgatatataacagatcaccccaaacttagtaactgaaaacaaccattttgttttcctcacagttttgcggggtcaggaattcaggacgggctcaggtgaacagttctggccgaggctggccatgagcttgtgccacaagagtatatacagaatgctcccacttaccggatctggagttctggtccctttgctattggcagtccacaagttaggtttgagcctgggtggctcatctcctgtggttgcagtcagatgttggctgaggctgcagtcatctgaaagccctgctcgggggagcagtcaggtggtccacacacacagctggcagttgtgttggctctcggctggggctgatgaccagagcacctacacaggcctttccagcagggsagactgcagacccaggctccttacatgtggatggtgtcccccagagtgagggtccccagaaaaccaggcaggagctgtgtggccttttgtgtctaagccttggagtcacacagcatcttttctccatactccagtgtttgactacgtctccagattcaaagggaaatgacacagaccccacctcttcatgggagaagtgtcaagagaatctggggcctatgtttttagaatatcacagtggtggccagatacagtggctcacacctgtaatcccagcactttgggaggccgaggagggcagatcgcctgagcccaggagttcgacaccagcctggccaacatagtgaaaccctctctctactaaaaatacaaaaatyagctgcgtgtggtggcacatgcctgtaatcccagctactcgggaggctgaggcacgagaatcgcttgaacccaggaggcaggggttgcagtgagccgagatcacgccattgcactccagcctggatgacagagcgagactgtctcaaaaaacatacaaaaaacccagaataccagtgatgcyagctgctgtaaaaactgaacctccaaatttccgtgttctaacacaaaaaaagtttatttctcattgattctaagtaggtattcctccaggtgggtagctgtcttccaagcagtgctccatgaacccaggtccctgccgtcttctagctctgcagttcttaagtgcaggagtctgaggctgctgttcctttttgcagccagaagaaaaaggcacatagagactcctacccaggagggatttatgggccaggtccggaggagatacacatgtcacttctacccatgttaccctctggctgaacttggtcacatggcctcctctaactgcaagggaggctgagaaacaggcaggccatgagctcgtgccacagaagtaaatatataacgctcccacttacccgttctggtgtcctggcccctttactattggcagtccacaagttaggcttgagcctggttgggacagggctcctggtcagaagctctttctgtcaactcttccttcacaagtcaaagtttgcatgttggcactgcctgtccattttggcaaagtctgggatgaagtgctggaagcagctctaggcaatctggctgaactattcccaaatactcattcctgcttcaatgctgctttccattgcagaagccaacaaaatcctgcaccagcacctcggggcccctgaagagcggcttgctcttcacatcctcaggactcaggggctggtccctgagcacgtggaaacaaggactttgcacagcaccttccagcccracatttcccaggtaaagggccttccctcccttgaagaccattatccctgccccaaatgcaatggcagtagttgacatttttgcgccttttatcttctttgaatactttgagatgcacagaaatagaaatgagactcaaattagcgtcatatcaaaagggaatttttttgtaagaattttcaggtaactctctaaatctagataggagattggccatgactcagaacaaaccagaaccagggtctctctgtgtctcatctgtttctctgagtctrtttcatctgccctcttgctgtgatcaccttcctatgagtccagatattacagagagtccttgagtgcttgtgtgttgtaatgcagccccatctacttctaaatgcatagggatttgttgcccaaacttggctcctttgcccaccatgggaccactgagctccagcgaggtgggcagggtctgggaaagtgattgagctcggcccrgttcaggaggtgccatctgagactacagtatcagggaggcgaggaccatgtggatagcaatgggggacattccactccagaagatggagagcagtttccacagaagcaaagcaagacatggccactgacaaaataatctatgtggaagcttgttataatgaagatgtccaggccatgtctgcagagatttggatccagtaggtctagggtgggtccaggaatctgaattttaacaagtacctgaagaggttctgatcacactttaagaaatattaatctaggccgggtgcrgtggctyatgcctataatcccaacactttgggaggtcgagrcaggtggatcacgaagtcaggagttcgagaccagcctggccaagatggtgaaaccctgtctctactaaaaatacaaaaattagctgggcgcggtggtgggtgcctgtaaccccagctactcgggaggctgaggcaggagaatcacttgaaccagggaggtggaggttgcagtgagtcgtgatcccaccactgcactctagcctgggtgacagagccagactctgtctcacaaaaaaaaagaaaaaaagaaatattaatctaatggatgcaaatattgttgaccctgacagcaaaactatggacacgctgattgcaaaagggttggcctgggctttctaggttgttttgtcacttccttcttgcttttattttgttctacatttccatttcttccttttcttactcttcctttcaccaaagaacttattcctccttctttctctcctctcaccccttagccatatgaggagtttcaagaaatgacagagtgaggaagatttctccccgggaatccacaaacccccatcacttctgcctccagcattagccacagactgtggctgggtttggggagacactggacgcctaatattctgtagagtgcttgatgaattgtagagccctgagccctagagattagttgcaggagagtcaggatcatagtaaaatacatccttttcaagagctccacttaatgtattttgatcacaatgcattaggaagccaatctagtggtttccttggcaactttcttgaagatcagtttgtttttgtctgaagacagagtctacagaacactcaaaaacagtttgaagaatataaattggtttgtacggttgatatagttttttcgtggcattcctgacctgtctggaagaacattcgagtcagatggatgggccaagtctgtgtcagtcaaagagctgagcaggacctcaccaagatggagcacaaatgtcagtctaggctttcacctccccttcctgctagccacttacctggtggtgggcactaatgaaccaatggccaggaatccttaccttttgggaactgtaatrttatcattgtttgagctcctcttttgaaaatgccatgttgtttttcttttacaaaattaaataccattttcactaattgcattcattactttgattttatattttgaggtaagtagagaaacccttgggtatggcaaaatggggattggtgtcaggtgggcaatgtgatggatagaatgacagcctgagaactgctaaaggcgaaggacccaattttaagtcattgtaagaggggggatgtgcgcgcacgcgcgtgtgtgtgtgtgtgcacgtgcgtgtgcctgcctgtgggatgtgtatgttggggttgggttagtgatgggaagtctgcagttttattaaccaggcgagacccagactatgatacaggtgggcatgtgcagccrtcagagacccctgagtgagaatggaaagtgggtggcctaaatgacattgtacataaaagattaaccttggtttgctctcttccacttcttgccttccatgtggactaataaattagagagaccaaagaaatagtttcatctaagaaatatgaaagaaaattgtgacttctgctacccatcatataacttcagtcctcttttcattttcaaatggtttagggaaaacttcagatgtgggtggatgttttccccaagagtttggggccaccaggccctcctttcaacatcacaccccngaaagccaagaagtaagtcagtcatcctgagaccctgatacatacactgggctggggacttggtccaggaccagaaaaaaaagtaccttccaactgtgcttcttgcagatactacctgcgtgtgatcatctggaacaccaaggaygttatcttggaygagaaaagcatcacaggagaggaaatgagtgacatctacgtcaaagggtraggttagcatgtgagagactttgccaagctcagsgaaacagactctctccttcgtgagttttcattactgaatatgcccaagataggattcttggttttttgaggttattttatctcattaatgtgatctacttaggtagctcctggaaagcaaaggagagagagcaagacctgtacagactttgtttatgaggaaagctatataaggattataagaactgataaatatttctttgtttcctttttgacaaaatggattttcttcagtttcttaagcagatgtattatttctgggacgttttagccatgtagtttctttttattcctctttgataccctgaataactagccttagaaacacaagtaaagctcccaaaatttcattttctacatattttattaccagcagcccatgtctatggaaaagaggaaatgttcgcagatttcaaaggaagtaatttattctcccaacctgcactgagtgccagcatccaacatgtcaagtgtcattgttgttcaatattctcttacttgcctaattcaattaaatcgtctctgtggatggctatgccttgatcatatgcctcgatcatagatgttgcgtgcagtacagcatagcgactacattctggtgctttccctactgtctgggcaaggtagttagctcgctgttcctcatctgtaaaatggtgataatgattattcttccttcccagggatattcaggtgatccagttatccaaagcatttaggacagtgcctggcacatagtattgttgctattccacgtggactgagtttgattccttgayacatgaaagataagacttgcgacatttaatatattcataaagtgagaacaaagtttcacctataatcccatgtggccttcaatcaaaactttgttaaagatataattagtatcatttaggttcactataaacagggaatgtttcatcaagttcttcattattatttttggatctcattaccattctctagggaaactaatctcagctaattatatatatgcaaatttatttgactatcataagcattattttttttttttcaaatcagggaaacaaactcaagtaattctgaacggagagaaaactcctctaatcagagaataaagctcaacttaaagtaccttgcaaaatttggaataaaaatctaaatacgacatgtgaaaagatgaatcgtgcataaataccatgcctagtgctagacacagctgggtattatattacataccaagctatacatatacatacatgcacacaaatacgtatacctataggagctgtttgacttgtcttaaagtatgaaaagatttatgtttaaaattaaatgtgaaaattcaccaaaaaaagagaggaagagctgtaagggtgagcagtctagggtaggatgatggtgacccttaggggtgggtcaggaggtgaggccaccaaggtcatggccaagagaatgtgaactctcctcagtgagttaccttaaaagttaatagtcaaaactgggcatggtggcttacgcctgcagtctcagctactcagaagtctgaggcaggaggatcacttgagccccgtagtttgaagtccaggctgggcagcatagtgagaacctggctcttgtaaaaaaaaaaaaaaaaaaaaaaaggttaatagtcaaaaggaatctttcaactcatttatctagtcagttaattgactagcaaaaaggaaaactactgcagttgattggtattaataccactactaatagtaggacttaatattttcaagtgactttgcaatctctgtggttctttgaggcagagtaacagatgtggacttcgcaatcagactgacctgggaatcctacttagttctgtcagttctgggctatgtgaccttgtgcaagttaatatattctctctgaacctcagtttcctcttccacaaaatggagatagttacgcagttgttgggaagaataaaataatgcatgtaaagtacctggttcatagaagatgataactgtgtgttaaaggtacctccattcccactctgcccctgctaaaccataatcttttcwgtctgygtgtcgaccatgtgaagggcgcacatatcattaatcttattttacagatgcgagatgaggctcagagagtttttccagccaggcctgcctcctaccatgaatctctatctatctgtggggtccaggcatcaatatttttaaaacgtccccagtcgattctaatgtgattctaatgtgcagtttcgagaaaaccatgcgctctctattgctttgacagtgtaaaatcgaatgttaccccctggtttcaaactagaagtcttcccagtagcaacaacttctttctgggcacactcattcattcattcattccttcagtaggtatttatctagtgtctactatgtgccaggcacaagcagaagaaaacttctcaaacgttaaaagttaagatgttactgaaatgaatgctcatagatatgcatgtggaaataagagctgacatcttccttgccggtatcattaatattatcatagtgaatttaagaataatttataaaaaggaagctgtaagattacttgatttgtgcttctttggtttgcttaagtaaaatatgggaaaggaaatgctaaaattttgagctaactcatattcatttaacctatcagcagtgctgaaagacactgatgagttatagttgtgaggactaaagtcatagccagcaggcttcattgtacccaaaatagaagctacattgttgatattttccagaaaatttcaccttagccctgttaactgaagtctaaagggtttcctgctttggttttaggggaatgatattttatttggccacaacctgtgttggatgcaatagagcacctcccctccataaatcacccccagctccgaagataactggaatctgcccaagaaaagtgcattaattctcctgctctttgctcccctaattactgcacaattttgcggctacatgacttgtcaatcacgtgaagctaagtctgtttgcctctgcctttcagctggattcctggcaatgaagaaaacaaacagaaaacagatgtccattacagatctttggatggtgaagggaattttaactggcgatttgttttcccgtttgactaccttccagccgaacaactctgtatcgttgcgaaaaaagtgagctctgaaatatgccgctgggaagtgggtatcatggatcttccttaactcagaagctcatagaatgctggagctgctcaggatctcggaggtcactgagtccggctccttctcagcagagatggggaatctgccaccttgacacttgtccaaggtcacactgctaggacaggtatttgtgtcattaggaagcatgaggagcacaactttctttcccctcacatactcacatactggtggcgaaggataaagggtagaagtaacggttttgtattagtataaacaacaacccaagtgtgttctttatgtgatggggagactgatgtcttcccatgctaggcagagtcaagcagaggcccagtattaaagtgggtatccttccttatcaaacttccacatctgctttacctccctcagaggcactgccatgagggctcagggccctcctggtcttaactagttagactttcagttacagaactcaactcaaactggctgacaccagaaaaacgatgtattggttcacattaccaaaaagtccaggcttctgctggctttaagcccgtctggatcccacagtgaagtgataatgactttagaaattggtttcaccctccacactcttccccaggagacagtggcagcctcagctcacatcctgtcctccccgcaaacctcagcagaaagagaagagcgaagccctcatggggccaaccagagttctgtaattgggcctcaatgtctctgcttttgggggtcatgtgcctatccctgaaccaaccattgttgcccagggatgctctgattgtccaggctctagagttagtgacagaggcagcttctctaaaayttggggaaaaggggagtccgctaaggaaaatctgggtgctttcattccaaaaaagggggcctagaacctgcatagtcaataacaacagatgtcttctataggtgccctgttccattcctgcctccacattctgtcagcttcctcctctccccacacctgatcagaatgtaccagccaccagccctgtgtcgcattaggcctaccctctgctggccctactcagtgctaatgctgtagtaagcactattttttgtttttttgagacagagtttcactgttgttgcccaggctggagtgcaatggtgcaatctcagctcaccacracctctgcctcctggattcaagctattctcctgcctcagcctcccaagtagctgggattacaggcatgtaccatcacgcccagctaattttgtacttttagtagagacggggtttctccgtgttggtcaggctggtcttgaactcctgacctcaggtgatccacccacctcggccccgcaaagtgctgggattataggtatgagccaccgtgcccagccagcactgttttaataccagtgggatgaacgccttcaaaggggacttttttctttttgagatagggtctcactctgccacccaggctggagtgtagtggtgcactcacagctcactgcagccttgaccttctgggctcaagcaatcctcccacctcagcctccctagtagctggaactataggcatgcatcaccatgcctggctaatttttgtattttttgtagagataaggtttcactttgttgcccaggctggtctcgaactccaaggatcaagccattctcccaccttggcctcccaaagtgacaaaggggacttttaagaggcacagaagctcaatgtgatatcaaaaatgcacactttcagatggtgtggcatcagggctgatggtggggatcagggctttaggtatggttacctttcctgtttacccacatctagggccrgacctccccacaccctgtggtgcttggagcatgatcctacccaggacagtcaggcagcaacagataacagcagagtgggctgccgagcccctcagagccaggctttctgagccctgcaaaggaaaacattcctggaatatgaaaaacaacccagtaatcttccttcraattcatgaaacactgggaaattcccttttcactggggccagaggaacttaggtgtacctgagctgtaaagatgtttagtcttagytaacattgtctgaggcaatggaggcaagaacttgmaggacacttacctagtcttccttcaacctacctctagcatgaggatctgagggtcttaagtgaccacaagcaaacaaaagccagtggtttgttttgttttgttttgtttctgagacggaatctctgtcgcccaggctggagtgcagtggtatgatctcagctcactgcaacctccacctcccaggtttgagtgattctcgtgcctcagcctcccaggtagctggtattacaggcatgcaccatcatacccagctatgttttgtatttttagtagagacggggtttcaccatgttggccaggctggtctcaaactcctggccttaagtaatctaccccctcggcctcccaaagtattgggattacaggaatgagccactgcacccagcccaatggtatttttcaaaggccaaaaatcccagacattctaaatctgcactgataaaagagcagaagtagaatctgggccccagtctccttacccccatgtaaaatgagagcatactcagacatctgtgtgggtgggagggtgggtagaaagttgctgagcagaagtgacaccccggtgggtgatactgtgggctgatctagaatgcctggccttaggaggataatctaaataggacatagtggtctttggtggggagatgagtcactctccaacccccaggtggcagcgggaagtcacactgatagggacatggcaggaaatcttctttgggaaaaacctgggacattccttcagttgcccagcttgtgatttcctggggagcctgactgctctctgtacagatagagtggaaggatttaggcccaagggagtgtcagggtgggggtgcaaaggagagaaaggccccaggctttgatgctgtcttaaggagccaaaggtgagtgtttcagagtcatcatgatcatgtttctttttgttttaggagcatttctggagtattgaccaaacggaatttcgaatcccacccaggctgatcattcagatatgggacaatgacaagttttctctggatgactacttgggtagggcttacatttggatcattgtttctaagaaactgtacttggaattagtggggtcaatgaaaacttggaagcaattctttaaatcttcaatactttttggtaatgggggcctggtggggggacaggggatacacccagtgcttgtgtgagctcttggcagtgcagcctgacagtgagtgccatcccttttcaagggctctggtgagggtcttgcaccagctcctgtctgtctgtgaagactcaagtcctgtttctgcagggggatgccacactcctacatccactttcaaaccagccactctctcctcagcacctgggaatcagctcctaccctcctcaacctgttcccaagttaccaaggtccccaacccccccgccatttctcctgtccctaggcccattctcctctgtggtaagggcactagttcaatgcacccttagcccgggcccttccctctcctggcacactcctccctcgccccccatggcactgtgctctccagattttcactctcccaggctctggtcttgtcacattagccagctctgtttctgcatcccactctatttttttatttttttatttttggagacaggtctctctgttacccaggctggagtgcagtggcacgatcatagctcactgcaacctcaacctcctgggttcgagaaatccttccacctcagcctccygagtagctgggactacaggcatacgaaacctggctaattttttttttttttcactttttagtacagacgaggtctcactatgttgcccaggctggccttgaacccctgagctcaagcaatccttgcacctcagcctctcaaagtgccaggattacaagcataagccacagcgcccagcctcccactttttgaatacaggccttccctgaggttcttctgctctcctccaacccgccaaccaccccctccaaggatttacccactctcacctcagtggaaggtcatgcttcaactctcacctttccacaaagtatggctcctaaaccaggacgtgtagcctgcgctctcatagtgcctgcagtacagtcaaaggaaatcgttgtgagggtcattcctgattcctggccagaacctcccacctttatatctggctggcagtgagcctgtactgtgactgaaatctcactcagcatttcttccctgacctcacccctgctctcctcaggaacttatttagcagctcacaacccctccatttccccagccacccaggcgaaagcacccggagtcctctgyggttttcctcctctcttttctccccacgccccgccagccactccattctagcaatgtcatctgttttatcacgcacacttattttcttagtcctgtgatctctgccacttgccagttgaaactcactttctgctagccacatgttacagtagcccctgactggtctccctgtttccacgctgcttccaggrgtccctcctggcagaggaaacacccaccaaaggctgtgtcttatttatcccttttccccgcacagtacctaatgcaatggttttgactaagtgcttagttaagaggtcagcaaataaatgagtatgcaagtaggcttacataaagtatatggatagtaaattctaggataataaagggtttgcccttggctttgtttgttgrsacagagtctcactctctcacccaggctggagtgcagtggcatgatmtaggatcactgcaacctccacctcctgggctcaggcgatcctcccaacctcagcctcccaagtagctgggaccacagacacgtgccaccaagcctggataattttgtgtatgttttgtagagacagggttttgccatgttgcccaagctggtctcaaattcctgagctcaagtaatctgcccacctcggcctcccartattgctgggattacaggcatgagccaccatgcctggccttcccttggaatttaaacaaaactrtcagacaacaaataaagagaatgactgtgtctcaaaatgccaagtgagcacataaccaaaaggagaggggagacaaaagcagtcataggtcaagaaaggctaaggtcacgtgtcttatgggtccactatatgctgaagggtagtccctgagcctgacagtttaaagagaaaatgccacaacctccttgttgctctttgctgccactgctgaaggccagactcttgccccagtcatccatagacttgaccccacatcacagataccattttcttaaggaaagggctcacaggagttcccaagcccaaaacacacttttcccttaccgtggaagtggtactaaagagttaatgcggccgggcacrgtgggtcatgcctgtaatcccagaactttgggaggccaaggtgggtggatcacatgaggtcaggagttcaagaccagcctggccaacatggcaaaaccctgtctccactaaaaatacaaaaattagccgggcattgtggtgcacacctgtagtcccagctactagggaggctgaggcatgagaatcgcttgaacccagtaggcggaggttgcagtgagctgagatcacatcactgtactccagcctgggttatagagagagactcagtctcaaaaagagtgaatgccttacatcatagaagggacaatgtgcttctccagacactctgattgaggctaggagtctcagttcctggtgagcgttttctgttgagtcatgttccttctcaagcttctgtttctgaggttttactaggagagtcttggacatgcacatttcatgcagcatcctgtgttggttttctgttttgttttttttgagacagaatctcgctctgctgcccaggctggagaacaatggtgcgatctctgctcactgcaacctctgcctcctgggctcacgcgattcttgtgcctcagcctcttgagtagctgggattacggatgtgtgccatcgtgcccggctaatttttatatttttagtagagacggggtttcaccatgttggccaggctggtcttgaactcctgacctcaagtgatctgcccacctcagcctcccaaagtgctaggattayagccgtgagccactttgcccagccagcatcctgtgttctaagcacctattgtctttacccaaagccaaatgacctctctgctcagggcagctcagaactaaaaggaaaacatttcacatccaagggccttgagttgagtgraaattgtgtctgtagatatttcattactttgagtttaaagaactctgtttatgctcatatctttgagaaagaaaacaggagatgctgtgcagtggacggctatttcttcggccattttccttcctaactggaaagactttaaatgtccaccaggctccctttctctaactcaccatttacctgttcaaaatcactgtgtgcctctctcctgayaagaacgttctgttcacttgtgaacaacagctgatccacttgaagctcatttggacttactgttgtttccttgrctaggtttcctagaacttgacttgcgtcacacgatcattcctgcaaaatcaccagagaaatgcagrttggacatgattccggacctcaaagccatgaacccccttaaagccaagacagcctccctctttgagcagaagtccatgaaaggatggtggccatgctacgcagagaaagatggcgcccgcgtaatggctgtatgaacatttcctggttctggttgaaaatcgtttatgccttttatcatttaggttttgccctttatccatagacttactccagataaaatgaggaagttttaaattggtgggagtttaagttatgggaacagtttgtctttgggatatgtttgcctttgtcttacaatataaggtgggagatgctgtgagcatgtgtttggagttggaggaaggtgaagaagttggaatggtcaaaaastagaagcccaggtggtttcactatattttcctttcttcttcatcagggaagttaattaatgctaggcttctagtacaatttcgtatggaaaagggaacttcacatttgaatttttctcattaaaaaaaaaaggtagggctgggtgtggtggctcatgcctgtaatccaaggcaggtggattacctgaggtcaggagttcgagaccagcctggccaacgtggcaaaacaccgtctctactaaaaatacaaaaacaacaacaacaaaaatagccagtagtggtggtgcacacctgtagtcccagacactyaggaggctgaggcacgagaatcacttggacccaggaggcataggttgcagtgagccaagatcgtgccactgtactccagcctgggtgacagagtgagactctgcctcaaaaaaaataaagaaaaaaaagagaggtggaagaagcaaggtgtgctggcattagttgaataagaaggccataaattacaagcaagttgaggaactcaagatgtattttgatctagaagcaatagtgtgggttaccatgccatatcacgaaagactacctagttcattatgcattattaaaaatagctaacatttttgatcattaattttgaaccaggcagcatgccaagtaccttacattcataatctttttaaaaacaaccttggtgtataatttacataaactgtattcatttaaagtacacaatttgatgacttttgacagatgtagacactcactgaaccataatcaagatccagaaccttcccatcacccccaaaatttccttgtgctctctctctgcagtccattgctccctccctccctggtcccaggaaaccactgacctgctttccgttacaatacagcagtttgcacataacctcacttagttctgctgacaacgccatgaagtagacattgtccccactttagcgattccaaaaacagtcttggagagatsgagcaacttgccaaagtcagaaacccagctttgtctgacttgtaagggtagaggtcatcagggctctactcagggccagggcttcccaaattgttggtgaccttgctgcctttcctggctcttagaaagtctgttacaaagtctgttacaatcttaggtatggctcactataaaagtgggcaggtttgttgctttttttttttttrgagatgaagtctcactctgtcacccaggctggagtgcagtggtgcgatctctgcttactgcaacctctgcctcccaagtagctgggactacaggcgcacgccaccatgctggctaatttttttttttttttttgtatttttagtagagatggggtttcgccatgttggccaggctggtcttgaactcctgacctcaggtgatcctcccgcctcagcctcccaaagcactgggattacaggcataagccactgcgcccagccaaaagtgggcaagtttctagaccactttcactttggcctcactgttctcatttgcacatgaggacaataatagtacctttgtagggttgccatgagcattacatgagataacccatgtagaacatttaaayggtgctgggaacatcactcaggaacccgtgagcagggagaaaacattcattcactcactcattcattcatttattgagctagtgtacatggagtacctactgaatgccagccactgtgcacagtaggtgacaatgattgataggcatgaagagatatggctctgttctcttactgggagcctacaataatgctcaataaatgttagatattgttattagtggtattcaggttagtctgggtccaagtgaagttacataggaaggtgtgtggggagacaaggagaccaatgtgagaatgttagagtgagggggatacagaaaatgaaaagtagggagtgggggaagcaatttgtcctcaaagtttcccacacagagtcagttcagaaacacatggaagaggaaatgggatgaaatctcttgaggaaaaytgaaggcaatctaaggattgttttacaagaataaaaatcattgctcggggaatactccttgggttgaagtaaaaatatttgtgaaacatgatgtcatatgtttaacctgctctgctttactgaaggggaaagtggagatgacattggaaatcctcaacgagaaggaggccgacgagaggccagccgggaaggggcgggacgaacccaacatgaaccccaagctggacttaccaaagtgagaggccttctttgttctcccactccccaaacacctgcaggctgagagccccccttcccattggcttaatgggatggattagcttttgtggtcctcctaatctggtatttaatagtggtgggtgggggtggagaggttggtgatctggcttcattttaagaattctcctttccaggaaaccaaagttcagcatcttaggaagctgtcrtagsttaaagagcctttctcagtcaacgaaggggaacagtatyttttcttgaccttattaatgtgattctttattcctgaaactgtgttatgctctggaataaaatatgcatccctcctgagttgggtaggtgatactgtttctttgcaatgcagtcgaccagaaacctccttcctctggttcaccaacccatgcaagaccatgaagttcatcgtgtggcgccgctttaagtgggtcatcatcggcttgctgttcctgcttatcctgctgctcttcgtggccgtgctcctctactctttgccggtaggagcccttccttggccccttgtcttggctttcttgtgagttgcagttggtcctctcccttggcatctgccctgaccactgtgcagaagaatgacccgctcagcagcatggggttgtaacccttctgctttggggaaatttaaagtaatgtgtcttgtaattagaatcacattctcagggtttcacaaattacgggcagaacttttctttatgatctgaaaataactttggtttcaggaattctaggagaaatcactcaggtctcggtcagtgtgtgtctggactatggccagcgtttccagctgatcttcctgccttcagactttcttgttccaaaccatcctgcatcctaattccttgtcctagcttcaagaatccccaaatctgggttcattgtgggtctacatataccttgtgttccacccaaactagatcattgatcccaacctccccaaatattattgcccttacctatctggatgcctttgccaattttgtttctctgtccacatttatctatcaaaacctcactcattttttaaggctcatgtcacgtataacctcccccttaaatgttcccctaatcaccccagtcataaacgggagtccaagtgggagatttggcagcktgcctagaagtagtacctcccttcctccatccagaggatgtattgcgcatctacgacaggctaggaattaagttatagtgatgattaaattattggcatgatttgtgcccaagagcagttcatattctgggaacaggcagccacgggaacaaggacacatgactaagggaggtgagctgttatggagacagaaacaaacaaccgtgggcaccccctgctaagacagttcctccaaggaggggacattcaagtttgccaagtggagaagggatagtccaggcagaggaagccatgctcagaagttgggccagtggcactgaatgtcacaggagacattcaaaagctcttactccaaaaacacattaataataatatcagctgggcgaggtggctcatgcctgtaatcctggcactttgggaggccgaggcgggtgaatyacttgaggtcaggagttcaagactagcctggccaacatagcgaaaccccgtctctactaaaaatacaaaaattagttgggtgtggtggcacatgcctgtaatcccagctactagggatgctaagataggataattgcttgaacctgggaggcggaggttgcagtgagctgagaccacaccactgcactccaacctggatgaagaagtgagactctgtctcaaaaaaatagtatcgtagccatacaagcagcaggggttttgtgtcttcatttttccccagtatagtacttctagtttgtcatctatgagtatatgtacactattatacagtcgtagctggtcaaactgcttttttttttttttttgagacagagtctcactctatcacccaggctggagtacagtggcacgatctcggctcactgcaacctccgcctcccaggttcaagcatttctcatgcctcagcctcccgagtagctgggattacaggtgcctgccaccacaccctgccaatttttgtatttttagtagagactgggtttcaccatgttggccaggctggtctcgaactcctgacctcaagtgatccacccacctcagcctcccaacgtgctaggattataggtgtgaaccaccacattcggtcccagtccaactgtcttgaccatttaaaaaacttctattttttttattttttatttttttgagatggggttttgctctgtcacccaggctggagtacagtggcgcaatcttggctcactgcaacctctgcctcacaggttcaagcgattctccagcctcagcctcccaagtagctgggattacaggcacccaccaccatgcccggctaatttttttatttttagtagagacggggtttcaccatgttggccaggctggtctccaactcctgacctcatgtgatctgcctgccttagcctcccaaagtgctgggattacaggtgtgagccactgcacccggtctagttaattctttttcctgatttagattctgttggcagccgggtacagtggctcacacctataatcccagcactttgggaggctgaggcgggcggatcacctgaggtcaggagtttgagaccagcctgaccaacatggtgaaaccctgtctctactaaaaatttaaaaattagcagagcgtgttggtgggcgcctgtaatcccagctacttgggaggctgaggctggagaatcacttgaacctgcgaggcaaaggttgcagtgactggagatcacgccactgcactccaccctgggtgacaagtgcaaaactccgtctcaaaaaaaaaaaaaaaattctattggtttaaaccagtggttactgcagggcgtggtggctcacgcctgtaatcccaccatgtttggaggccgaggcaggcggatcacgaggtcaggagacagagtccatcctggctaacacagtgaaaccccatctctactaagaatataaaaaattagctgggcatggtggcaggcgcctgtagtcccagctgctctggaggctgaggcaggagaatggcatggcgtgaacctgggaggcggaggttgcagtgagccgagatcgcgccactgcactccagcctaggcgacagagcaagactccatctcaaaawaaaaataaaaataaaaataaacyagtggttcccaattaggggagatttttgctccccacccccaagaggacatttgccaacgtctggagacattttggttgcaacaacttggcgggggggtgctactggcactcggtgggtagaggccagtgaaagctgctgaacatcctacaatgcacaggacactccccaacaagaaagaatcatctggttcaaaatgtcaattttttctcaagattgagaaaccctaactgaaaaacatatatacatacatgtttttttaccactgtttttgtttcctttccagaactatttgtcaatgaagattgtaaagccaaatgtgtaacaaaggcaaaggcttcatttcaagagtcatccagcaatgagagaatcctgcctctgtagaccaacatccagtgtgattttgtgtctgagaccacaccccagtagcaggttacgccatgtcaccgagccccattgattcccagagggtcttagtcctggaaagtcaggccaacaagcaacgtttgcatcatgttatctcttaagtattaaaagttttattttctaaagtttaaatcatgtttttcaaaatatttttcaaggtggctggttccatttaaaaatcatctttttatatgtgtcttcggttctagacttcagcttttggaaattgctaaatagaattcaaaaatctctgcatcctgaggtgatatacttcatatttgtaatcaactgaaagagctgtgcattataaaatcagttagaatagttagaacaattcttatttatgcccacaaccattgctatattttgtatggatgtcataaaagtctatttaacctctgtaatgaaactaaataaaaatgtttcacctttacacctggctgtttgttgtaactgtgggtcaagtgaggaaggaggcatttttctggccttgttttttcagtgaagagaatgccctggcatacctcttggccatataccctttataaatatgctgcccaattttagccagtaggtcaaactgaatataacattataaataaaagctaacagttggctggacagagtggttcacgcctgtaatcccagcactttgggaggccgaagcgggcagatcacctgatgttgggagttcaagaccagcctgaccaacatggagaaaccccgtctctactaaaaatacaaaattagccgggtgtggtggtgcatgcctataatcccagctactcgggaggctgaagcaggagaattgcttgaactcaagaggcggaggttgtggtgagccgagattgccctgttgcactccagcctgggcaacaagagtgaaattccatctcaaaaaaaaaaaaaaaaaaaaaaagaccgggcgcggtggctcacgcctgtaatcccagcactttgagaggccgaggcaggcggatcacaaggtcaggagatcgagaccatcctggctaacacggtgaaaccctgtctctaaccaaaatacaaaaaattagccaggcgtggtggcgggcgcctgtagtcccagctattcgggaggctgaggcaagagaacggcgtgaacctgggaggcagtgcttgcagtgagccgagatcgcaccactgcactccagcctgggcaacagagtgagactccatctcaaaaaaaagaaagaaaaagaaaaagctaacactaaaggtacttattctgtgcacggcagtgttttaagtggtttatatgtattaacttacttaaggatgaggaagccctataaacataggtcacattctcaaccccaggtgtaagtccgttttcacactgctataaagatactacctcagacaaagcacattataaacaaaggaggtttaattgactcacaggtctgcatggctggggaggcctcaggaaacttacaatcatggtggaaggcaaggtggcaggagagagcgagcaaacagggcagatgccagacacttagcaaacaaccagatcttgtgagaactctctcactatcatgagaacagcatgggggaagccatccccatgatccagtcacctcccaccaggtccctccctcgacacctggggattacaattcagatcacaattcaagaagagatttgggtggggacacagccaagccatatcaccccatttacagttgaagaaattaagtcacaaagaggtttaggaacttgcccaaagccacacaaccaataaatggtagagctggaacttgcacccaaacaatcttaacttcttttttatataatggagttttgctcttgttgcccaggctggagtgcaatggcgagacctcggctcactgcagcctccgcctcccagattcaagcgattctcctgtctcagtctcctgagtagctgggattacaggcaccacctaccatgcccagctaattttttgtattcttagtaaagacaggttttcagcatgttggccaggctggtctcgtactcctgacctcaggtgatccacccagcttggcctcccaaactgctgggattacaggcctgagccactgtgcctggccagcttctcttaaccataaatctataccaccagtgggaggtctgtcaagaggaacatagggctgcgattgtcaagtaatgagtgacagcaacacagtgtgactccatgtcaacatgaaagacagcgtgttctagaacatgtgagaacactgtcctgttatatgagagaccacagtaagatcagtaaacagctctattcaaacggcaacacagagctgaggggagtaagaaatggtacaataacgacaatgcttttagacacttagacaaagttaaaccgcaacggtgattgtgtcagtgtcattgctaagttgtttcacgttttgaatattttaattcccttcatgtcctgctccaaatcctagcattcaatacacaaaatcgctgggaggcaatgcacaggatattctccaatattgctgaatttgaatgcttatcatctcccatacaccttgtcccctcctttctcaatggcacccctgccttcattggtggaactcctgcctaccctcgatgttctggttcaaatgccactttcttttctctttgagacagagtctcactctgtcacccaggctggagtgcagcagcgcaaccccgactcactgcaacctctgccgcccaggttcaaacaattctcctgcctcagcctcctgagtagctgagattacaagtgcctgacaccacacctggctaatttttgtatttttagtagagtcggggtttcaccatgttggccaggctggtctcgaactccttacctcaggtgatctgcctgcctcagcctcccagaagtgctgagattacaggcgtgagtcaccacacccggccatccaatgccactttctctttgacaactcttgcaccccagagtgaatattcaatcttagaagcagacaaattagggctgggcgcggtggctcacgcctgtaatcccagcactttgggaggccaaggtgggtggatcacgaggtcaggagattgagaccatcctggctaacacggtgaaacccccgtctctactaaaaatacaaaaaattaggcgggcatggtggcgggcgcctatagtcccagctcctcaggaggctgaggcaggagaatagcgtgaacccgggaggcggagcttgccatgagccgagatcgtgccactgcactccagcctgggcgacagagtgagactctgtctcaaaaaaaaaaaaaaaaaaaaaaaaaaaaaaaaaaaaaaaaggagacaaattagtacaacctttctggagaaatacgtttgttaaaagttttaaaactgtttatgccctttgaaccagtaatttcactcctgagtattaactccaaggaaataatcagaaaggcagccaaggttcatgtggaaaaacgtatgttacagtgtgctttatcatggcacaaatcagaaacaacctaaatgcccacttttaggggaatcatttaatatataatgaagtcccatatgttgatgcaaaatgaaaaagaataacaattttctcccatccaagtactaacctgaccctgcttagcttctgagttcagacaagagcgggaatgttcaggatggtatggccatagacaagaacaacaattttcttttttctttttttttgagacagtgtttcactcttgttgcccaagctggagtacaatggcacaatcttggctcactgcaacctctgcctcccgggttcaagcgattctcctgcctcagcctcccgagtagctgggatgacaggtgcgcaccaccacgccctatttttttgtattttcagtacaaacggggtttcaccatgttagccaggctggtctcaaactcctgacatcaggtgatccacccacctcggcctcccaaatgctgggattacaggtatgagccaccgcacccggcccagaataacaattttctaaattttgtgactggcataggaaaatgttagcgtatgggaaatttttgaagatcataattataaatcgatttaaagtaaagtcccaaatacttgaggtacatatataaggaaatgcaccaaattattagtagtataagaaatatatgcaaagtttgtatttgtgcatatttaaataatttatgaatgtaagtcaacactggaggttcattacaatttttggggggtaaaaccaggacctcaagtttgacaaacattgtgatacttagtttcaccttgcagctatatgggcatggctcatcttcccaactgactgtaagcccccttagggcagaggtagcacctgtaagatctgtcccatgaaacagcaggcctgggtttgcatcccaggtcttgccccagcctcctccaggacttgggagaaataatgcctgtctccctggattgaggtgagggatgaatggcagcatgtgtgtaaagtgccttcacaactcccaatgcccagcaggtagctttaggcattgcatttgactggttaaagtcagatgttctggttccaaaagtataactaaaaaaaggttcttttccttttaaccgtgggacttttatacagaaaacacagactcacatatagaagggaagcaaaagcaagattaagatgtaaggctgtctcccaccttcccaagacccagaaggaaagaaggaggatcccagtttcagggggtaggaagaggtcagctcttgccactccgagcagcatggtgcaggttgctgtgtgtggggtggtagcaggaacgattgcattgttccagtggaacagaggctataattcttatttgttattcaggctccccctgtagacctctgtcttaggaggctgactgagtattgccatggccctcaagaagagcagccagctcttctgggtccaggcccccaagcacatataaccttccaattttttcaaatcatattatacctacacccaaactactactttctaacaacgtcatgtcatcttgcttagaccttaagtaagagtctacagcttttatctaataaaggagacactctaatgatgaaagggaatttaactgaaaatggcattttcttgcagaaaaagtaagcgtcataaaagaacactccaggcaagggtgttatttggaatttttaacaatcagtatggcactggcaccaaccaatcagaatagatgtgccaacctatcatggtggatacactattaaaaaaaaacacacacaaaaaaactacaacagccataccagtatgtgcaggccgaatattagccttcgtaccagggaaccctaccaatacaccctcctgcaatgactccctcaaggaagagttgctgagtggataaatgagtggctatgaggaaagtcttttccttctttgacttcatgatacctaaccagaatctactgtagtcttgtgccacataacaacgttttggtcaacggcagactggatggtataatagtgatcccataagattataatattttttttggagagaaggcctcaccctgatgcccaaactgtaggtgtataataccctgtttttagagtaccttttctacattaagatgtttagatacacaaatacctaccattgtattacattacctgcagcgtttagtagagtaacatgctggacaggtttgtagtctacgagcaactggctgtaccatagagacgaggtgtgtgcaggctgtatcatctaggtttgtgtaaataccttctatgatgtttacacaataacaaaatcacctaataacacatttctcataacatatcctggtcttaaacagtgtgtgactgtagcgtggaacctttgagtaagtagcagcaaagctttcgtaggaatgaagttattcccatggagagcaaggagctgggctttctgggtggaactcctctctctccccttctatcccccagaaaaaaaagcttcatcttgtcaaaagataatggtctctcaattgaggttgttagccacctggtgacctataaatgatagctaaaagctggaactaatcacagtccagtcagattgtcgcttcaccgtgaattaaataacacttagtcctaactgtttctagcaagtgccaccattagcgctggagccttcattaggaaaataaatttccatcaatgccatgacatgacagggaactgaaaatcctgacaggctaacacttgattttgttttgttcttcctttctcgttttaagactagaaaaaaaaatatgtcacaattggacctgcatgttgcattaaagggctatttaaaagatggacagtttcaaaaacccatttgggaaaccccaaatgggcagagggaagctgagctgtctggcgtccaagtgctggccaagtggcagctttttgcccttccaagctcaccccagc

SEQ ID NO: 6884 - DNA, 44466 bp, Homo sapiens
atgctgatttcatatgccgcaaggcccccagagatggtgcaaacgcactactaaggtggctcctaggaacatgagaaaagcaatggcccatcttaagttaagaagaaatacctgtactgccctaacaaaatggaggcacagaagtgacaaaaaacttgagccaggattcaaacctagtgtcttccgagtcaaactcccttcccagcttcacctcagctgagatctcatatttctgtttcattgtttcttacctgtctcaagtaaactcaagcattaatctaggtgagtggccttacacttgccctggaacagtgagacaaaagagatggagaaagaggaatgtgagaggaagagaagggagactcagcaaaaaatctagatgtgaagagcaaagtgctggggtagcaaagaggatttagtggaagagaaatgaagatagattcgtaacatcttattccaattccagttttacagaatcttaggtattacctaacagcatttttcaaattggcatgcacagaagggtccattgtttcagttgataaccaaagtgctttttagagctaaaatactatttttggtggcttaattacagggcttctcacagtggaagacactatctttaaataacttaatatatagtatatttgaatttcattcctttaagaaagtgcttggcagcaactgagtccacgtagagggcaggaggagataaattattttataacatttggcaccatcatattgtcatcattcaaggcaactgggggagctaaatataagataggaattaatctgacttctctaagaagatattaatatattttctaaaatcaacctagaaaaaatagaacaggcaaaagtggaataattttaagccttgtgctcacctttacagaaacaataattcttcatcaaaatgtctgatagacaaatggctcccagctgttcttctggaagagccctcattcattcacgcacatatgcaccttattcagctaatacttattaaacgctacttggtgccaggcacaatgctaactacaaaaatgaataggacacatttctgctctgcaagaagctcacagataattgtagcatcatgtggtgagggcaatgatagaaagagataaactgaagagataggtatctgtagggcaggggagggcaagcatggtaggctccctggaggaggtgacagctgaaaactggactgaatcttaatggttggattgatatgtgtgtatgtgtgtgtgcctgactgtatgatctgaaatagagttaaatacatatggtgaacatttggaaccccaagacattccacactggtggaacatcatgtatgacataaaacagtcaagcactgagcctaggcaggcaggcagttaccagctcagagagccttatttgctcagtaacatctactgagtactcactacgtgccaaacactatcctaagcattttttctcattgaaaccttccaccaccctaccctgtgaagtccctgctatggtaggatccccattctacagacgaaaaagctgaggcctggtttggctaagcaccttgcctaggttctcacggtaagtaaagccaggatctgaatgcaggcagtctttttccagagtccgtgctcttcattcttacacatacctcatggtgacagggacctattggagatgtatttttcagcagggaagtggagcgattggattgcctattaataccctggttacaaatgaaatgttttagttaccatgcagacttaaattttaataggagctaaaataggccaggctcagtggatcatgcctataatcccagcactttgggaggccaaggtggaaagattgcttgaggccaggccaggaggattgcttgaagaagtttgagaccagcctgggcaatatagtgagacctcatctcttaaaaaaaaaaaaaaaaaaaaaaaggacctaaagcgggcagagcagtcagggcctgccctctcaaaataggatgcaccccaaatcaagaaccaagtcaggaagtatcactgactgcctaagaagaattctctcatatgagattagccgcctgcccctgaaatgattttcagatatgttgcttgctgatagagctgcagtgatcacagctaagtgctgaggggatctccctatttgccgatttaaaatgcagcccttcctggctgaagataaactttaggaaagagcagggggtctaccctgaaaaggtgctgagctctaaaagcatgcttctggtgcattattttaagtaaggtgcatccttttaggtaattaaggaatatcgataacagaaaggaaagagagtaaagcatttgtctgtttctccgtaatagtttagatcagacgagactctgatcaattcatccttgatctaattcgctcaatcactgtggttcttctaggtgctcaggatatggtggctggcaaaatcagatgtggcccctaccttcaaggattttgcagcctagtgaggggaaaagataccaaccaaagaatcactctcaaataaatgtgcaattataagtgtggtgagtggttggagaagtacaagctaaagcgaggacatccctgcagcagtgagaactaagattttccggggaagtaggaaaggagataacagtggagaattccagacagggcctgtggaaaagccccgaaggcaggaaggagtctgcctggtcaaggaatgaaaggtgtcaagcatggctggtttgggactttggtctccactaggccccagaggacagatggagaattttttttccttattttaagaacaatggtaaatcaatcaaatgctttgtgtttgcattgggaaataggtgacaagattgcatttgcattatttaaaagaaaaaatccctgctaaggagaaatcagattgaaaggagacaagagttcattcatttcttcttgttctgaatttagagaacatttattgtgtgcattccagtgctgtgcaatagaaatatagtatgagccacatttatcattttgaattttctagtcacatcaaaaaaagtaaaacacattaggtgagatccgttttaatatgtttcattttacccaatatatcaaaaatactatcattttaacatgtaataatataaacaagtattagtgcaatattttacattcttttttcatactaagtttttgaaatctgctgtgtatattcacacacctcaatttggacataaaatcttcctcagaaatacttgatctatatgtagatttcataaaatttacaattgaaaaaacaggtttttgtacccaggttgttccaaacatacttaaaagttttccaataaaataataataataaaaaaaagaaaaaaataagaaaatcaaaagtttttcaataaataaacttttagtttttaaattaagattaaataaagttaaaaattcagtttctcaataacggtggccacatttcaagcactcagtagccatctatggctagtgctaccatattggatagatcaggagggacctttccatcactgcagaaagttgtattggacagtgcagatctacacgctggtgaggccctgtgtgttcattagcattgccttggaagatgtaaccttcaaaggtgataggtgctctaacctacaacagcctccctatttccatttaatatctttaaacccattcagcagccttttgatcctgttttggtttcccaagaacaggttcctactgggaagaaaatgagctcacctgcttagataaatatctagtctgcttggctgttacatttctctttacatgaataaagatgagtttcccaatcttcatcctagactatccctgagtgaactatcaacatcaaagtacttgtgagatcttgtggaaactaccagctcttcacaacctcatgactggcagctcctatctgtaaagagcaaacattaattttcagggctagcaatggcaattagggaatttaacaagccccccaggccaatgagcctcttgtttgctcctcttcctcaaggtccccactcacagggcgacctttagccagaaaagaaggtcctggagggcaggtgtggaattggagtgtctggcacagcaggcctgggtgctggctacccaggtgccagtccgccaggtgccacctctctccagggtccctcctccctctcccccattttttgctccccatttggcttgaaggtgaacagggaaatgtttttctctatatctctttaagaatctttgtaaatctctgtggaaattaattttgcccctcaactctgggcaatgaataatgttcacacgatgatttatcttttgccctgatttttcccaccctaatcccacttgatactttagtttaccttcccttcagaaatgggagctccttggaagcaggtaccaaacgttatcttgcattctgttttggttttgtttctctgattctttaaaattccccacatggttttctcatccattctattcagtaacatttgagtgttgccttttgtttaacaatggctaacatcaattgaacatttactaaatgttaagcactttacatgaatttctttcatgtaaaaaaattttaaagttttaaaattagagacagggattgggtggggtgagagtggatctctctgtgttgcccaggctggtctccaactcctgacctcaagcaatcctcgctccccgtcctcacgtagtggtgggattacaggaattagccattccacctggccggatttcctcatttaatccttataaccgagctgtgaagtaaatattattatttgcatcattttacacatcgggaaaccgaggctcaaataggttaaataaatttatccaaggagacacatctagtcagggcagtaaggaattaaatctagaaagtcctaatctagagtttataacctttgtacaatattgtgtacctaggatgttttgctactgtgtatctactgttttaaatctccagcgagtttatgctgggtctaggagagaaagggaggccctgctaaacatttcatgtgcttcttctctcagcagtaacgttctcaaagcggctaatcaagagctagaatcgatcaatagatagatatcaggctggagggtagcagtctggtctgaaagccggtccgctagcattcataatctcagcgttcaacctgggcgtgcctctcagctctcccgttaacactccctgctgtgctgctgatttttggcagtaatcccagcactttaggaggccgaggtggaaggatcacttgaaggcaggagttcgtgatcagagtgggaaacaaagtgagaccacccccccccccccccactccgctgtctgtataaaattttttaataaaaaattagccgggcgtggtggcgtgcgcctgtagtctcagctactcggcaggctgaggcaagacgatcgcttgaacccgggagactgaggttgcagtgagctatgattgcaccactccactccagcctgggcgacagagtgagacccgaggggatgacaagggggctgtgctcctttgtgaaatcccgttgtcccagggcaggaggggccgcacttcacacagggagaatctatgctcaagagcgcagaactagttcgtctcggtccatcgtcactggttttatcccattaaaaatagtaatttgctttctcctaaaagcgtataaacacaaaaccagcccctgactgcgagacaccaagcttgtttaggtctaagcccgcagagaacccccgatcccagaattagctggcgggcccgggaggaagtgttcccgccctctgtcccgccccgcggccccagccacttctcggcccgccctcaggtttactctccgcccttcaaaggcggcagccaatcggrgagccgcgtccccgccgcgcgcgcgctgctcctccttcttgcgggccgcgccctgccggcagtgacgtgccccgccctgcagccgcgggattcaaactcccggaagcggcatccacacctgatggtgtgactcggccgacgcgagcgccgcgcttcgcttcagctgctagctggcccaagggaggcgaccgcggagggtggcgaggggcggccaggacccgcagccccggggccgggccggtccggaccgccagggagggcaggtcagtgggcagatcgcgtccgcgggattcaatctctgcccgctctgataacagtccttttccctggcgctcacttcgtgcctggcacccggctgggcgcctcaagaccgttgtctcttcgatcgcttctttggacttggcggtgggtatcatctccttacagataggcgcagagaggccaagtgacttgcccaaggtcttttgttaggacggctttttccgattggcaggcactttcgttgtgtgttcctcaaacatctttattttagaagtgagaaaacttgtgcctttttttgcagtttctcttttcctgtctgtctcctcaagtgagattttatgtgggaatttttaaagattggcgtcgccttgtagaagatgcggcttgtaattgaggccttgtaccatttactggatggaagcgcttgtttggtcacctgtccagcatgacttaggtcacttcagctaatcaaccaatcatttcttttcttttttctttttttttgagatggagtctcgctctgtcaccaaggctggagtgcaatggcacgatcttggctcactgcaacctctgcctcctgggttcaagcgattctccttcctcagcctcctgaatagctgggactacaggcgtgcgccaccacgcccggttaatttttgtatttttagtagagacagggtttcgccatgttgggcaggctggtctcgaactcctgacctcagatgatccacctgcctcggccttccagagtgctgggattacaggcgtgagccaccgcgcccggccccaatcaaccaatcatatctgagggcttgctgttaggctctgtgggtaacaacaacaacaacaaaaatcaaagtgcagtccttgaaaaaatagttgaacaattgaaaaaataaaaggttagcaggaagtgtaattgggtactagattgtgtaggggtgggggtggggcagctatatcgtttgttaagagttcacagagggaaggcatgctgaggaaggtttgaactgggggaaccctgtggatgactggaataggaaatacagggaaaggtggccgggcgcggtggttcacgcctgtaatcccagcactttgggaggccgaggcgggcagatcacttgaggtcaggagttcgagactagcctgaccaatatggtgaaacctcatctctactaatagataaaaaaaaattagccaggcgtggtgacgcgcacctgtagtcccagctactcaggaggctgaggcaggagaatcccttgaacccgggaggcggaggttgcagtgatctgagatagtgccactgcactccagcctgggcgacagagcgagactctgccgcccctaacgccccgcccccgccaaaaaaaaaaagaaagaaacagaaacagaaaaaagaaaatacagggaaaggaggttggtgggactaggtggtgggrgagatccaaaccgtctggsscagaggctagaaactagtagtcattcattcactgccagagtttcygtgcaaaggttaggaagcagatgtttgggggttctttcacgttctgcagatctatatttccatcattttgtgtctcaatgacttggtagtagttttctgtcctacgacccacgatatcaagtcaacagtgtgttatcaacagaaacacataggaaagaacttcctgtggcagcaggtgactgagagacgccataaccttgcatttctttaactgatggatgagctactgcaatctttcaccttataatggcaaaaatccaggactaaccttttgatagatgatttcttctactcaatctccacagttctaatatgtttagacgttctgatttcacacaggacaatcttaaaagtcacttcactaccattctaaggaggtctctcctgtttttactgatatcatttatccctgtacttctcttgtgtaatatttattacagtttgaggattcatgaacccttgtttgtttccttgttattgcctgcctttactacactgaaagccccataacattagggaacatgtcttttttttttttttaaaccagtttacacccagcatgtattaggatacctggtaaatagtaggctttatagtaatttttgaatgcactaatgggctcatactcctttatatcctttaatcacactgccattattttaycttgggatacatgaagtagaaaaatgttttttaacctccttaattagagttacttttatatactatttatatgcatcgtatgcttcactagatttttgcctgctaaagtttatattatatacttgtttctaaactgtcatccagtactgttagcagatactgagtttctccttacttaatttggccccttattcttaattcctttcatgcctgactcccctgaatgttatacctcttttccagtaaatgtcttattttaggttctcttcactttttcccactgtgctctctcaaatgattattaagatggatctgaactaggctaccttctaaaacagaggacctatgttaagtaatgacatttcgtgcctatatactcagaattacattatttaccaacagctttttattttgggccaagatatgtccttgattgtgacctacttctttcaggctttatttaatggttggagaccccttcattgttttttaaaccaaacttttccacaaaagaattacacatataattacacatatagaacactacacaaaacataagtgtacaagttgactttttttttttttttttttttgagacggagtcttgctgtgtcacccaggctggagtacattggtgcgatcttggctcacagcaacctccacctcccgggctcaagcgattctcctgcctcagcctccccagcatctgggattacaggcacctgccaccacgcctggctaagttttgtagttttagtagagatggagtttcaccatgttggccagactggtctcgaactcctgacctcatgatccacccatcttgacctcccaaagtgctggggctacaggcgtgagccaccgtacccagcccaagttgacatattttagaaggtgaatactcccatttatctaccactgagattaaaaaaaaaagttacaataccccagaagcctccatccatctttctccataccctgctggtttggatatatcatttctatttagagcagataggttattagacctgtttcaaacttgagatttaaatttttaaactcagaattatayagttgatttttatttttacagaccatttcagagatgtcttccagaagtaccaaagatttaattaaaagtaagtggggatcgaagcctagtaactccaaatccgaaactacattagaaaaattaaagggagaaattgcacacttaaagacatcagtggatgaaatcacaagtgggaaaggaaagctgactgataaagagagacasagayttttggaggtaaatggtcttctgatcctttaaattgtaarctctccaagaaagcgatgcatgaagatttcctgatgctaccttcttactcttgccgtgttccctgtcttgtccagttgattagttttggaaagctgacattgggtttagaatcttaaattcctactttgactttgccaagtcttagatgtactttagtcattactaacttctcaccttttaaatgtaattgagtatgtgttttgaggttaccaggtactaagtttgttctggaaataaagacattgcgattaatagttttgcacctttaacatggtctgtttcacstttagyatgctctgtttctcagttatttaaaacaaagtaataacctaattcatcattcttcctatagcttcttggtaatttagcttaactacatgaatattcttgataacttttgttatgctgtatttaagattgtgaaacattctggctaactattttcgctatttttaaattgatagcataacttagaagcattygattttccatactttttttttttttttgagactgggtctcaactctgttgcccaggctggagtacagtggcttgatcataactcactgcagcctcaaactctgggcctcaggcaatcctcctgcctgggcctcccaaagtgctggaattccaggtgtgaaccgctatgcctggccattccatgcttttttggagtactaaattactcgttgatgtactttaaggatactgtgctgggcttatatctcttttttactgtgggagaggagaaaatatttacccaatagttatataatctggttttcctgttaatttactaaatgtaaaaaatcaaatctgtccatttcagagtattaaatagtgttcagatttccttatttaaaacatattttatcatgcatattggctgctatccaagtaattctggttttcaggcttttgaaggaaaaattattagacatgttggcatttacactctgttcaactatatttcggattccctaatttataatttgttatggcatagacagtaaggaagttaggaacttattagaactagagggacttaaaaatgtaatcataaatataatcacaaatttggatttaattattttgcaaaagtgcttttattgtttgtatttagaaaataaatggttaaggccgggcacggtggctcatgcctataatcccagcactttgggaggctgagacaggtggatcacctgaggtcaggagttcaagaccagcctggccaatatggcgaaacaaaaattagccggatgtgttggtgtgcacctgtaatcccaactactcgggaagctgaggcaggagaatcgcatgaacccaggagacaggttgcagtgagccaagatcgcaccactgcactccagcctgggtgacagagcaagacttctgtctcaaaaaaaaaataaataaataaaataaaataaatggttaaacagtataccatttgatttatttaaattctctaaacaggcacataatgaaactgatttattttttgtaacaacatacattgaggtaaatgctttttcaagcacttagagaacagtcatcaccagtccacagatatgaaggttattttgcaatctggtaaaggaatcttattgcttccctgagagatagctttccatttcattccactttttgagaagcactggatattttgttcctttataatcaattaaacttcctataacttctacccatttgttctaattgtgcctattaaagttacacagaacaagtcttatttttcctatgcaaactgacaatttattagatatgtaaggaaattttgcttcctcttaacttttctgcagaccaagctcatattcttcagcttttctggcttcttatcatcttgaatagtttttagtttattcatatccctcctgaattatgcacttagaattgaacacagtatcctaaatatgttctggaaaacacagattgaaatagtagtgttacatctacttagctggatactgtactccattaaagcctaaaattgtatggctctgttatctgtctcatactactgatttgagttaagcttgtggccaactataatctcctcattattttcaaatgaataaccatgcccctaaacttaaattttccccattttatatttgaacaactgctgcttttttcttcctaaattcaagttttaacttcatgctgttttgatcctgttagcctataattttaataattatttctattatctttttattttactttttcctttatgccagcagcagtttaaaaaacattacttatgtatatcttgtgaatctttgaagatgttaagcattcctttagagatcaccttctagattcaatactgaatcatttatcgaaagtaagcaggttaatgaatgcatccctctcctgctgaaatattctgtaacttttaagttccactgattcaaattcattaaggagcatgtatatcttgtgtgaccsacttttagctcttagtttttacaagatccagtgttatggaagaatgattaccaaatactcatgggaaagctagcccttctttagctttttctcaccacccttgatagaggtggtttctcctttctttgtgtctgtgctcattttttaatctgtcttaactacagcacttacaacgttgcattaatacattggcttacttctctgtgagctatctgaacataaaactttggcttcctaatcttttttggccttggtatttagcgtaatgctgacttgataataaatgcttcataaatgcttgttgaagtatatattgtttagctagatgtttgacctggctttgttctaagattcttcttagtttatgtctagaaaattcgagtccttgaggctgagaaggagaagaatgcttatcaactcacagagaaggacaaagaaatacagcgactgagagaccaactgaaggccagatatagtactacygcattgcttgaacagctggaagagacaacgagagaaggagaaaggagggagcaggtgttgaaagccttatctgaagagaaagacgtattgaaacaacagttgtctgctgcaacctcacgaattgctgaacttgaaagcaaaaccaatacactccgtttatcacaggtgctaatcatttctttaaacccagattttttttttctttctgatacagtttgtaattcttaggaggaatgagtttgttaagacatgcttcccaaatgatgagacaaatgattagtatagtatactatcaggtcacttcactttttttaatagcccagtcccttctctataagcaaaaatagttaatatggtaccctccactccttgtaccattgatttgcctggaggaatattcagaagacagcatctactgtgtatttacaattaccaagattttttttgagctcttatttctatagtttgtatcatgaaaacagtaggcttcatttttttggttatttttcatatttgaaacatacaattataatatcaagtatacttttcctaactgcacttgcattttctccccgttttgtttgagaggcactagcgtcatagaaagaacaaggatacagaaatagacatgtgagttcagatcttggttttgtacttgccagctctgtgactctgaacaaatttgttaacctttatagccttagagacaatactagacttctccagacccctgttctaaatcttagtttcttttttttttttttaaacatataagctaaacctgagtttccacatcagtaaaatcaggataggaatagtgagaattaaatgtaaatatgtatgtaaattgcctcgcatagtgcctagtatatagtaggtgttcggtaaatggttacttattgatcagacctttgattcttttggagatttggagattcgaataatactaacattaatatcatctataggctgggcatggtggctcacgcctataatcccaccactttgggaggccaaggcaggcagatcacctggggtcaggagtttgagaccagcctggccaacacagtgaaaccccatctctactaaaaatacaaaaattagccgagtgtgacggcacgcatctgtaatcccagctattcgggaggctgaggcactagaatcgcttgaacccgaaaggtggaggttgcagtgagccaagattgcgccactgtactccggcctgggtgacagagtgagcctctgtctcaaaaaaaaaaaaatcatctatagtagaaaatctgtagctttcaaatatatctcagtgctgttaaggatctttctctgtactttatttcccatttaggggagatagtgatcagacctatacatttatgtgtattttcatagatgggcgtttgagtgtttctgcagatgagttcaaaaagttgaagtttttctagagaatttccacagagctgaaactcataaaacgttacagtcagattcaaagtagctgactaaaatttttctttgaagttcaagagttagtttctccacttttggaatgtgaaatacaaacttggtagaaattataatttttaaaatttttatttattttttattttttgagacagagtctcattttgccacccaggctggagtgcaatggcgcaatctcagctcactgcaacctccacctgggttcaagtaattctcctgcctcagcctcccaagtatttgggattacaggcacctgccaccacgccctgctgatttttgtattattaatagagacggggtttcaacatgttgtccaggctggtcttgaactcctgacctcaggtgatccgcctgcctcagcctcccaaagtgctgggattacaggcataagccaccgtatctggcctgaaattataatttttaaaaatgtattcttataataattttgtgggctactcgtattgatttctgtattgactagtatgtctgactcctataacaacttccaaatgtcagtgtcttatgcaacaaatgtttatttttctctcatgctggtctagtccagattggagtagaggaagctttgctccacagagtcatttgactccaggttccttccttctagtggctccaccttcctttagggtagggtcccccaccaagtcctctgtatgtagctgtgagatggagcttgtggagaactgcctaggaggggtctggggccaggcctggtattgacatatctcacctctgctcacattccactggaacatggctccactaaccacagggaaggctggaatcagtctacagtgtgcccagggtaaaaggaaagggatttagagaactatctttgtcatagtttccacctcgaggactgaattgagagagagaaagggctacatattaaagtgaatgaatagagcatctttggagaaaaataatttttttgagcttctttgccagtattcacaagtctcttatagctattaaaagactgaaatacagctttttctatgtttgttggccagcctggctacctagccacccacttctcttttatttctctgagaaaatgaagaggagagaaataatttttgagttccatataatctatatgaactaatactaattaataattaatactttttttttttgagatagaatcttgctctgttgcccaggctggagtaatttttgtattattagtagagatggggtttcaccatgttagccaggctggtcttgaactcctgacctcaggtgatctgcctgcctcggcctcccaaagtgctgggattacaggcataagcctgatcttggctcactgcaacctcctcctcccgggttctgcctcagccccccgactagctgggactacaggtgcgctaccatgcctggctaatttttgtatttttagtaaagatggggtttcaccatattggccaggctggtctcaaactcctgaccttgtgatcctacccgccttgccctcccaaagtgttgggattataggcgcgagccactgcacccggcctaattaatactattattaatacaaaacatgattctagaaaaaaawttttaccttttgtttgacaatttaatgtcttctaggtgtcatttaaatagcctagttgttttgtgtttgtctttttggtaaaaatcactgggctattcatatgcactgagggctattctggcaatcctggggtctagaggactgcagaagtcagattagatagaaaatctcaggatttccagtctgtttgggaaacttcaggggatcttaattttcacaatggttatctctggtaactctcacctggcttgatggtttaccaccatctactagatctggattttttgttttctttttttgagacagagtctcactctattgctcaggctggagtgcagtggcgcaatctcggctcactgcagcctccrcctcccgggttcaagtgattctcctgcctcagcctcccgtgtagctgggattataggcaccggccaccaggctcagctaatttttctttttgtatttttagtagagatgggttttcgccatgttggccaggctggtctcaaactcctgacctcaaatgatccaccctccttaacctcccagagtgctgggattataggcgtgagccaccgtgcccagcctagatctggatttcgggatgcccccgtgagttatactgtattattatggtgartgtaatgaggcaacttctattgtggaatgtctgatgttaactaatgttggattatttacagactgtggctccaaactgcttcaactcatcaataaataatattcatgaaatggaartacagctgaaagatgtaagttcatttccttttaagttatgggtaaagagggctaattcatttattcttaagttttacagaaattggcaacattagtgctgtgacagaaaaactgaatggtttgagagcttcatttaagtctctttctatacattcgagaatcatttcttctaagcatagtcccttttttttttttttttcctgaggcaaagtctcggtctgttgcccaggctggagtgcagtggcatcttggttcactgcaacctstgtctcctgggttcaagcagttctacctcagcctcctgagtagctgggattacaggcacgagccaccacactccgctaagtttttgtatttttagtagagatggggtttcaccatgttggccaggctggtctcaaactcctgacctcaagtgatctgcccacctcagcctttcaaagtgctgggattacagctgtgagctaccatgcccggcatcatggtctctgtagggtagacagccctagaaattatcactgccaccaaatacctcaataacatcccttttctatctaaatctaatttccctaatttgcccaatcattttattgtttcttgttttttcagtatttttctctttttgagatggagtcttgctctgttgcccaagctggaatggactggtgagatctcagctcactgcagcctccacctcccaggttcaagtgactcttctgcctcagcctcccaagtacctgggattacaggcacccaccaccacgcccggctaatttttatttttagtagagatggggtttcaccatgttggccaggctggtcttgaaytcccgacctcaggtgatctgcctgcctcggcctcccagagtgctgggattaygggcgtgtgccactgtgcctggcctccattttattmttataatgtaatttaatttgtagtatcttctcttttgrtttatccatgcaagatgctctctttggtttgaatacttctcttgaaactaaggtttgctttcgtaggttgaaaaggaaacgttctttgtacactcagtacttcctttctctagaatttggtatgaggttattttagttatacagtaaagctgtattattgcaaactgataaatggattggtgggttttattgggaatggaataaattgaggacacaggactgctacttacagtgtatttttttcaagttttagagatatgaagtataaagtttctgacttaagtattaggtcagtatgttggtattttggttccaaaaatattactggcatgtctatcctgatataagcatgttcttaagatttctgttttacttcatctatcaagtatcctttgaagtctttttgatcttcaaaagaagaatttaaatctcctggatgtctagccaggtgccaagtactcttatcagaatacgtaatttacctagaggtaactggaatgaaaaggaaaaattctgtgtcttattacactgaagtttgttattctatgtatatccatacctatgcattagatgcacatatttagaaatatcttacacagctcctgcattccactttatttactccacctgcaccacaatggctttccagctactccttgaataaaccaccttttctctttctgttccctctgcctgggacactcttccccagatatcttcatgatttcctccctacctcatgcaggtttttatttaaatgccactttcttggggttgggggaggacagaatgggggctgcctgaccactttgtctaaaattatagctcccagacaattcctattcttttctcctgcttttccctcctcatcacatwctacagctaaatttacaatctatttaacttctcttgtttaatgttcaacctttccatcagaatagaagtcatatgaaggaaggatttttgcatgttttgtacattgctatatcctcagtgtctagaacatttgaaagaatgactggatggaatcttgggaagtttcttgaattttactggtgtctcttctagaaaagtacctgaaaatagatgccattatcttaagcttacatgtgctttttaggcatctcagtgctaactgcttcagatatcacctgagggtatttttagataatgatgattcttttttatgaaattaactttgaaatactacatatgtaagcccaagctttttgttctatcttctcagcttatttaagggtcacattgtgcttgtctcctctgtcttagaaaggcgtttatacaaatggggtaaaatttaacccaactcttctacaaatggtggtctagactgagcaagattcacagactctaatatactaggtctggggtagtgcctgagttttctgcatttccagtaaactcctagctgctgctgctgctggcccttggaccacgctttgagaaccattaacattattattattattattattattattattattttgagatggagtctcactctgtcactcaggttggagtgcagtggcgcgatcttggctcattgcaacctccgtctcctgggttcaagtgattctcatgcctcagcctcctgagtaacagggattacaggtgcgtgccaccatgcccagctgatttttgtacttttagtagagacagggtttcgccatgttggccaggctggtctccaactcctgacctcagatgacccacctgcctcagcctcccaaagtgctgggattacaggtgtgagtcattacacccagccagaacttatatttgaggagcaagaagtggtttagctctggttttccctttggaatttcagcaaatctttgagaccagggggaaaattgtagttggaggacttagggaacatggaaagagacatctcacttcttgcagcaccgacactggcacattatttggcttttgagagctcagcagttctagttccatcaccctctcaaagttcgcagaaacttcctgtagaagcttacccacgtattttcagaattagtatttgttatatttaaataagccctaaaagctacgtacagcttctttaggcccagttgtatcattgttcagttaccatttcgctctggccgacagttgaaataattacgtagagttaatgtcgtaagcattgtcaaatgtcagtacttttagtatttatttaagcattatgttagtataaactagacaaaccaaatagccaatagacagttttaataggcgtttcttgctcttaaattcaaatatccgaattttaagcatagaacttagggaagataaataataattgttttaaaattattttgtctgcaaacattcaaattaacagaaaagttacaagaatgagtatgataacatataataacatataacgcccatatcccctttactaaaattcaaccgttgttaacatgttaccccattttgcactctgtttttcctctttcaaccctcacccacacacatatacatgtagtatttttttctgaaccatttgagaatgaattgtacatatccacagccgtttaaacccatatacttcaatgtgtgtttgttctcccatccaagtactaaacagactcaacgctgcttagcttccaagatcagccaagatcaggcgcgttcagggtggtatggccgtagacttcaatgtgtatttcttaagaacgaggatactcttgcccacaactatagcacagatagcaactttaataaatttaacatggatacaatacttctataatctaccattcctactgcagttttgtcaattgacccacattttttattcctccagtataggctaacattttaatctacgttggttggaatttttgtctacagaatatttagtggattcttgtcaaacctgggcgaagacctttatagcattccacaggactttttttttttttttttttgagacagagtctcactctgtcgccgaggctgtagtgcagtggcacggtctcagctcactgcaacctctgcctccctggttcaagcgattcttctgcctcagcctccagagtagctgggattacasgcacctgccattgcgcctggctaatttttttttatttttagtagagacggggtttcaccatgttggccaggctggtcttgaactcctgacctcgtgatctgcctgcctcagcctcccaaagtgctgggattacaggcgtgagccaccatgcccggactccacaggacatgttattttgcccacttttgttctacatttttattggtaacttggaggaaattgttaaatgcatgcctaacaaacgtatagatgacacaaagctggaaggcatatctaatgcaatgatgtttgactctaaaaactcaaaactaatacaatcaatatttatgatagctatcaactccgtgtattgatactgatagaaagccgatgcacacagtgagaagaggtggcataaggaaatgtttattgagggaacatcgccatcatgtggccttttagaatactaccccttgaatcttcaactaacatgtatttttgtttctcatacttaagtgatgtatggttcctttttttttaattaattaatttatttttttgagatggagtttcgctccgttgcccaggctggagtgcagtggcacaatctcaactcactgcaacctccacctcctgggctcaagtgattctcttgcctcagcgtccggagtagctgggaccactggcgcccgccaccatacctggctaatgttttgtatttttagtagagacggggtttcaccatattggccaggctggtctcgaactcctgaccttgtgatatgcccgcctcggcctcccaaagtgctgggattacaggcgtgagccactgcacccagctggttcctttaaaagaaaagaaaaataaaataaataatataaaattgggctggcgcagtggctcacgtctgtaattacagcattttgggaggacaagaagggcagatcacctgagatcaggagttcgagaccagctgggccaacatggtgataccccgtctctaataaaaatacaaaaaagctgggcgtggtggtacacgcctgtaatcccagctactcgggaggctgaggcaggagaattgctggaacccgggaggcagagtttccagtgagctgaaatcatgccactgtattccagccggggccacagagcgagactccgtttcaaaaaaaaaaaaaaaaaaaaattggccgggctcagtggctcatgcctgcaatcccagcactttgggaggccaaggcgggcagatcacctgaggtcaggagttgagaccaacatggtgaaaccccatctctactaaaaatacaaaattagctgggtgtggtggcgcatgcctgtaatcccagctactcgggaggctgaggcaagagaatcgcttgaacccgggaggtggaggttgcagtgagccaagatggcaccattgcactccagcctgggcaacaagagtgaaactccgtctcaaaaaaaaaaaaaaaaaaaaatttcatgaccatttaattttgacttaaattatttgtattaaaatactacttaaatgtggacaaatgtaaamtttagtataaaattaggtatctttagtatctaacacactataatttataggtatttggatatacatgtgcattgtgagtcatacagtgcttcctctcttatcaagtaaatttaaatctgatcctgggtttctcatgagtcctttcttttgaaagatgcataggttctgagtaagaacctcactggggatggcagtggagctgaataagagagtgactactgcagcctgttttaagataggccaagaatcctagcaatcttctcaactgtactaagttcactgattatttttcccaacttttatgattatttttcccaatttttattacgaaaaatgtcaaacatacacaaaagttgaaagaaaatacattgaacaatcatatatctaccacgaagtttcaataagacagactctttaaatcaaaaatcaaattactacagtgaaaacagccatccacagagctttacactattgacgatatataatacaaaatggatatacaatatctccacttgacaaatggactcttaagccatgtaaagaggactactgttccctaatggatgcagagagaaaagtgtctggtaaagtggctgaggctcctgggctaagtctttgattttagagactgtttctgtcttcctaattcatttgctaattctatagcaaacagacactgaaaatcctttaagtgccatacccaggagctttgctcaagagtttgtagggtgctagtagaaagagcctaacaaagcttagagaaactctctagacttaataagagtttccatatatgtagatctttctggatatgggactcaatcaatgtctttaaaggatggaaattcttaccggaaagcagttgccctgatagacacccaaaacctttaagctccttatgtcctcttcattgtggaactagaggtctggaaagagtggctgctataaaaggaaacactatattgtattgtcagattgaaattaaatagaagaattttatctatgcataatagatcattttaagagctactgtgttgttctccaaatagtaatcagaaatctgtattccactcttgaaaaaatgagctttgctgatactgttataggttcttcgaagttcagattactatgagctctggatttatagcaagtcctctggtgtgaaatgaactggttacaatccctgccatacaaagcttctgtcttcacatggcctcattctctatgtatatctgtgtgtctgctcctttttataaggatactagtcattggatttagggctcaccctactccagtatggcctcattttaactaattgcatctgcaaagcccccccctccccytttttttttttgagacggggtctcactctattgtctaggttggagtgcagtggcgcaatcttggctcactgcaacctccgcctcccgcattcaagtgatctgctacctcagcctcccaagtagctgggactgcaggtacgtgccaccatgcccggctaaaaaatagagacagggttttgccatgttggccaggctggtcttgaactcctggcctcaagtaatccgcycgcctcggcctcccaaagtgctgggattayaggtgtgagccactgcccagcccacagaccccatttctgaataaggtcatattctgaggtttcaagtggacatgaattttgggggacattattcaactcactgtaagtatgaaacccctatacaaacaggtgagtgacggcagcttggagtttttaattgggttataaaagatcatataaaggatgaaagttggtagtaaagagagaaggtagctgttaagtttgatcctctaaagaagacactgagatgatgttaggagtgcagacggtttattggggagcaagatctgtgcaaggaaaaaggaagtagttatgccagggagaccatcagaccatgatgaaaacctaacaaggtctctgtcaccccatggggggctccagagcagagagtgctgaaaagcagagtcctcgttgggcagcaatagttaggcacttgttcagttgttggctggggccaatccagctcagctcaaaagctgacagggacttgaaggaattaacagatggaggctgtcagctaatcagctaatcactcaccatgcagctgggcagagatcctcttctttttgtttgtttttttgagagacgcagtttcactggagtttccaggctggagtgcaggggcatgatctcagctcactgccacctccacctcccgggttcaagtgattctcctgcctcagcctcctgagtagttaggattacaggcacgcgccaccatgcctggctaatttttgtatttttattagagacagggtttcaccatgttggccaggctggtcttgaactcctgacctcaggtgatccaccaccctcggcctctcaaagtgctgggattacaggcgagagccaccgcacccagccagctgggcagggctcttgaagggggattctgagcagttcatctccatgtctgtcataaaaggtgttttagtttacagagaatgacatatacgcacacacaaagcaagttgtgtactgaaaaaagcaaacaaatgaacttaataccacataaactacgatggtgtcatgttgttatgtattctgaaggcatgtaacatagaatggttgcccagaattagtctatgagccatagagtttttgttggaaaagactacatcacttggactctcttgcccattttaagattttgtttttttattttactgttgattttctttcatcttcccattaaggctctggagaaaaatcagcagtggctcgtgtatgatcagcagcgggaagtctatgtaaaaggacttttagcaaagatctttgagttggaaaagaaaacggaaacagctgctcattcactcccacagcagacaaaaaagcctgaatcagaaggtactgactggtataaaaatgttctctagggataggcctgacattttccaaaaggaatgattcatcaaatttagatttttatagatatgtgttagaaagtaaaataagagcaagtcttatagccctgaagtaagaaataccatttttgcaagttttatttcctaacgttttcagatcaaaagaaagtaccaacacaggctaatgggtgatctttggcagttctgaaatcacattcagttctctctacccatgaatgtccttcccctttttcaaagtccttctccagcttttacttcccccagagttggccttgtcacaattctcttttcactttgcttcccttcagcacttattcatatcaaccccaggagaaagaatgccttttttagatgatccttaaatcatttgaacttcaggtatagaattgagatgaaatttctcattcacgatgctgtctttttgccaagcactttgcagtttcccttacatagatcttagtggagttttagagcaaccctaagaggcggggcaggaaaggtcagtattctcattttacagatgaagaaataggtttagcaattstagatgacaagctaagaaaagaaaaatgagaaactccatgcaatgctctccttaaaagactgacagtttggaggggaccaaagccttgaattttatagagaagtctaaagaaaggggaacaagactcataagattggagaatcatatttgaatacttaaaacaaagctaatgctaaaaagaaactataaatgtctctggaggcacttcaaagctgtcagccctaatggcactaagttgcttctataaaatatgtgcttatgtaaaagcaggattttagttatgggctaagtctaatttcttttctttggtaatacagttctctctctctctctctctctttctctgtgtgtctgttttatcaaagcaatataagcacttgttagaataatgtaatagttaagaaggaccttgccctgtctttcccatcccaatccccgtttcttcctcccatcaggcaactgctcttaatatttctatttttaattttgatagttatctccacatataaataatgagcttgtgttcctatttgttgattgaacttcttgagactttccctcccaacagaatagatgttactgtttttagttcttctatttgtgagttttataacttcaaatagtatacctgaacttgttttttatttcatcaaatatcaaccatagtccctatctcttgacttttcatgttgtaaactaaggaaatagtgtgattcatttagatgtttgatgtttctcttttcaggaatattatttattttataaagtgagttgtgccrtaatgttgtttgtcatagrttatcttcaagaagagaagcagaaaygttacaacgatctcttggcaagtscaaaaaaagatcttgaggttgaacgacaaaccataactcagctgagttttgaactgagtgaatttcgaagaaaatatgaagaaacccaaaaagaagttcacaatttaaatcagctgttgtattcacaaagaagggcagatgtgcaacatctggaagatgataggcataaaacagagaagatacaaaaactcagggaagagaatgatattgctaggggaaaacttgaagaagagaagaagagatccgaagagctcttatctcaggtaaacttaaccagatccataattcagagtgttcaccgaacactttctaagtgtcagggactatttgaccactagagaactggctagggacaaaacaaattcctgcccctcatgggagttatattccagaacagaaacagaccataaacaataaataaggaaactaaagaaaatgcaacagggtgacatgacaaagggaaattggggaccagtggaggcctctctgaggagatggcatttggacaaagacctgatgatgaggaggacccagtgaggtgggtgacttttcctctcaatggaggaaattgtacacacaaaggctctgagtgaggaggaggtcagtatatgtgagaagccaaaagaagaagtgaagtaatgagaggaatcgaggctgattcctagactggcatcttaatggtgatgatatgtgctcaagtgaattcacatggcatcttccatgttcttgttatgctcatagccttatgctatggtatcataataatgttggagttactacgttaggattattggaattgaacagtactttgatggaactctttaatttagattttgctttgcagcctggcatcatggaaggaacattatttggaatccatgcctagtctctagtccaggatatatggccttaggcaaatcacctaacttctctgactactcactggttattcccttgtcaaattaataataacctctgcttgccatatagggctttggtgagcgtcagttgagagaaggtaaaagtgctttgtaaactaagcgaggtaaatgctagttattgctactattttaataataatttttaacagtcctacaaaagttgagggtgctggtgatgggacagtaacaagtccatctataacatttgccatcttagtcttttttttcytttttttttctgagacagggtcttgctctgtcgcccaggctggaatgcaatggcgtaatctcagctcactgtaacctccacctcctgtcttcaagtgattcttgtgcctcagcctcctgagtagctgggattacaggtgcccaccaccacggctggccaatttttatatttttagtagagatggggtttcaccatgttggccaggctggtctcaaactcctgacctcatgtgatccacctgccttggcctcccaaagtgctgggattacaggtgcaagccactgtgtccagcctgccatcttagtctttaccactcacacttcttctgtctacaggtatgagcagtgatactagggagagattaagtctgctgattaaattttgcttcagctctggctaagggcccagcactgccacccatgttatcctactcagaagtgtcagaacctccaggaaagggggcatggctgctgcagagttcagtgctgtttatcagcattcagtctgtgtgcctcagggaactctcggcaagggcggtggtatactgcttagctgctggcatagatagccatcagatggccagctggaatgattcacccctgactagcaggtgttgtcctggttagagatgtgagacttgtgatgtgagctttccgtgcatcccaggtcaagccggaaaaggytggatgtgacagcattggttctctttatgtcctacaggtccagtttctttacacatctctgctaaagcagcaagaagaacaaacaagggtagctctgttggaacaacaggtactcattcgggttgcttctaaattcaattctgcctgttagaaaatgcagtttttcctcatgtttatgctgttctatggagaactgtttgaaagttgtgaaaagtgtctttaaaagacttcartaaaagtctttyttcttcaataaaaaagatatttcaagagactctgctagccacttattcctgttgctgaccttaggctaaacagattcttgaggtgtgatggcagttttcttgacaggtagatgttggccttggcaaattttgctcttccccagtggctgtagctcctagcctaacaatgtctcctaagtagggctaccttataacttcaagcagaacttggagagacaccatttagtctcagaatgtattataaatggtgtaaagcagagatttttagtatattccaaaccagggaatagctatctctttcccttctccttcttcccccttaaaaaaggtggatagggaggagtaattctaatcaacaacttcttaagctgctcttcattcacctatacctcagcgttggctttgctccttggataaaccaaatcctcagccataagctgcctcgtttattaacatttcatggtgcttaggtgaattcttgctacgatggtacaataaatattttcttcatgtgctaataaaaaaatgtgagcatccagtcaagagaactagacagtctgtatcagctgtaatggtcttgttctgggccttttccagatgcaggcatgtactttagactttgaaaatgaaaaactcgaccgtcaacatgtgcagcatcaattgcwtgtaattcttaaggagctccgaaaagcaagaaatcaaataacacagttggaatccttggtgagtctggaatgattaaactaaaatttgtcttcgtcttccatttatataccaaatcagttccgaacttaggaggatacagcttaacgcacagctagctgtatctcaaatcagtaggtagagcctctgcctcatttgaagcaactgccctttgagcatcaattcagaggacatgaaagagggacatgatcacatctggaaacattyccccaactaccccagctgctgtgatgctggaggcactaaatagtgcctgagctggggtcaaaagggtagaatagagggtagtcacagaatcctgaactgaaattgtgtttatctattaaaaaagaaagaaaggctgggcacgatggcttatacctttaatcccagcgctttgggaggccaaggcaggcggatcatgaggtcaggagttggagaccagcctgaccaacatggtgaaaccctgtctctactaaaaatacaaaaaattagccgggcgtggtggcgggtgcctgtaacctcagctacttgggaggccgaggcaggagaatcacttgaacccgggatgcagaggttgcagtgggctgagactgagccactgcactccagcctgggcagcagagcaagactctgtctcaaaaaaaaaaaaaaaaaagaaaaagaaaaaaatgctgtttttagggataatggactattactgttaatatgctttttagatgtattatgaggtttgtgtgagtcactctgaaaacataatcttttaaaacatgaaccttttaaataatattgtttctatgatgaaatggtttttcacttacttattctcaccttactaataagcttttggaccaaacttgttgggggtctgcatttgaatatatgtctgtcccactagtacatattttaaattttattctactactatagaatacttggagacagtgaaatgttacaaatatgattcctcagttttcaaaggaggaaaaaaaaacaatgataaaagtaaaaatcacttgtaacttctgtatgaataaaagaaagaaaatatatttttggctctgttcttaagtatataattgattttacccatttataatatttgaaatgaaaatttataattcatttttgttattgaccattcaaagcttagggagcagagggtatgcaaaagaatttgtaattttgtgggggcggttccaagatggctgaataggaacagctccagtctacagctcccagcgtgagcgacacagaagacggatgatttctgcatttccaactgaggtactgggttcatctcagtggggactgtcagacagtggatgcagcgcaccgagcgtgaaccgaagcagggtgaggcatcgcctcacccaggaagcgcaaggggtcagggaattcccttttctagccaaggaaaggggtgaccgacggcacctggaaaatcaggtcattcccaccctaatactgcgctattccgacggtcttagcaaacagcacaccaggagattatatcccacgcctggcttggagggtcctacacctacggagccttgctcattgctaccacagcagtctgagatcaaactgcaaggtagcagtgaggctgggggaggggtgcccgccattgctgaggctcgagtaagtaaacaaagcggccgggaagctcgaactgggtggagcccaccgcagctcaaggaggcctgcctgcctctgtagactccaactctgggggcagggcatagccaaacaaaaggcagcagaaacctctgcagacttaaatgtccctgtctgacagattggaagacagtagtggttctcccagcacgcagcttgagatctgagaacggacagactgcctctacaagtgggtccctgacccccgtgtagcctaactgggaggcaccccccagtaggggcagactgacacctcacacagccgggtacccctctgagacaaaacttccagaggagcaatcaggcagcaacatttgctgttcaccaatattcgctgttctgcagcctccgctgctgatacccaggcaaacagggtctggagtggacctctggcaaactccaaaagacctgcatctgagggtcctgactgttagaaggaaaactaacaaacagaaaggacatccacaccaaaaccccatctgtatgtcaccatcatcaaagaccaaaggtagataaaaccacaaagatggggaaaaaacagcagaaaaactgaaaattctaaaaatcagagtgcctctcctcctccaaaggaacgcagctcctcaccagcaatggaacaaagctggatggagaatgaagagttgagagaagaaggcttcagatgatcaaacttctccgagctaaaggaggaagttcgaacccgtggcaaagaagttgaaaaccttgaaaaaagattagatgaatggctaactagaataaccaatgcagagaagtccttaaaggaccagatggagctgaaaatcacagcacgagaacaacgtgacgaatgcacaagcctcagtagccgatttgatcaactggaagaatgagtatcaatgatggaagatcaaatgaatgaaatgaagtgagaagagaagttttgagaaaaaaggataaaaagaaacgaacaaagcctccaagaaatatgggactgtgtgaaaagaccaaatctatgtctgactggtgtacctgaaagtgacgaggagaatgcaaccaaattggaaaacactctgcaggatattatccaggagaacttccccagtctagcaaggcaggccaacattcaaattcaggaaatacasagaatgccacaaagatactcctcgagaagagcaactccaagacacataattgtcagattcaccaaagttgaaatgaaggaaaaaatgttaagggcagccagagagaaaggtcgggttacccacaaagggaagcccatcagactaacagctgatctctcagcagaaactgtacaagccagaagagagtggggggtcaatattcaacattcttaaagaaaagaattttcaacccagaatttcatatccagccagagtaagcttcataagtgaaggaaaaataaaatcctttacagacaagcaaatgctgagagattttgtcaccaccaggcctgccctacaagagctcctaaaggaagcactaaacgtggaaaggaacaaccagtaccagccactgcaaaaacatgccaaattgtaaagaccatcgaggctaggaaaaaactgcatcaagtaaagagcaaaataaccagctaacatcataatgacagggtcaaattcacacataacaatattaaccttaaatgtaaatgggctaaatgctacaattaaaagacacagactggcaatttggataaagagtcaagacccatcagtgtgctgtattcaggaaacccatctcacatgcagtgacacacataggctcaaaacaaagggattgaggaagatctaccaagcaaatagaaaacaaaaaaaggcaggggttgcaatcctaatctctgataaaacagactttaaaccaacaaagatcaaaacagacaaagaaggacattacataatggtaaagggatcaattcaacaacaagagctaactatcctaaatatatatgcacccaatacaggagcacccagattcataaagcaagtccttagagacctaaaaagagacttagactcccacacgataataatgggagactttaacaccccactgtcaacatgagacagatccacgagacagaaagttaacaaggatatccaggaattgaactcagctctgcaccaagcggacctaatagacatctacagaactctccacctcaaatcaacagaatatacattcttctcagcaccacaccgcacttattccaaaattgaccacatagttggaagtaaaacactcctcagcaaatgtaaaagaacagaaattataacaaactgtctctcagaccacagtgcaatcaaactagaactcaggattaagaaactcactcaaaaccgctcaactacatggaaactgaacaacctgctcctgaatgactactgggtacataacaaaatgaaggcagaaataaagatgttctttgaaaccaatgagaacaaagatgcaacataccagaatctctgggacacatttaaagcagtgtgtagagggaaatttatagcactaaatgcccacaagagaaagcaggaaagatctaaaactgacaccctaacgtcacaattaaaagaactagagaagcaagagcaaacccattcaaaagctagcagaaggcaagaaataactaagatcagagcagaactgaaggagatagagacacaaaaaaactttcaaaaaatcaatgaatccaggagctggttttttgaaaagatcaacaaaattgatagaccgctagcaagactaataaagaagaaaagagagaagaatcaaatggacacaataaaaaatgataaaggggatatcacaccgatcccacagaaatacaaactaccatcagagaatactataaacacctctacgcaaataaactagaaaatctagaagaaatggataaattcctcgacacatacaccctcccaagactaaaccaggaagaagttgaatctctgaatagaccaataacaggctctgaaattgaggcaataattaatagcttaccaaccaaaaagagtccaggaccagacagattcacagccgaattctaccagaggtacaaggaggagctgataccattccttctgaaactattccaaacaatagaaaaaaagggagtcctccctaactcattttatgaggccagcatcatcctgataccaaagactggcagagacacaacaaaaaaagagaattttagaccaatatccctgatgaacatcgatgcaaaaattctcaataaaatactggcaaaccaaatccagcaacacatcaaaaagcttatccatcatgatcaagtgggcatcatccctgggatgcaaggctggttcaacatacgcaaatcaataaacgtaatccagcatataaacagaaccaacgacaaaaaccacatgattatctcaatagatgcagaaaaggcctttgacaaaattcaacagcccttcatgctaaaaactctcaataaattaggtattgatgggacatatctcaaaataataagagctatttatgacaaacccacagccaatatcatactgaatgggcaaaaactggaagcattccctttgaaaactggcacaagacagggatgtcctctctcaccactcctattcaacatagtgttggaagttctggccagggcaatcaggcaggagaaggaaataaagggtattcaattaagaaaagaggaagtcaaattgtccctgtttgcagatgacatgattgtatatctagaaaaccccatcatctcagcccaaaatctccttaagctgataagcaacttcagcaaagtctcaggatacaaaatcaatgtgcaaaaatcacaagcattcttatacaccaataacagacagagagccaaatcatgagtgaactctcattcacaattgcttcaaagagaataaaatacctagaaatccaacttacaagggatgtgaaggacctcttcaakgacaactacaaaccactgctcaacaaaataaaagaggatacaaacaaatggaagaacattccatgctcatggataggaagaatcactattgtgaaaatggccatactgcccaaggtaatttatagattcaacgccatccccatcaagctaccaatgactttcttcacagaattggaaaaaactactttaaagttcatatggaaccaaaaaagagcccgcattgccaagtcaatcctaagccaaaagaacaaagctggaggcatcacactacctgacttcaaactatactacaaggctacagtaaccaaaacagcatggtactggtaccaaaacagagatatagaccaatggaacagaacagagccctcagaaataatgccacacatctacaactatctgatctttgacaaacctgacaacaacaagaaatggggaaaggattccctatttaataaatggtgctgggaaaactggctagccatatgtagaaagctgaaactggatcccttccttacaccttatacaaaaattaattcaagatggattaaagatttacatgttagacctaaaaccataaaaaccctagaagaaaacctaggcaataccattcaggacataggtatgggcaaggacttcatgtctaaaacaccaaaagcaatggcaacaaaagccaaaattgacaaatgggatctaattaaactaaagagcttctgcacagcaaaagaaactaccatcagagtgaacaggcatcctacagaatgggagaaaatttttgcaatctactcaacctacaaagggctaatatccagaatctacaaagaacttaaacaaatttaaaagaaaaaaacaaccccatcaaaaagtgggtgaaggatatgaatagacacttctcaaaagaagacatttatgcagccaaaagacacatgaaaaaaatgctcatcatcactggccatcagagaaatgcaaatcaaaaccacaatgagataccatctcacaccagttagaatggcaatcattaaaaagtcaggaaacaacaggtgctggagaggatgtggagaaataggaacacttttacactgttggtgggactgtaaactagttcaaccattgtggaagtcagtgtggcaattcctcaggatctagaactagaaataccatttgacccagccatcccattactgggtatatacccaaaggagtataaatcatgctgctataaagacacatgcacacgtatgtttattgtggcactattcacaatagcaaagacttggaaccaacccaaatrtccaacaacgatagactggattaagraaatgtggcacatatacaccatggaatactatgcagccataaaaatgatgagttcatgtcctttgtagggacacggatgaagctggaaaccatcattctcagcaaactatcgcaaggacaaaaaatcaaacaccgcatgttctcactcataggtgggatttgaacaatgagaacacttggacacaggaagggggacatcacaccccaggacctgttgtggggtggggggagtggggagggatagcattaggagatatacccaatgtaaatgatgagttaatgggtgcagcacaccaacatggcacatgtatacatatgtaacaaacctgcacattgtgcacatgtaccctaaaacttaaagtataattaaaaaagaatttgtaattttcctgtactttgttcctgctatccaccctcttcactgtgctgtaaaatactcatttttaactactccaagttcttagaaaaaaaacacaaaaaaggaaagtctcaaaggtatgatagaatatcttagtcatttctgtgtataagctgtttgagctgctaaaattgcttgctgcctttaatttccatgtagtactttattgctgacgttgcctctgttttacaaaactagcaaatttaatcagccttgcatataggcctacctaatattcgactctgtgtcctaataaaacatattcatatatacacccaactcccatatctgggtaatttggataattacagtagttatctggataaattcacaactacctcatatattaccctcataatactgatgagctgaaattcaaaagaaaatctgtctacagtgctgaagcagctataatacttatggaacagttaaaattgctgaacaggctgggtgcagtggttcatgcctgtaatcccaacacttcgggaggctgaggtgggcagatcacttgagcttaggagtttgagaccagcctgggcaacatagaattaattttttgtagaattttctatttctacaaaaaatagaaatattatctggacgtggtgacatgtgcctgtagtcccagctacttaggaggctgaggtgagaggattgcttaagcctgggaggtcgaggctgcagtgagccatgtttgtgccactacactctggcctgggtgacagagtgagactgcctcaaaaaaagaaaaaaaaaaaagctgaacattggccctatttacaaattctattatttgaaacttatttttcagaaacagcttcatgagtttgccatcacagagccattagtcactttccaaggagagactgaaaacagagaaaaagttgccgcctcaccaaaaagtcccactgctgcactcaatgaaagcctggtggaatgtcccaagtgcaatatacagtatccagccactgagcatcgcgatctgcttgtccatgtggaatactgttcaaagtagcaaaataagtatttgttttgatattaaaagattcaatactgtattttctgttagcttgtgggcattttgaattatatatttcacattttgcataaaactgcctatctacctttgacactccagcatgctagtgaatcatgtatcttttaggctgctgtgcatttctcttggcagtgatacctccctgacatggttcatcatcaggctgcaatgacagaatgtggtgagcagcgtctactgagactactaacattttgcactgtcaaaatacttggtgaggaaaagatagctcaggttattgctaatgggttaatgcaccagcaagcaaaatattttatgttttgggggtttgaaaaatcaaagataattaaccaaggatcttaactgtgttcgcattttttatccaagcacttagaaaacctacaatcctaattttgatgtccattgttaagaggtggtgatagatactattttttttttcatattgtatagcggttattagaaaagttggggattttcttgatctttattgctgcttaccattgaaacttaacccagctgtgttccccaactctgttctgcgcacgaaacagtatctgtttgaggcataatcttaagtggccacacacaatgttttctcttatgttatctggcagtaactgtaacttgaattacattagcacattctgcttagctaaaattgttaaaataaactttaataaacccatgtagccctctcatttgattgacagtattttagttatttttggcattcttaaagctgggcaatgtaatgatcagatctttgtttgtctgaacaggtatttttatacatgctttttgtaaaccaaaaacttttaaatttcttcaggttttctaacatgcttaccactgggctactgtaaatgagaaaagaataaaattatttaatgttttaatatgtctagtgtattcgtgtatatatagatattctaagattcttgtttaaaaaaacaaatgtgttggacataatcaaaattcaagattttcacaataaaatatttaagacataattcaaagcacattatcaaaaaagtgaaaatacaaccaacagaaagagaaaaaatattttcaaaccatgtatctgataagggtctagtatccagaatatataaagcaccattacaactcaataaatagatattctaagattcttacccccaaggacttatcaggggttacagattaacactcagtgtaagatgataaggcagttaaggatacatcagaaccgaaaactatgtgaaggagttagaaggagtagatgctttcacgcatctttcttaaataaataactctttatcaataaatatgaatttgagttrtttgttacagaggcaaaacaataagcatgccaaattatatagggtttttttttctaaccatagaaattatacagatctgtttatggaaataaaattttgccattactgttaatcccaggctcacaagatcttcaactacagttgaacaaaagatatggacatattcagccgcatagttcttattccgatccacaatgttatagcaaagaccatagtattaaatcataaatatatgccataaggaagttgctccccttacaactttaaagcaagccagtattacctctagtttgtagatgtggaacatgtcttggtcatccagtgagcagtggagtcaagcagaacccaggcctttggtccgtgcctgtatggaacaagagatgtggtctcatgggataactggccaggacataaaccataacagaagcgccagcctgatgacctctgaagtttgattcccagagccacagggtgatctggagtttgtttcaagactcttgtactttctgtgtttcactggagggctgtacttagctttccctgctcactttagccacctacatctgggcaccaatatcaaaaaaatactttggaaaaattgggcaggcttcttgtggagctctgctactgtagagggggaatttatatatttccgaagagtagatgatttagagcaggaaggattctactttcccagatcatgttaccaaagcaagggtcaataaaaggcatcttcaagacctgaaaatcttcaaggttctcataattgaagactttttttcccccttcactgtccaccttttttcttggcagataaccacttacccttagggcatgttttcttctgtgggactgtaaactaccagaaaccatgctagatactttaactacttatactcattagctcttccttgcaaatctgtgaagtaaagtgctagcaccagcaccatttttcagatgagaaaactaaggcttgcagagagtgaacaatttgcccaaggtcaccactgataagtagtaaagaaaggatataaactcagctcagtgtgtcgcagagttcatctctctccattgtacagttacattcccaaccaacatgctggggctgccatgccaggattactccactctgttgctttttattaaaaaattatgttacatattttattacacaattattttacataaaataaaatgtacagatcaatgagttttgacagatgtatatatatatcattgtaatcatcagccaaataaagttatagactctaccaacatttctgaaagtttctttaattacttctagtccagaatcccctcctcccagaggcaatctaatttatttttatttttatttatgtatttatttttagagacagggtcccctctgtcacccaggctggagtgcagtggtacagtcatagctcactgcagtcttaaactcctgagctcaagtgatcctcctgcctcagcctcccaagtacctaggactgcaagcatatgccaccatgccttgctaatatttttaattttttatagagacatggtctcattgtgttgtccagtctggtctcaaactcctgggcaaatgcaattctcctgccttggcctcccaaattgttgggattacaggtgtgagtcaccgcacctggccctatttatcttaacacatgctaaattaataactacactaattaactaaattactaaatgccacaataaattaacaaaattaataagactaatgctggagtgttattgtgtcttgaaatcagggtaagtcccccaactttattcttcaagaatgtcttgactaatataggacatttccattttcatatacattttaaaatcagcttgtcaatttttacaaaagttycctggaatttccattgggatagtatatatctatagattaatttctcaaaaattgacatctgcacaatccagaaacatttcttcatttagttcttttttagctgctctcagcaatgtttacagctttcagtgcatagagcttagccttttattaagtttattcttgaaagtctgagttttatgctattataaatggccttttaaaaatttattttccagccaggcgcagtggcttacacctgtaatcccagcactttgggaggccgaggtgggtggatctctcgaggtcaggagttcgagaccagcctggccaacatggtgaaaacccatctctactgaaaatacaaaaattagccaggagtggtggtgtgcacctgtaattctagctactggaaaggctgaggcacaagaatcacttgaacccaggaagtagaggttgcagtgagccaagatcatgccactgcactccagcctgggcaacagagtgagactctgtctcaaaaaaaaaaaattattttctaattgtttgttgctagggttagaaatgcaactgatttttgtatattgacctagtagcatcctggaatcttattaatttattaattaattttagtattttcacctctctgaattcaaatattgtattttacagttctagaacagtgctgtccaatggaaatatgcaagcctcatgtaattttgttttccagtagccacattaaaaaatactaaaatagacaaggcatggtggctcacttctgtaatcccagtactttgggacgccaaagcagacagatcacttgagcccaggagtttgagaccagcctgggaaacatggcaaaactctttgtaccaaaaaaaaaaaaaaaagaaagaaaaaaaaaattaactgggaatggtggtgcatgcctgtagtcccagctactcaggaggctaaggtgagaggatcacttgagcccaggagctggaaattgcagtgagtcaagatcatgccactgcactccagcctgagtgacagagtgacaccctgtctcaaaaaaaaaaaaaaaaagaaaagaaaagtaaaacaacaacaaaagtagtaaaatagccaggtgcagtggctcatacctgtaatcccagcagtttgggaggccaagggaggaggatcacttgaagctaggagttcgagcctggcctggacagcaaggagacccctccatctctacaaaaaataaaaaaagtaaaataattggtgtagttaattttaataatatgtttcatttaactatacatatcccaaatattatcacttaacatataatcaatataaaaactattaatgagctattttatgctaaatctttgaaatttagtatttcaaaattactgcacatctcaatttggactaaccacacttgaaatgctcaatagccacattgtggctgtcgtggctaagggctaccatgttggatagcatggatctaggatctctcttcttttactagagttcccatttctcttctgagttctctattcacccattctgtccatttcttcctgtaaattctttagcatattcatagcagcttaaaacagttaacatagatgctaattccaacatctaggtcatctatgtgtctatttttattggctaatttttctcattatgggtcacattttttgtgtttctatacatgtctattaaattttttagtataggagtgacattgtagatgatacattacagaaattctggattattttccttttgagaatatacagttgtgttcttggagactcaaattgccacatttgtttaggctgtatttcaccatgcactgtcaggactaaataatactcatgggggaaaaccagttaaatatagaactcactttgcttcccttctttcaagagccatggccattccagtggctgcctgcctttggttgttcttcattgccatcaacagttgtttttcatattttgtccagagtttataattgttattgaatagtgggttagtctgataaaagctacactgtcattaccagaactggaaccatctactggttttggtattttctgttgttgttgttttgttttccttttttattttattttattttttttcttaagaagtctgttgtatttgagcaggagtttatgctaggagccatattctgtgtgtgcatgtccagcctccaacaaacccacaaactggtgattccttggtgactttaatatcagcaaacgtaactctcgtcctcagacagaaggcagatggaggtaaatggagaagggagggaaggataaatgagttataggatccattgctttcaccaagagcttaatgttttaaaggcaggggctacatgatagaaaaatacattcaaagaagagaacttcatgggaaaaactaaaacctctgagtttcccactatgtgctaaatttgtggttatgtgttactttgtcaagggctacagctagccacttggattttttgtttttttgtatttttttttttttgagatggagtttcactcttgttgcccaggctggagtgcaatggcgtgatcttggctcaccgcgacctccacctcctgggttcaagcgagtctcctgtctcagtctcccgagtagctgggattacaggcatgtgccaccatgactggctaattttatatttttattagagacggggtttctccatgttggtcaggctagtctgaaactcctgacctcaggtgatccgcccgccttggcctcccaaagtgctggggttacaggcgtgagccaccgcacccggcccagctagctactttgacagccaagaaaactgaagcaaatcccccactaacatttaaaaaacaacaacaaaaagacattcctgggtttccaacccaaatccatagccaaagcccatcttctttctaccatgccagaaaaccccttatatattctccaaactcagtaaccttaagtgaaatgtgtaaagtgaaataaccttaaatgagccttaataaaaccttaactagagtaatagaatttttcttaggttagagagaaaaaccgaaaacaccaactggtctcttgcacccctctgatctgagaagaaggcctgccttgttcaacccctccatctgttacctggattcccactatgccagttctctaacatctttactttcattcttcaaacatttattaaatgcaaagctctgggctcagtattagcgataagcagcttgataaagataaaatgcagcttgatcttcacagtctagcggaagagaccaatatctaaacaggtaagtataatacattgtagaaagtgctataatcaaggtatatatagggtagaggagtttatttaaactctggtttattctaacaaagatcaaagatctgactcttcaaagacacaaatcttagactaacatagaataaaaaataagtaggaaaaatacacatctaagaaaggaaaatagagccactcacaagggtagctccccaggcaggccatggagcctttccaagacagccatgagtttggtgctgagctttgcagatggtggcacaaagaaaccatcctggtcgcttcaaagatggccgaataggaatagctctggtctatagctcccagtgagatcgacacagaagacaggtgatttctgcatttctaactgaggtacctggttcatctcattggg

SEQ ID NO: 6885 - DNA, 65424 bp, Homo sapiens
  misc_feature (1)...(65424): n = A,T,C or G, or insertion/deletion polymorphism (see Tables 1-2)
ggctgttattaaaaagtcaaaaaatagcagatgttggtaaggttgtggagaaaaaggaacactcatatgctgttggtgggattgtaaattggttcagtccctgcggaaaacagtgttgagatttctcaaagaactaacaatagaactcccatttgacccagcaatcccattactgggtgtctatccagtagaaacccaaaagaaaatagatcatgctacctaaaagacacctgcactcacaagtttatcacagcactattcacaatagcaaagacatggaatcaacccaggtgcccatcagcggtgaactgggtaaagaaaatgtggtacatatgcaccaatggaatactatgcagccatacaaaaaacaaaatcatgtcctatgcagcaacatggatgcagctggaggccattatcctaagtgaattaatgcaggwacagaaaaccaaataccacatgttcttacttataagtgagagctaaacattgagtatacatggacacaatgatgggaacaataggcactggggcctccacaaggacaaaggaaagggttgaaaaactacgtattgagtactatgctccctatctgggtgatgggttcaactgaagctcaaacctcagcatcatgcaatatacccatataaaaacctacacgtgtaccacctgaatcagacattttaaaaaataaaatatgttattttctgaaattgattttgtttttttcagtgcctagtagcagacagccaataagagacacaaagatcttgctaacactggcaagaagctctgcaaagaactatcccaagaggaagagctatggaaatcacaggacttcatcaagaacaagaaagaaagaaaaggctattggtgtgtgtgctaaaaggaggcttctaatattacccatttaaaaatctttgataaaatgtcatttgtcttagttcaggtggctataacaaagtgtcatagaaggagtggctcatagttctggaagctggaggtctgaggtcagggtgccagcatggtcaggttcagtgatggccatcttcctcttccaggtcacagacagccatcttctcctggtatcctcacatggaagaaagagggctggagagctctctgggggccctttaataagggcactaataccacttgtgagggttccatcctcatgacctagtcacatcctgaaggccataccgtctaataccatcacattagaggttaggatttcaacagatgagttttaggggaatacaaacgttcagtccataacttcgctcaacactcaaagtagttaacagtgaccccttctcttgtgtgctttttctaactaatcaattgcctcgtcctgtcaattgtcatgacacatttgctggattgtgtctcacatttgtccttttctttttcattcccaagcaacttcacccatagactgcagagataacctcaaaatctttgtttatgaatgacttaatttctttattacataaagtatatatgttcattgtagatgctttacaaaaatcaggtaagcaaaaaagaagaaaaaaattaatgtcttgaatcccaccactttgaaataactttttttttctgagataggttcttgttcagtcgcccaggttggagtgcggtggtgcgatcacagctccctgcagcctctacctcctgatctcaagccatccccccatctcagtcccagtctcagctgagactacaggcatgtgccaccaagcccagctaatttttgtaattttttgtagggcggggtttcaccatgttgcctaggctgctgtcagactcctgagttcaagtaatttgcctgtctcggcctcccaaagtgctgggattataggcatgagccactgtgtcctgccttgaaataatttcacttaatattttggtatatatacctctgtctgtgcatattaatggaattatgctgcaatactgtttgtaattaactgcatatcataaatattttttcatgtcaatagactttaacaatattattaggttggtacaaaagtaattgcggtttttgccactaaaagtaatggggaaaatcgctattatttttgtaccaacctaatagctgcgtagctttctattttacagatctaataccatttatttactcaacctcctactattaagtgtctaggctatttctgatcttttacttttatacccacactcatggtaagcacccttgcaactatattaatcacatacattcttaattatttctctaagatgaattcataaaagcagaattgtggggtcaaagcctatacacatttttaggttgtttgataataagccaaatgcaataaagtatcttaatctgtatcccaatgtccagtattctgttttcctccaacttatcttcctccttaagtttgtaaagaagaacactaataatgttgcctcccacttcaaaaattgtccaggattcaaaatcctcagtctaggctttgaagcccttctaatctgggcccggcccaccttttcagggtcacctctcactgtcctccctgtattaccctacaccccatgctattgcttctgaacactcttgatttctaccctgtcttcagccacactagatatgatccctttcgtgaactccgatagccatgtacacgtgcctcacttccagcattaattgtattctgttctatgtctcatgggctttttacgcactagtcttacctcccttcccacaccacaagtgcttgtaatgctgggaccaccccctgagtccccgacagtagaagtgtaactgtcagaattgtcttggtgatgctgcagtaacaacaaccctcaggtctccgaggctgaaaacaagacaagtttatttctcatcatgctacatgtccatctcgggtcatccaggggcctctgttacatgacatcctcactctgggattcaggggccctttcatctgaaactgatgtggcagcagagggaacagagacctggagagcctcccgttggcaattaattgttcctgtctgaaagtgatatttctgcccacaaaccatttgttaaaatcagtcacatggctgtaccagagggaggaagagtaatcttcccatgtaactgggagaaggaaacaatcatataatataaggggaacttgaagtctctatcacaatagctagaatggtgccttgcttgtaacagacaatcaatagacaaatgttgaaagaatgaacaaatgaggccaggtgaagtggctcacacctgtaatcccagcactttgggaggccaaggagggcagattacctaaagagttcgagaccagcctggccaacatggtgaaaccttgtctctactaaaaatacaaaaaaattagccaggtatggtggcatgcacctgtaatcccagctactccggaggctgaggcaagagattcgcttgaacccgggaggcggaggttgcagtaagccaagatcgcgcctgggcaatagagggagactccatctcaaaaaaacaaaaaagaaagaaagaatgaacaaatgaatgaatctctaactagttataaaaacaaaagaatgctgactataataggatgtttctttttcaaattaatattcacttttataagattatgaaagatgggccgggcacggtggctcatacctgtaatcccagcactttgggaggccgaggcgggtggatcacgaggtcaggagatcaagatcatcctggctaacacagtgaaaccccgtctctactaaaaatacaaaaaattagccgggcatggtggcaggagcctgtagtcccagctactcgggaggctgaggcaggagaatggcatgaacccaggaggcagaggttgcagtgagccgagatcgcaccactgcactctagcctgggcaatagagcaagactctgtctcaaaaaaaaaaaaaaaaagattatgaaagttgaacatatatgggcattttgttttttctttttctattaagtataagtctgtatatgaaatgcaaatatgtgtttttccctctctgtttcaagagggaaggatgaaaccaggaaatcgtgagcacaccacatacttacaggagaagtaggaactgtaccatgagtcacacaaaataactaggtaaaaaagagtgtccaaaattgttagataaggaagatggtcccataggaggggtgactcagttgactcaactctctcctgggaaatacacttctgcattatcctatttataataacagggtgttatgaagtaaatagtcacccaaagaggaacctcctgagagtagagttgagtgtgacataggacagtccaagaaaatatgtgcacctgacaaggtgctttgaggtagcaggtgaagctcaatcacaagaagtggcataactcaacaaatgactctttctgtacccctgggaaaaccatgtttcccaccaagaatctctcaattcatgacagggaatgtgcaacctcaacggatctctctttcttttgtgactattaagattactatctctcaggctgacacaggtggatcacctgaggttgggagttcaagactagcctggccaacatggtgaaaccccatctctaccaaaaatacaaaaattagctgggcgtggtggcacccacctgtagtcccagctactcgggaggctgaggcaggagaatcacttgaacctaggagacggaggttgcagtgagctgagatcgcaccactgcactccagcctggcaatagagcgagactcagtctcaaaaaaaaaaaaaaaaaaaaagaaaaagattactatctagagaggtaaatcttagagaactcaatgaaactcatagggtttctatttttgaagcaaacttaaatgtgggtgtaacaataatttttagagtcactgtaacatgtgtgtgttttccacttaagagaatttgtcatattaggtttgtagctttattgaagtgtttaaaacaccttgactaagtttgaaaccaacatttaagtatcgaaggcaattggttcatgaattaatagtttgaattattagttgcataatagtgtttaaatatttgaggaaatgtgtttaatagatgtaaaagcttagtaaagtgaacattaaacaaaactaagtagtggtaagtgttctttctatgccagtagcccctgagacgttaaggatcctagcaacagacaagatatctatcatctagtagatttagtagactgtatgttgtagcaaaatcgcatgacctctggctattactattgaaaacaaaatcctaactaagatacttagcagaaaaacccagccagcaactatgtaggttaccttttgtaattacagtctctcgacaagggttattattcaattcatgacttgattaggtttggatcattggcaaatattttgctatgttcacctctttagtaataagcttgaggtttactcctttaaaacacttctgaggtcaagctttctgaagtgacagggattgagaggtgaaggttctagagaaagaggaggccaagcaaccttggtgatcaaaagacttttaagaaaaggaaagattaatattcacctttatgttgcagtgatgcaaactgttccatatctcccagatgttcattacagttgctatataaacaaaaaaaatccaagcacttccgaggtctaaatagttttacttcctatagctatcatacaagaacgattcaaagtgccaattgttgccaatgtcgtgtcattcatggatatgtcagtgattcttccttgctgtggacagcagccgacattcagttatttttctggaatagacacctcagcttgctacttgctgggctgatctaagatactctgaagattcgctagggacttatgagctactaatgctcagggatttagtgtcctgaagaactctttaatcctgtgcttcctgaatcccaccctaagccagggccttctgtcacatcccaagagttacaggcagtttgaaagctctgctttctgcttgacctttggaagtcctatgagggaccatttacggtttcctcagtaatttccaccaggatgaatttccttctcatcactctgcctcaggtagtgctctgaaggtcgtcctttctgaacaaacgcagcaaagcaagccacaccatgggtgagatcaaccaagttgccgtggagaaatacctggaggagaaccctcagtttgccaaggagtactttgacaggaagttgcgggtggaggtgctgggagaaatcttcaagaacagccaggtgccagtccagtccagcatgtccttctctgagctgacccaggtggaggagtcagccctgtgcttggagctgctgtggaycgtgcaggaggaggggggcaccccagagcagggggttcacagggccctrcagaggctggcccacctgctccaggctgaycgctgcagcatgttcctgtgccggtcccggaacggcatacctgaggtggcctctaggttgctggatgtcacccccacctccaagtttgaggacaacctggtgggccctgacaaagaagttgtgtttccattggacattgggatagtgggttgggctgctcacacgaagaaaactcataatgtcccagatgtgaaaaaggtaggtggccttatgacagtggggcagaggtcttggcagggtcagggaggaacaaatgggaaagagagatagtgctatccttgtggcattagtttggcaataaccgggggaatgtgggtggcagggaagaggatcacccaggcctagtgttgccaaatttagcaaatgaaatttcaagttgcccagttgaacttgaatttcagataaacaatgaattattattttctgaagtataagtatgtcccatgtaaagtttggcattttatcaggtgatcctacctggccctggtgcattccacacaccctcccttacgcctcctccwgtgctctkggggactttccttctcagcaacaccagcaaaacaaactaccccactagggagatgggccaacgtgcccagatgccaagacttgtgaactgctccccatgcctctcattcacagtccttcgaaaacattcaggttttttggatggatttgctagtaaatcaattctttcatctatcgaccaaatgtgcaaagagaaaaaatgatgccatttgaaagttcagatgttcaaatttggaattcattacatatgtgaatttaggtgatggttaagtgcaattgaccactcccactgctccataacccagatctttcaagaatgaattccaatcaagtaagtgggacatttggaccctcttgaagaccaacagcatactgcacaaatacaaggcattgagatgccccttatagaaatagaaaaactttattcttaccattagagtacatgttcatttttaaacaattataagatacaaataaaccagaggaggaaatgctaatcacccatcatccctcccctcagcaataatcaagggtaccagcttggagattctcctggcagctccttctctacacatgtggtccattattacagtttaccattaacaaaaagggaaaagtggattatgatggaacagagttgaatgggaacaacttgtgaaatgctttctgtgcaggggtgtatagggcagctggagaggcaggaggataatctcctaaatgcctcctgaagctgattatagggggagggtcacacggacccaagaggtgtggaagtcatcaaacacgagtgactctctgcaaacaaccacagaacaccgctcaggtgcaagggttaccatggggcctggtagggcttcagtcctgaataattcctcctttcagtaagtttaagctgggttaagtttgcttttgagcctgactgcagctgcttcaagtgtctaaatggatgctcatccttagggcaaagttctctagacaaccaactggaaggcaatgtctgcacatcctgaggtttttctcatgggaatacgctccttgagggtccccaactgagcccatccctgctagcacatcaaacttgaaaaagtgacattcagcaattttttgaaaggcttttaaagaagagatgggtaaaatgatttctgctgttrtactttgattagcccagttctctgtngtgagaaggaaataagagcatggagctgcttggaggtggttttggtctgcggctgtccatggtgagcatcacggcatggacggagcacttcatctgggagtggggagtctctcctctcttctctggaggactcctggctgttctgggtgggacacagagaaatgtgtgttgaagacagatacggttctgtgctcacgagaaagagacctcattggttcttcatttcaactgcttcttcacatttttttctctctagagtggggattccaactctggctgtacattaaaaccatattaagctgtgtgcagtggctcacgcctgtaatcccagcattttgggaggccacggcgggtggatggcttaagcccaggagttcgagaccaggctggccaacatgggaaacccccgtctctaccaaaaatacaaaaataagccaggcatggtggtgtgtgcctggagtcccagctacttggaaggttgagatgggaggatggcctgagtctgggaggccaaggctgcagtgagctgtgttcacacactgcactccagcctgggtgacagaatgaaaccctgtctcaaaaaataaacacaatccacaaaaccatattggtggctttattgttacagcggactctcaaagattagaattcaggcattagtatttttattttattatttatttatttttgagacagtcttgctccatcacccaggctggagtgcgatggcgctatcttggctcactgcaacctctgcctcccgggttcaagcaattatcctgcctcagcatcctgagtagctgggactacagaggtgcrccactatgcctggctaatttttgtatttttagtagaaacggggtttcaccatgttggccaggctggtactgaactcctgacctcaggtgatcmacctgtctcggactttcaaagtgctgggattacaggcgtgagccactgcgcccggcccaggcattggtatttttaaaaagctcccccagctacttctaatatgcagccaatgttgaaaaccactggtctcttgggtaagcagatacaggaggaggaagtgaatttcaaatcagctgtggaatattagagatggaaggggcttatgaagtctttagcccaactctgtcctatggaggacaggaagttgaggccataggagttgtatatcccccgggtccatggtgtgtgtctgtggatgaggagggttggaacggaggtggctgagtatgtgtccagtgctgtttgcctaccttacacccctgcagtttcacttgctttagccgctgcagtaagatttgcaacgggaaaggaagtagaaaccaatgtttcaaatgaaatatctgattaattcttcctcttttcattgcacttgacaatttaaacaacattctctgacaagggtcatatttttatttccagcctgtgtagtaggaatcgttcaaagttaggtagacaggaagtggcagatctggggcaataactcaggtcttggaggcctccctctttctaccatatccctgaccacacacaactttcctctggctagcagtgtgggcgcaggtgagggaaagacttctcacacctagacaaaggtacagaactacatactcccaaccttggagggtccatgaaggtaacagggaagccactagtatagggagagggctgtggcatcagacagacctgggtgaagatccatgtctgtgacgtagtaactgtgtgatggagtttctacccctaagaaatggagataagcaaatgtacagattaaatgtatataaaggacctgactcatagtagatgctcaataaatgatagctgtgataatattgtcattatgccagtaggcgtttaggagctggatatggttggccaaaaaatggtcaatgattattgcctgttttaaaacaagttgaaggcaggaagacttttttttttttttttttttgagacggagtctcgctctgtcacaaggctggagtgcaatggcttgatctcggctcactgcaacctctgcctcccaagttagagccattctcctgcctcagcctccccagtagctgggattacaggcatgcaccaccatgcccagctaatttttgtatttttagtagagacagggtttcaccatgttggccaggctcgtcttgaacttctgacctcgtgatctgcccacataggcctcccaaagtgctgagaggaagacttttaagaacaggaaactgagagatatcctctttaagttgtttttttctctattcggaaagctgtccataaactatgggtgatcctgattctgactgtggtttaaaagtcctccttcctctctcttcctttcctcctctacttctgctttggatctcaggggttaagggtgtttaatcaggatttagcaatactgacatctgatgagggatcaggcctcctgttgctctaaacaatgttctccagctgccttcaagggcttctctgaagaaccatcaagggacacacgcaggatttatgcaaagaaacttcgctaaggawtttttgagctagtgaaaataaaacacaaaaacccctcccccatccccatcctgtaacttaatggctggtttatctagggctttcagatgcaataataagcaagtatcaaattttgaaacttacaagccattttctcaaaacagtccattgaacttaacatttccttgtgtttagaatctggaataaaatggcattaagtttgaagctgcagagtgaaatgtgtttgcaaagaagtgctgccagctaagcatggtggcttacacctgtaatctcagcactttgggaagctgaggtgggcagatcacctgaggtcaggagtttgtgaccagcctggccaacacagtgaaaacctgtccctactaaaaatacaaaaattagccaggtgtggtggcaggtgtctgtaatcccagctacttaggaggctgaggcaggagaatcacttgaacctgraaggtgaagcctgcagtgatcagagatcacgccattgcactctagcctgggcaacgagagcaaaactctgtctcaaaaaaaagaaagaaagaagtcctggctaacttcaccccatggtgcacatttctggtatttcgatgattcctttagtgcccaggctgtgtaaatgaaggtgatgtgatctgcatggataacagggtggaagggaaacaatgggagctggcctagacaagcagtggattaagagaaagaatctaacaaaaactgcagacactttggtctgagggtgaagatgctatggggaaccagagagaggtaacagataaaatggatagaaaagaaatgtggttcttggtggcatgagtgagggagtgtgctggccttctggaggaagggtgctccgcggtatgggaggcctacatccagctatgggcatctgatttcttcagtgatttgaattggctagaaaaattaaaactagaagcaaaatggtaattgcaaaagaactacttctcattcaggaaagcctagaaaagtactaagtttctcttcctagtacttactgaatactatgtgccagacactctttttttttctaagtgctcagcctatactatgttattctatcttcacatcaggaattctaggcagtagatggaagcattacccctattttcagattacaaaacgaggacacagaaggtaagtaacacgcccaggaccatacagctagtacactggggcccagtttcagccaagaaagtctgactccaataccttccttgcctttatgcaatgctgatgcctcaagagttggtttgtgtgtttccactttgggaaaggtatagaagagatctggagtgaggggctgcctttatcccctttacatcacatatttcctctgagagcggtaccatttctggtgatcctctgcaggagtgattccccattgggttgagcctaagaattacctgggccacgtaaaagtgcaggttccactgtaggagattaggattcagtgcatctgctgcattaatctgcaggtgattctgaggcatatctcaggactgctaatctcatttgagctctrtgagttctattggccaaccagcccttgttccctggtggaaactctggcctggaaatgacacacccagaaaattctcacatttttttctacgggaaaccagacagaatccagtctgcaaggtttgtgctgcttttagaagcactgccaacacagggaaatgaaaataatacaactgtggaaggaataccgcactaattttggccaacgagtctcagagttaaggctgaagttcagttctaattgaagaagtcctaggttcaaagggaagaatgtcatgacccaaggaaggctgggtctaaacccaccgtgagtggctattctctgaaatgataactaataagataattgccttccttgacctttttctcaagcccttccatttgtgcgcttctccagactcattactcagcctctgctatggccagtggattagaattatctctcgaatctactctatgaggtctgaatctgggaagatccactttcctctctcccagagaaagaaaaaaaaataggaatggaagacataagcctggtagaacattaaaaacctgataagcatctgatgctggcaagagggtagtccttggtcctttcacacagggtcagtggaagttagaatgtgaacctttctttttctttttcttttttttgagatagagttttgctcttgttgcccaggctggagtacaatggcrcgatcttggcttactgcaacctctgtctcccgggttcaagcgactcccctgcctcagcctcctgagtagcggagattacaggggcgtgccaccacgcttggctagtttttgtattttagtagagacagggtttcatcatgttggccaggctggtctcgaactcctaacctcaggtgatccgcctgccttggcctcccaaagtgctgggattacaggcrtgaaccaccccgcccagcctcagaatgtgaacctttcatcaaagtaatctatgtaaagaaaaactgtatgttcctgtggmtccagcaaaagggatttccttttttgggaatctgtcacataaaaataaaagcaagaaggattagtgcagtattgttggtagtggggaaaactatacacaggcaaaatcagtaaaggacagttgagtggatcataaagcacccagggtggagtagtgtgcacaaatctaagaggtgagttcacatccatatgcattggtcttcagggaagtccctaagacattgttaagtgatgaaactattataagcaattagaaaaggaaattttagaaaaaatagaaaactctttgttcaagcatggagaaaggcataggagacacaccagcagttagcacggatttcttctagtaggctagattggaaggaactgggggcaatgataatttttgctttatgttatgacatatgggttgatgatttcaagtgcatgttttccctttgtaatgagagagaagcgctctatgaactgtgtctgtattcctagctgtgctctccttccctgcatgtacttgctgtctattgtaaccttgtgccttyccctctcttcctcttagcacctcactttccacttggctgtctgatcacctcttttcttctggcccaacctcagcctaacctaaataggccatagctcaggttggcagcgcttattctgaaatgggcaattccattctatgcagtcataggatggcaggtggagtgggattgtttactggggaccactgtactggagccctggttatctgttggtagcatttaaatgagagagaatgatctgtcatcatccctagatctaccactctatgattttgtgccactttgacaaatatgtgactgtctctttcagaacagccatttttctgacttcatggacaagcaaactgggtatgtcactaagaacctgctggcaaccccgatcgtggtgggcaaggaggttcttgctgtgatcatggcagttaacaaagtaaatgcatctgaattttccaaacaggatgaagaggtaatgctaaccctgggcatctggttggaggctcaggaaatttatttgttgtataaccaaagaaaagatgtcacaaccataacttgttattctctgccgtctgtaggtcttttccaaatacctcaactttgtgtctatcatcctaaggcttcatcacaccagctacatgtacaatattgaatcccgaagaagccaggtaaaaggaaggcagcattagtcattccatgctgacctattctgacaaagccrcccagagacaacaaattcagacccctcctattcctcctgggggtgtaagccacgtggaacagatccccaaacttcagtcccacgtgtcctctcatgatcttcccgccactctccccacacacactcccctgcaccccaagctctccaattgtgtacacaactggcttggctttcttcartctagatcccgagtggacttggcatttctgtctatgagatggtgatgacaataatggtacctacttcagatggttgttgtgactattagcgattagctctcaaataaagtttgtagaaattcctgggtcatagtaaacctattaatttgaggagcatattattcctaactccatgagacagagggataaagggcactattagtacctaagatacctaggtctggcccactctctggacctcagtttcctcaccagtacaatgcacgagtagaggttgagagggaggtyccttcccgtttgaactctccaggtaaggttacctctgactatctcaggatgcatggaaggaggtatgtggctctctccacatcagggccagcaggagccagtgggccaccratactggattctccgtccagggaccatccctgcatcccatttcagggcacttcccctttggagccaaaacatctagacacaggaaccaatcatagcttctctctctccatagacccgcagccttgcaaaagtctactcatcatctcacctagaggatctgagtagtttgttggatgtacacatgttcaaaatcagaattgcactttccaatgatatgcatttattttatttgatgcacctyatgttttcttgtggtgaatgctctatctctccatagcatactttattctaactgttttctttttgatacctactttcagatccttatgtggtcagccaataaagtatttgaagaactcacagatgttgagcgacagtttcacaaagcgctctacacggttagawcatatctgaactgtgaacgatactccattggactgctggacatgaccaaggagaaggttcttattattytacacattttgtctcatctcacatcgcctatataacacacaccacaggaaatgtgatccttaaaaaacagatacactatgtaaataattagtcatgattgatgacaagaacagaggtaaaagtgtgtgtcttggagcaaaaaagatgtaggcttgaatcttggtttttccacttcctagtaatatgggttttcagcaagtctgttttttttttacattaattaatagactatttttagagtagtattgacagaaaaattgattataaagtacggagtttcctcttccctcccaatctcctctcccagtttccctgttattaatatcttgcattagtgtggtgtgatgaatcaatattgatatattattattaactaaagtccatagtttacatgagggttcatcctttgtgcagttctctgggttttgacaaatgtgtaatgtcatatatctgctactacagtatcagacagactactttcagtgcctcaaagccctctgtgcttcacatattcaacctttcctcaccccttccaaactcctggtagccacaggttttttttkgkttttttttttgttgtttttttttttttgctgtttctatagtttttgccttttccagaatgccatatagttggaatcatacagtatgtagcttttcagactggcttttcactttgaaatatgcatttaagtttcctccatgtcttttcatgactcagtagctaatttctttttatcactgaataatattccactgtatggcaggtttgtgtatccattcacctgttgaagggtatcttggttgcttctaatatttagtgattgtgaataaagctgctataaccattgtaggtaggtttatgtgtgtctacatgttttcaactcaattgggtaaataccgaatagggcaattgctggattatactgtaagacaaattgatctttgtaagaaactggcagactgtcttccaaagtgactttactgttttgcatgtctaccagatgcactttctcaccagcagttgttaatgtcagtattttgggtattagcagttgctgatgttagtatttggggtatcagttgtggtatctcattgttgttttaattttcagttccccaatgacatatgatgttgagcatcttctcatatgtttacttgccatctgtatatcttcttagagagatagctgctcagattttttgcccacatttttttatgttgttttcttatcattcaattgtaagagttatttgtatattatgggtccaagtcctttaccaaatatgtgatttgcaaatactttctcccagtctgtggcttatcttttcattctcttaacagtgtctgctgcagagcagaaggttttaattttaatgaagtccaatttttctatattttttctttcatggattgtgcttttggtgytgtatctatgaagcctcatcaaacccaagttcacctagatcttctatgtcatctcctagaatttttatacttttgtgttttacatttaggtgtataatccatttygagttattttttgtgaaaggtacaagttctgtttctagattcactttttttacatgtagatgttcagttgttccaacaaaatttgttgaaaagactatcctttgttcattgcctttgcgcctttgtccaagttaactatatttgtaagggtctatttctgggttctctattttgtttcattgattcatttgtccattctttcactaataccacactgtcttgatyattgcagcttcatggcaaatcttaagtcaggtagtgtcagctttttgattttgttcttcttgtcagcaagtcttttaacctacctgattcttggcttcttcatctgtaaaatgaggacatctctcttatcaattgtgagaattagagattttatatatttttttatatatataracactatatgtacatagtgtctagaatttacacagtaggtggataatcaatattatctttaccaactttaggtttttgtattctaaaaaaatttaattaaagtagaaatattgaaacatgtaatattattcacaatataatgcccttgtgtcatcttctttaattctgttgctacccttctagttcaaaataactaacgataccatattatttatatattttttcttttgttttctttcctttttttgagactctgtcttggtctgtcaccaggctggagtgcagtggcatgatcttggctcactgcaacctcagcctcccaggttcaagcgattctcatgcctcagtagctgggattataggcctgtaccaccaygtccactgattttcggtattttagtagagacaggatttcgccacgttggccagactggtctcgaactcctgtcctcaagtgatccgctcgccttggcctctcaaagtgctgggattacaggcatgagccaccgcacctggccttatttatatttcttcatattcatgtgattggaagttattttttcagagtaattgttctaagtggataaacataggatgaagcactaggagagctgggttctgatcttggttctgggactttgtagctgagtatgttggttaggattcttttggctataagaaacatcagacacagctaaaagcatctctaacaatatgatatttattctcctacttaacaaggtagggcagcgctagtactggttgattcagagatcagtgcagtcattaaagtccaggtgctttctctttcttcctggcaaggtctctgctacctgcagcgtgctggtgaggcctcctcttatggtggaaagatggctgttgcagctcaaatcattggcacataggcatgacacaactgggaggcattttctccaaatgtcactctcatcagcttttatctgaggaataccttttgccagtagtccctcagcagacttctcccccttcttcaatgtccagatctgggccacatacctgcccttaaactgatctaggcacctcatgtagaccactcatgggctgtggtctgatggaaaattaccacctgatactcaaatcgcatcaggttatgctagcaaggaaaagacagagaatgaatgttgggtaaagcaaccaacattttgccactctgtgtgaccttggccaagccttttaccagatttagcttaattgtctatgaaagaattgctatacattgagtattttgaactatgtgccagggtagatgttacatatgtattattcatttaatcctcacaacaattctttagtacaaattctattgttatccctattttacagatgtaaaaggttaagtaacatgttaacagtcaaaaattcctaaccagtattgctgggaattgtagatctttcagcactaaaattccagaattacgtagattaacataaaatatacaaacacmtaaaattcatataagatatggtaggtcatggaacagtgtgtttaatgatacttaaatctgattgcctccaggaattctacgatgaatggccaatcaagcttggagaagtagagccttataaaggtccaaagacacctgatggcagggtacgtgcaaatgtcttccttgatgccatctgtgcatggtgtcaggtgctaaaattaagaggccacagtgcatagagcactggcctgggaagacctggagtagtagaaacagcactagacaaggagtttgaggttctagtcccagctatgccccaagctagagctgattggcycctgccttaactccttgttgaacctctccgwttccttttctataaagccagggcttggtagaccagtggttctcaactggaagggatgcatcagagccacctgcacaacattttaaagaagtacctgggcccttcttcagatatgtgggattagaatctctaaggaagggttgggttaggtttactttcccccttgactgcaagcttcatgaaggcagaaacccctgtgtccatagcacacaggaaagagaaggggatggattgtgtccaggcctcagattcatcatctgccccwwgaaacagagagaataattctctagtccctttcagctttggcagtgaarcctcctgtttctgaggcacctgttcagataagtcactgatgaaaggagggtacgggtcactatatataatgtaaaactgactacagttaagaaattacatgatttgttctagtgaagttattaatgtcaggtatttctggacaacaaaagggatcacttgaaaataaaaacagactctctgatgatttggtagccaaagatcccccccaccccaaaagctgtttgggggcaattcaactttttaaaaacaaaatttattttagcctgtgcatgtagataaacarccaataatatttctggttttattataagtttgtagtcaggatataagtagtttgataattyatgttataatataatgtggttgggaaataaggttctatttgtaagagttttaaagtacaagttccccaatgaaaaatgatttctttgggaaataacattattcccataatatcctctttctttcttaggaagtcaacttttataaaatcattgattacattttacatggaaaagaagagatcaaagtgattccgtgagtattggcaggaagttgctgccgcagttgccgttgtatttttgyacatattgcatttctctatattgcaatgattttttttcttctcttccccaaggacgcctcctgcagaccactggacactcattagtgggttgccaacatatgttgctgaaaatggatttgtaagttattgaacaaattcaaattttaaataatattgcaagaaactcttattagctaagagatagatacaattgtgaaagcaagaatgcatccaataaaagctagatgggmcgggcgcggtggctcatgcctgtaatcccagcactttgggaggctgaggcgggygaatcatctgaggtcaggagttcgagaccagcctgaccaacatggtgaaaccccgtctctactaaaaatacaaaattagctgggcgtggtggcacatgcctgtaatgccagctacttgggaggctgaggcaaaagaattgcttgaacccaggaggtggagattgcagtgagccaagatcgcgccattgcactccagcctgggcaacaaagtgaaactccayaaaaaaaaaaaaaaaaaaaaaaaagctagatgatcacttcctttggcataggacaaaggagagaagaatcttgacagtcaaatgtaggttaactggagacttctgaactctacacagaaatatttagtcagcatgagaaaggttcctccatccctcaatttcttattctgcagccacacacatttcagatatcctttggaatccaatgactatgatttaatgactgggtttaattctatctcaagtacatcagtcaattttttaaagcataaatatgggggatggggtggggatggtgtgggatgtggaacttttcaatattgagttaaaagcttgggcctctaaggtcttgacccacctgtaaatgttcttataacatttagaacataatgttcttcaaagaaaggactaaaacagataattgctgatgaaaagtttaaaaaagaataggctgctttttgcctcttcaaaaacacagttgaagggtgctcagcccatcaaatgatgtaatttattcaagttagatcatgaaattaatgcatggcatgaaagattccttaaattcttaggctatatatgcttataaaaactttgaaagattctcgcattttctrtgtaagagtactacaaaaatagtagacatggttcattcaattattctcagaaagcacttaccttggggccgagaggcaggcagagtttggtgaggtggggatttaaggagggagcccacttagatcttgttagattgttagttttttaggacttttgtgagcaagttgttaaactgttggcagcttgaaatctcccatggcaagagaattgggaccatggaaattggyaactgatacaagccaaggatttccccaattcccagccaggagagctgatttccccagcacccattctggagctcacagttctagttccatcccatagatttaaacaaatcacttaacctctttaggcttccatttgttcatttttttttttwaagtatgaacttaattgctaagatcccttctggctttaaaatgctatgatagctgggtgtggtggctcacgcctgtaatcgtagcactttgggaggccaaggcaggtggattgcctgaggtcaagagttcgagaccagcctggccaacatggtgaaaccttgtctttactaaaaatacaaaaattagttgggcttggtggtgggtgcctgtaatcccagctacttgggaggctgaggcaggagaattgtttgaacccaggaggtggaggttgcagagagctgagatcgcgccattgcactccagcctgggaaacagarcaaaaactccatctcataaaatataaaaaataaaatcaaataaaatgctatgattttaattatctcttggaaagacatggtcttttattaagatccatttgtgattatgacccaaggtacagaaaacttaaaatgacccaaagttgagtgatttcttgtccttatagatgtgagcaatagtctgtgaattccactaagtaaagtgatatctctcactgaatccttactttggtgtaactaaaaacttatctggctgtttcctcctgcctcttaaccatcatcttctaacccaaatctcactttaggaagaagaagaagaagaaaaaaagcaatcctagctctgctgctcatactggctgtagcagagctagratttctcagctttctcctccccttggcctgagcagcctgttgctttgaatttgaaggggattccctggagtctggsggagtgggaagssgcagagacggtaccacatatcctccagtgatttaattagcagcagggaagccatcttgaatgagttgttagcagctgtggcctagttgaggtccatttgcccgcaagcagtcaagagccgtgtagraaatcctcactcccaatgcgttctttcttattctgctttgtggatcaagagggctccactacacaatatttcagaccatttgtctcytcttgccttccagatctgtaacatgatgaatgcccctgcrgatgaatacttcacatttcaggtaactgcactctgggtcagrcctcacctcttggggctggggtagaggagtggatgctctcrcctctcctccacccccagagtccgcctgatgctcaggtgtggccacaggcacacacgggtccatctcccactcaccctggctgggccagcaagtagcagattcttcagtgaaggaagaaaagaargwtaagacagaaggccagggaggggacctgccactcctccatttgctcacactcctggtcatttacggcagtggtccccaacctttttggcaccagggaccggttttgtggaagacaatttttccacagaatgagggtggggtgggagatggttttgggatgaaacttccacctcagatcatcaggcattagttagattctcataaggacggcacaacccagatctctcacatgcgcagttcacaagagggttcacactcctatgagaatctgatgctgctgatgatctgacaggaggtggagctcagacggtaatgtgagcaatggggagtgactgtaaatacagatgaagtttcacccgagtacccactgctctcctcctgctgtacaacctgctggttcctaacaggccatgggccagtactggtttayagtccagggrttggggacccctgatctaagggctcaacagttcctgrcacagcattcatgctcaataaacgttctctgcatgcatgaatggctggctacstcctacatcctgaatcctgctctcctggtggttttctcagcagcccttccctgcagcttattgcaactgttctcaggaaaatcaacaattctgaytgagtcttcagagcttctcctgctgttagaytcggttgtatccttccttctccactgtgcagagacccactgcctggggaatctgcctccactcaccgccagatgctcccaggaatcagcttctgtatgtgctactctasctgacccacttctccccatcagggcttcctgctggaacctggctgcagacccgagttgatccctccccgccccccgagttcatccagcccaccagaagggccagcctgtcatcttcaccaccccctccccaactgtcaccccccacctgtcatctctgccactcccttctctacctgcccatccctcctcacctgtcatctctgccacccactccccacctgtcacctcctcccaacctgactgttagagataaactggcatttggctccacagcctcttattttctgcctctgggcacttgttattctctgtcctgtatttaaaaaaacatccccttagagccctgatctcagtcacaaatagagactgccctccccggtgggtaccgttggggtctgtttttctgtctctctcacatacagagccccatctctgccttttaggaaaagccagccttccccaggctgcagcgtgcctccttagcggcagaaccacaccacaccttggggaaagctgtacacacttgcttcgttacgtgcatctgcctgctcctccctttgccgattgacatggaaaacatgtaaacaccatatggctgctctagctccttcctccttgcaattgaagcttatttgtgaccatgctgtgcccaggcctgacccctatatttatggcacgtggatgtcagaataggatgcatgtcagcaaaagggcgacaatgatwttctagagtctgaaccttaagcagtcattgtctaaacagggagtgggaatggagctggcccaggagaatgcagsctgctctgaaatgtgaggccctttgctttctctcatgctccactgcagctactgctctgatgtgctctcatggcctgggcagagaggaggcctggggcctcccyggggccttggggagtccccagtgtgggataaacctccaggccacagggatttcccagttctctgggaaacatcattgtggtgcccatgaaaatgtgcttctcagatctccacctgtgggaagtgtagccgtgcaatggctgctggcctgaaayccatggtcacatctgtgctgaggccacacgctccacaggccactcccaattggtaactaagtgtggcagggacagtaaagcaggcctgctcctggaagacagccagataccctgccaggcagcttgggccctaggaatgcctaacagctctgcaaacagtttcagaacagcacggtggtctaaggggctcccctcaaccttscatccttccgtttctcctttgcaaagggtcgggactgcatctctgtctgatgtctctctcagcacccccagcctccctccccgccgctcttcaacggcatcacctgtgcatcattccgcacagcggactaggacgggtgaccgccctccccaaaccaccaccctccttttgtgctccgtcttctgattctgtctctccctgctcaggccccaccctgattcttacgattcctttttgcacctgagaagtttgatagacaagccaatgatataaaaagaactgccatcagagcaaacctgcaaaggcagtggttctcacactatgtttcttgggggcataatggattcatttcctattgctgctgtcacgaattgccactgagtggtttaaaaccacacgaaatgtattatctcacagttctggaggtcagaattccaaaatgagtcttcttgggctaaaatcacggtgctggtgggactcttgctttctggaggctctggggataattcatctccttgccttttccagcttctcagggcctcccgccttccttgcctggtgacccttcccctggcagagccagcagcaccatcactctgaccttgcttttgtcatcatagctccttctcccattctgattctaacctctcttctacttttawggatccttgtaattacattgggtccacctggaacatccaggctaatttccccatcttaaggccagctaattagcaaccatcattctatctgcaascttagttcccctgtgttgtgtaagataacatattcacaggttccagagattaggatataracatctttgggggccattgttctgcctgccatagggttcctcgaagtggactaaggggtcttcctttaacgtcaattaaagtggtcctaattcacaggaggaaaagtgtatagaatttcctcagttttttgtcctactaatttttcttaaaccttgggttccttctgtaacttgtctgtcagtaaggtctaactaatggcaaagcacaagaatatgaactggtagcaaatgaatatttcctgaaacactgagaagcagtcagcaaagcttattttggaagctttaacaaatasrcatgaagttctttcacacgcatgtgatatattctctattactgattttgtccttggttcgtatgatggtgtaagtacataaatatttcttattgttttccaaagatgcaggctttgcaagcactatgcactgcatcttttttctaaagctttgaccatcaggagacggatgttgaggtttggttcctctgcttttcattscatgtataatgactacatagagtagtaacaaattacttagattgagcacttattacatgctcagtctaaatgttaaattgtggttcaggctataagtgcagttggaattccaaaacagaaaagttctttatgagttagaaaaattagaaaggcttcatgggagagccaagacttaacaggggcctgtaaggatgactaagtaagccaagggaagtcttcaagaacaaataatgtggtgtgttgagtgcttgtctatctttgccttagctacatactgtgcaaatgctacatcatggttctcaaacttcagagggcatcagaattacctgggaagcttattgaagwwgcatgcccaggccaggcatagtgactcacgcctgtaatcccagcagtttgggaggctgaggcgggcggatcacttgaggtcaggagttcaagatcagcctggccaacatggtaaaacctcatctttactaaaaatacaaaaattagccaggcttggtggggcatgcttgtaatcccagctactcgtgaggctgaggcaggagaatcacttgaacctgggaggcagaggttgcagtgagccaagattgtgccgttgtactccagcctgggtgacacagtgagaccctgtctcaaaaaaaaaaawaaawaaaaaaaawtaaacaagctaaaacaaatctgttacacatggtccttggaccacactttgagaaacactcctaaacttttgtgcctgcatccctcgactagaccctaagcatcttgagggcaagacctgtgatttattctttgtaccttcagcaactgccccagttcctggcataccacagaggcttgacaaatgtttactcaactcaacacaccacagaatgaaagactatcttcatggatcagtcagaaaaacaaaaaccacactagtattttaacgggagrattttatttaaggaattagctaaacaggtgttagaagatagaaaaagtgtaaagggaacagtgaggtaacatagtggtaagaagcacttcccatcactcrggcttgggaaagaaagggaaaaggttagaattgtcagaaaacagacacttggttctagttcactctattggatgtgctagagtacatataatggctgtatggtcctagccatgttctgacacaaagtaggaattgcacatctaacaccaaaagattactctttcttttttttttttgagatggaatttcactctgctgcccaggctggagtgcagtggcacgatcttggctcactgcagcctctgcctcctgggttcaagcaattctcctgcctcagcctcccaagtagctgggattacaggtgccsaccatcacgcctggctaatttttgtatttttagtagagatggggtttcaccatgttgaccaggctggtctcgagctcctgacctcaggtgatctgcctcccaaagtgctgggattacaggctccagccactgtgcccagcctttttctttaaattaaaaataaactaagtgacaggtggttgggtggtagctagaagggaggagtacaggacagtcttgtagtgatggaatagtgttgtatcttgattctaatggtggttgaaaagctacacaagggataaatttgcataaaactatatgtacacacacacatatatgtgcaaaagtaactgcatacaaatcttggtaaaatccaaatcagctctggatcgtacaatgtctgttttctggtttcgatattgtactatagttacacaagayggtagaaaatgtactgtagttgtctaaccatcattaccattgtgtgaaactgggtgaagggtacctgaaatctctctgtacatttcttttgtaatatcctgtgaatytatgattatttcaaactaaaaaggsaaaaaaataacttgaggtcccttctcgtttgtagaaaggacctgtagacgaaactggttgggtcattaagaatgttttgtccctgcctattgtcaacaagaaagaagatattgtgggagtggctacattttacaacaggaaggatggaaaacctttcgatgagcatgatgaatacattaccgaggcaagtgcaataataagataatggaagtcaatgcaattcacaaaataagagagggcacgtaattatttgttattctggaatgatattttgaagggccattaagacatgagtcacacatagctgtaaccaatatgttgttattttgtcgtttctatttcctgacttctataaactgcaacattttctaccaaagtataaaattttagcttaaccaaaatttgtaataatactcggaaaacaggaaagaggattttcttcttctttctcccactcctccttcctgtyccctctcattcttattcttattcttacgcccagccccctgcctaatttttaggtcctgcttgactatactggtgttggtaacacctctctcttctattcatggtgcatggtacactttaaaaagcaataattcagccagttttattgtctgaagctgattattagtatgtttttcttaaattaaaagaaggaatggggtggttgatgatggaagggagatggatagaaaagcgtgcagattgttgcctccaaaccaatttttctttcactgaagagaattagaatcaccttttatccrtttcagactctcacacaatttcttggatggtctcttttaaatactgacacctacgataagatgaataagctagaaaacagaaaggacattgctcaggaaatgctcatgaaccaaacsaaagccactcctgaagaaattaagtccattttggtaagtgggaaattcagtcctgtggacataagatgttacctaaccacatattctagaagtcatctaattacccaggggtctgacaaatgcaaatggtttactcctgggctgagagagagagacagggaaggaggggttggaagaagacatggatggcccagtgtacagagacccttactggaagtacagctgcttggctggaatagcactttgttcaaaacagccctggggctatgggagctatagcaagaaaaaaatatatatattttaggaagggaaatgtatcagtcagctattgtcatataatgctgcataacaacaaccctaacrcctcagtgtcatgcagtaatgaacctctatctctcactcacatttgtgggttgaccaggctttgattgacagtggctggacttggctccaagctatgaatttggtttgctctatgtgtctctcatccttcttggaccaggagctacctgatagatgtccttctcacaaagatgacagaagtgcaagagwgcaaacctaactgtgcaggcatacttcaggtttttgctcacatcacattcaccaaaatgctcattggccaaagaaagccacatcacgaagaccaaccttatagatgatgggggagcaagtggatatttgctaaccatgttctaatcaccacaaaatgaagggaaaatatcatgtgcccaccatctctatttcttttatttccctggygtgtgtgtgtgtgtgtgtgtgtgtgtgtgtgtgtgtgtgtgtgtgtagttttgctggagtgggttggttttggtgagcatgttggtttttggttttgccgagtggtttgagtgtaattcagtttgatagtttgagatgttaaagatgagaagatctgggggtaataaaagsaactgtgataagctaatacaaaaataaatgtaagccactcattttttctttcctacatgcaaacaacccacacctctttaaaaaaaccagctactgtaatcattttgggggaattttaaaaatcaaatatattagattatttcttgaaaaaagtcttcataatcaggtgctataggtctttgtatccatgacaaagaatgcgtctttgccatggaactcattgtagtatattttatttatttacttatttttagagatggggtctcactctctcacctaggctggattacagtggtgccatcatagctcactgcatcttccaactcctgggctccagggatcttcccgcctcttcctcccacatattttaaatatatcttaactaagattgtaatagtagaggaatcagatggaaatcttctcctttaggaatttcacacctcaattgcttttacattttagaaatttcaagagaagttaaatgttgatgtaattgacgactgtgaagaaaaacaacttgttgcaattttggtaagtgttttctttctaaccttaatgcctgttaaatagaggcattataaatcaataatatattaggacatgctttcttgtttttcaagtaaatgttgagttttctctttcctgatatttctcaaggctaaaaagaaagaattcttctaaagattgatcttttgattccctgcttttcttcatctttgtcgcctctggtccaattcatacagataatttacaattgtaggtagcctagactactgcttaggggacttcaggcacagaatctagggatatcaaggcacagtttattttaatagctttggatgacaccatggccaccacagagaacatgacagagttagcgtggagcatggatctttctaggcactggcaccgcctgccatttctagcttctcttctggagtctgaaggctccattctttcstgttgttgccagtaggccatccctattatttttctttgaaattaactttcccacttcactaattctgtcttttgttgtgcccgatcaactgttaaactcgctcaataagttcgtaatttcagagatttttttcagttctagaaggtacatttaattcttttgttaagattctaactctgtgttaaaacttttcatcatttgatctattttgactattttcccctgtattttcataaatgtattgatgtgtattattttaaggtacccatcttaataccagaatcacctgtagatctgattctactgtttatttttacacctgggttctagtcatttgatcctgttttaaagcatgccttatgcttttaaaataaaaaatcagatattgtagataaaaacgtgtaggggctctgagtgatattatccttctgcaaagagcattagagtttcttctggcaggtgagagaattgttttagatttcatttggaatgatcttttttggytttattcctactattagggtggagcccttgtttctagaaagtggctcctctggaatccatgaaatcctgggatatttacgaagaccccaagaccttgaatttcagaggattgaattccttctgattgaaatggaaatatcacacttaatttccttactaactgctataacctgttttccaccatctctttccgatctgtgatgtgagcattctttctaaactaagacacatcgactatctcaccttctccctttccatcttttgtgggctctgtcctcccacccagggcctttgctctgctaccataagactgttggtctttgacccttttttggggcttacttcccacccccgtgttttcatgtcatctgaggttcccttttctcccattttgcttggctccacctttggcaccatcctctcagcctggcccagaagaccaccctttcttctccccacctgccctcaacaataggcatcttcttggaaaacaaaacttttattgacatccgtgtcaccagaaattctctaatttcttatttaaaggaagaaggatcttatgttgtagaagcaataaagtggacaaagaaccagtagacttcctaaaaaaccagcctattttgaatgtaaaatctactcagggcaaatcccaaatcattgttgcataaaattgaggaacgtaacaaatatttcagaggagttctccaaaattatcctggcatcatttcccagctacgtaattatttgtccatcttcacgtacctgagtctctctccaggcctgcactttcatgttacctccagggaaggctcagctgattttctgggtgtagcaacagttctgtgcaagagtgtgaggggycagcccaggctcaggggctgggggaaccagaaaccgtaattttgttttaaatagctatataccattcggtgttgaaatctgtgtaaatagagcatggctgtcccctgaaaaacattaaacttactaaggggagtgacctccctttccctatgtttgtgtcctcctcagtgcactagtaaggacatactacacattcaaataaatacccattgaactgaatctctcctgcagatctgtctggtaggcccacatagttgttgctcatttctgyctcttagcactttctcacccacatggaatcgtctctccgcttccttctgccagctcagctgcatgcatgtccctccagcatctctcctcctttaatttccccacctgtccaaggacattcagtttctccctcggcatggagcacyggccatactctctgattattctaagtgcttacttttcactcgtatatattttatagccactttaataagttaagttccttaagggcaagatacatatttttatttctcaagtcgcaccaatgccatgtgtctacttggctattttttcacataatccgaaatcctaaccagatgtgagttaaatgaaatgtctgcaagtatacctatgtactgcagggcaatcattggtttatccatccactcattcattcaacaggcatttcctgagcaccttcatgggacaggacctgcagatttgggatatggcagcaaataagcagatgatccccaccctcggggagctcacattctagtgggaaactgtcactgagcacataaagaaaattcaagagaattgaattaagcagtcgtttactgtttactgaatatttcttgaacagaaaaaaagttgagtatcaaaaatgagtaaggcttttgtaactaaacattttattttgcatcatwgaaagaaaagagctactggagttggatttagaatggtaacccatcacttagaaagtctttaatatggccaagtctcagtttcatcacctgtaaaatggagataatcgtgtaggcctgccgttagcataatctgtgcaaactgcatcatccagtgcctggcacatggtggttcagtgaatcacacattgtgttcttttattgtaattttggtttacacccaatgttggctatgggagtggaaagggaaaacagatgaatgtaatctgaaacaacccatccttatttcaacagaaagaggacttgccagacccacgctcagcagaactgtacgaattccgcttcagtgacttcccccttacagagcacggattgattaaatgtggaatacgactgttttttgaaataaatgtggtggagaaattcaaagtacctgtagaggtcagagggtatttaatttaaaatactgtgtgattctgtggctctgcttcactgatgttttctgtggttcaaaagatggastcagtttgaattttaaattattattaactttctaaatacatcagcttaacccctatctacaagaccaacacatctttttagataagattgccacagaccttctaacctttagaattctattccaaagtctgaatggtgtcatcttcttttaggttcttaccagatggatgtacactgtgaggaaagggtaccgagctgtcacttaccacaattggcrgcatgggttcaacgtggggcagaccatgtttactttgctgatggtaggtacagagggctgtaaatccttgtaaacctgcagatttcccatttgagcatgatgagaaataggtatggtccatcattttagatcagtaatttaaaaattcagggcacaaacccctctccgctgcagatgagtcccagtatccttgagcaccggtgggatgatcattcagacattcacacacttaccttctyaaaggaaggttcagtcttcacccacagtactacaatactcacaacaaataaagtgaacttgctccagaaacctagtgggcctattctctattgcaggctgcacttggtatagaggtatattaattcaaataaattatagatatgcatatatatgttatttttttagacaggaagattaaagaagtactacacagatctcgaagcctttgccatgcttgctgctgctttctgccatgatattgaccacagaggcaccaataatttgtaccagatgaagtaagtgaacacatgtccaatgttsacacgtattggtggacattggaaagtacttagggtgagaaaaacgcttctccctattccttggcccagtcaatgcctctttgccatgttggaaattccagggctggattctattccctcccaagcttccgccttcrcgataacgttgctctttctccctaggttcttgcgtccccctttcctttctgttttcatttccagatgtgcctctgccttcttcctataggccttcaggctttcttctctcaactttgtttaatcagagtattgaattcctatattaaagtgcawgaatctggctgggcacagtggctcgcacctgaaatcccagcactttgggagagtgaggcgggcggatcaagtgaggtcagttcaagaccaacctggccaacatggtgaaaccctgtctctactaaaagtacaaaaattastcggatgtggcacacctgggattataggcacatgtctataggaggtagacrtgtgcctctgaggtaggagaaacacttgaacccaggaggcagaggttgtagtgagccaagattgcactactgcactccagctggagcgacaaagagagactctgtctcgaaaaaaattaaaaataaaaaacaagtacataaggtacatgaatgttaggcttacacttgtacactcctatggagcactccccagctcaggctagagaatactacccctgggctcactacccttcacctccctggtctttttgcttctgccaaactctccttcagctggtcttccatcttaacatcgatgccatctttctctcttgccccaagaaaggaagtacaataagaagggtgcaagctctgggctcaggcagatttggattcactgggtcacaaattatttaaactttctaagcctcaatttcctcatctgggaagtaagaattatagtaatggtacccagcacataaggttgttgtaaagattaaatatgatcatgcatataaagccctcaactcatggtaggatcttggcagttaataaatattaggtatgattgctgggtgcggtggctcacgcctataatcccagcactttgggaggctgaggagggcagatcacgaggtcaggagttggacaccagccttgccaacatggtgaaaccccatctttactagaaatacaaaaattagccggacattgtggcgtgcacctgcagtctcagctacttgagagggtgaggcaggataattgtttgaacccaggaggcagaggttgaagtgagctgaggtcacgccactgcactccagcctgggtgacagagcaagactcagtctcggaaaataaataaataaataaacttcaggtattattatggttactattattgttgtgatgtcattggactattcattcaccagtattgctcatggccagcccagttccttgataatgggttttaagatggtctatctgccttagccacacttcattctcatttctgacacattgaactacccctctccagaagtagtgaagtgttgtagacagactgaatgggctttggagtcttgggtttgtggggaccaactacttcttggttgggggatcttggacaagtcatttaatctatttgagattcagtttcttagccatgagatgtataaagtgttgacctctcaaagattgttgtgagaatccagtgaaattacatatgtgaaacctacttgagaaagtgcctgctaggcaggtttcacatatataatttcattgagcgaaaagcactttgtaagcagtgactcctcatcttcagcaattctacctattattaggctttgtcttgaaaagatgatctccatccagacttgaggcaagagacatcttcatctcaaaggttccagcctacactggccgctcgctcctccagaatgcaagtcccctgacagtcactgaagtcctcgtcctccttcttgatcagtagtatactagccaattcagttccagagaaacaaattgagcatctattgtgtgctagtaaggacttgatacctactgcctcatttaaccttcacagcacagtgaagggaggtgccatataggaggtactagtatcccccactttaactgatgagctcaaaagatgaagtyaaaccttccctaggttataggaagtagcaggattgaagttgccrtcttgcctccaggtttgcaggaaagatgcatgcagccacaccctgccctctgcattggcctggttttctttcatcattcctcctctgtaaactcaactgtatgggcatgtggtgatggaagggcttcctgactgcagactgtcagtgtgtgtgaatgtctgtgtgtgtatataaataatatatatattttttggagacagggtcttaccctgtcacccagggactgcagtggcatgatcacrgctcaytgcagccttgacctctggggcccaagcaatcctctcacctcagcctcccaagtagctgggactacaggtgtatgctaccatgcctggctaacttttaaattgtttttgtagagacagggcctccctatgttgcccaggctggtgttgaactcctgggctcaagcaatcctcctgcctcagcctcccaaggtgctgggattacaggcctgagctactgtatgtggccaactaattctttttttttttttcactaaatcatttgtgagtcagctgcaatactagatttcattcctaaatattgcagcatatatttattaagaattaggaggacattcacctacataaacacaatacaatgatcaccctcagtattggtacaataatattacctaatataaagtgttttttaaaaattttccaattaccacaataatgtcctttatagctattttttccttctaattcaagatctaatcaaggagcacactttgcatttagttgtcaaatatctttaatctcctttaatctggagtagttgctcaacctttttgtgtgtttcaggatgttgatgtttttgaagagtctaggccaactattttgcagaatatctttcaatttggatttaaccacttgtttcctgattaataaattcagactaaacatttttttggcaggaatactacatagatgatgctgtgtccttctcaatgcattgtgtcaagaagcccatgatatcaattttatttatggrcgatgtccagaagatctctttatgtaaaggaacattttctcctttgcaattaataagtaatacgtgaaacgttagtttgagatcagattaatatctagcttcccaataacattttttaactaatgtttttaaacctaaaggaattaaagataccactcctttctgactagaattgagctttttcatttttaaaaatatacattttaaattgctacataatagatatacatacttttggggtacatgatattttgatacattcatatgatgtgcaatagtcaaatcaggataattgagatatccatcaccttgaacatttatgatttctttatgctgggaatattcaaattattctttactagctattttgaaataacaatggattgttgtttgctatagttactctgttaatttattgaacagtagrtcttatttcttctacctacctgtatatttgtacccattaatcaacctgtcttcatccttcccacctccctacccttcctggcctctgataaccaccaaactactctctatcttcaaataaagaaaatgtggtgcgtgkatatatatatatatwgtatatatatagtatgtatatagtactatatatatactatatatagtacatatatatagtgtatatayatagtacatatayagtatatykatatagtatatatagtatatatatwcactatatcgatatagtatatatatamhggaataytattcagccaccaaaataatgaaatcttgtcatttgcagcaatatggatggaactggagattattttgttaagtgaaataagccaggcacagagagtcaaatatcacatgttctcactcatatatggaggcttcaaaagtggatctcagaagatagaaagcagtttggtggttatagaaactgggatttactcatttttttaaaaatctctaatgccaacacagagtagttgtttaaatatgtgttaaaattatgatcgattgtartattgatcagatatggcctaattattccccaactaaagtatttgctttccctgacctgccagtaacctggcaatgacctctcccagcctaaagttttgttctccatgaaataaataaagcttctctactaaggctaccagccatgttttttatttcttctttctttaaaattatttattctatattttcatgagagtcttcacataatctctagacctttgacatcagcctcttttaccctgaaggcattgaagaaaaacagggtacaaaagactggggcccctacttayataaagctgtgatctaattgttaataaatgggaaggaacagggagatacatttatctcactgtcttgggggaggagagaaatgttaccttatagtgcttttcatcttggttctatgcagataacctatgggcctccacatgtttgctataygttttataagtcatartccaccgccataagccccagggaacttaaagaatttagatacaaggagctgaactccttagtttaaacaattaaatcatttatgcattcaacaaattaaggttttttttttccaaaagagcatattctcatcttctaaatctagaaaatcttttccaatatgttatttttgaccacttcacagataattgagtgaggagggagaagagagacattaagaaaaatcctgaattgtatgaaccwgtgtaatttttaaacagctagaatcatggcatgttgttttccttctagatccacgtctccattagcaagacttcatggttcttctattttggagaggcaccacctggagtacagtaagactctgttgcaggatgaggtacgtaaamctctctttaggacagctaaacacaaattctggatcaaagcactaacccacagaaaatgcttggaaaaagggtggccttgagttacagcagttgatagtgtatacccttgttgaagtcaattgatagaaattgctatattgaactagtttttgaacagccaagttggaagtagctgagacaggtgaagagagccatggaaagtcacagaatctctgtgggtctgtagggaaagaagaaaaagcttatggtggatgcaaaagggctccrtgcaccccaagcatatgtaaatgtaaagaggaaaggaggctacatggtcactgatttgcttattcattcatggggcatatgctttagagcatggtctatgcctttaagaaagtcaagctttcatagtggagtgtattcacacattcttgcattgctataaagaaatacctgagactgggtaattataaagaaaakaggtttaattcactcccggttctgcaggctgtacaggaagcacggcagcatcaacctctgggcaggcctcaaggagcctacaatcatggtggaagctgaagggggagcgagcacttcatatggccagagcagaaggaagagagatgcgggggaggtaccacacacttttaaataaccagatctcatgagaattcactcagtatcatgaccaaggaggatggggctaaaccattcataagaaacactgctcgcaaaatccaatcacctcccaccaggacccacttccaacattggggattacaactgaacatggggtttgggtggagacacagatccaaactatatcatggaggtaggcatgacgtagccaccatcagagaggcactgagccatgctctgagagttccaaagggagaaaccacatttgtgtgaagacagtggcagcggaaaggggcaaagagggtgggatcagagatggctttctgcaggagcggctcagccccttgaattcattgtgaattgcacatattacgtactactaatcttccagagagggtagtcattcttcttcccttgatcaattttattgaagggatatatgggcctgtggaaagttgtggatgttgtctaattatactttcttaagaacgttccaaacmaaaaatgattaaggtgagtcattagattgaggggagcactgttttgtcrmaggcagtgaacttgttcagaatcacatgcttcattaggatacatgagccctctggagagtgggcttttctcactttcaataataatcttttattaaaagctcagggagaatatacagaaagatatccaagtttagagagaatactaaattcttctaggtaatgaaaatccaagatggtcctcataagccaagcaggaaaatctcataaggcagagcaactgggcagaaaaatggaaaaagaagaaaactgcttgcgttgttttaacagtctgtgattgacacagcacccaacaccattgccatcccagacctgctgtggcatttctaattccgctatgctcttggcaaagcactaacctcatataagtccagatggtggttctcagacatgggtacctggaccaactctttcagactcattaatttaacagggcgggggcagacaggctgttaaggcacagatcctgggccccattctccacttactgaccagactctctggagtttgggcctgggaatctgtattttgaaccagaacccttttaattctgatatgcagacagaatctctccctgcagcagaattcacagcataggtaacacctgttctatgagaattaaaagaaggagcggaactgaaaataactcaggaatgtaagagtaaattgttattacctaatttgttataagtctttattttgctggttgagacaatctttggtttctgagtaagaattttctgtaaatcccactgtttatatgataccacagtgaggtagcatcaaatgtcatgtatcgcataatcatacagtcacctactaaaacaaaatactgttttaaaacagctgccaaatatctacatgcttaacactggaaggctcctagtttcttaaatgtttttccttctgggatttggcagtttagagttacagttttccatctgaattttttttaatgttatttactttgcagtctgaactggctttgatggctatataaagacttattattctttctaaaaaggaatattgcatctcagtaatctataccatcttttcaaggacctctctgtaataccattcaacctgctaattgcagacttttaaagccttgtcaatagagtcgctaggcaatgcagtcacacagagcctgtttatgagcagtcaaattggacacacacacaaaaagattgttacctatcagatattctttttacattttggggagacaatgtagttcttgtatttttttcattctctaaagaaaatacacacattaaaaattttaatttttttaaataagggaaatccttgggatttatccagtaatttcagcatctgtgggcattactcagacattttgttttgcatattataaggctttgaacggcaatgtccttctatcctagcagagatggattcactgctttgaggaatagaactgcctgtactctaaaccagacagaaatcaatgctttaacccaaatgaatgagtggaaamcttgttagccaaatttgcacaagtataaattttaatactagaatatactgtagaaatgacaaaacatattgctcagcataaataacaaaatcttgttattattcagaacatctctttccaaagcgtatgataattttatttatgctttttcatatcaaccgcatcagcctgccccattttacrcatagaaatgtgaaggagaaatcaaataccttgtgtactggcactagcaaggcaagaacatgttggcaatattctcttgcgggcgtcataggcaccatgctgaagactagaacggcctgtactttccctggcctcagctagctcgagagccacgatctgaatgaattaaagccatttctacctgtttggggtgtgctwtgcagaattcatagttctatcgccattttaatagtcagggaaaataaaaaagattctttccgtgagcaaatgaaagcagctgagcaagtcagggcccgtggccagrggctgggaagtaggtctcctttcttgtctagtgcacctgtctccacawaatgtcttcaacacaatgctcgaaaacaaatggaatattacatatttatacatgtattcaatgttcattaatagttgcaaaagttacataagcccactataaaaattcaaacgataggaaaacatcaaagacaaatatttcttaaattgcttcaaatcctaccatccagaaacygatatttcattaacgtctaatgaacctcattgcagtcaccctgtggatatacacaggaagcatggagagaaaggactccatgtgttcccactacccaagctatttttttaagccagagttggtttttaatcaacttcattgaagtatatrtacaataaactgcatctcttattttattttatttttgagacggagtctcatcttgttgcccaggctggagtacagtggcgtgatctcaactcactgcaacctccgcctcctgggttcaagagattctcacacctcagcctcccaagtagctaggattacaggcatgcaccaccactcccggttaatttttgtatttttagtagaggcagggtttcaccatgttggccaggctggtctcgaacccccaacctcaggtgatccacccaccttggcctcccaaagtgctgggattacaggtgtgagccaccatgcctagcctaaactacatctctagagtgcccaattccatgagttttgactattttatatacctgggaaaccagcaccacaatcaagatgcagaacacttctatcatccragtaattgytcatatcatgacccttcacagcacatcccactgtccactcccagccctaggcggcaacctttgaaatgttttcagttgctatggattagtttacattttctagattttatataagtgcaatcacacaattagcacaataatagaataatcatgcaatcaatcacactcttttgcattggtttctttcacgcaaaataataatttttagattactcatgttgtgtatrtccatgattcattcctttttttagagatggggtcttgctctgttgccaagactggagtgctgtggcactgttatagctgtctgcagcctcaacctcctgggctcaagcaaacctcctacctctgcctcccaagtagctgggactacaggcatgagtctctatacctggctaatgttttgtattttttgtagaaatgcattcttgctgtgttgcttaggctggtcttgaactcctgagctgaagcaatcctctctccttggccttccaaagcactgggattacaggtgtgagtcactgtgcccagtcaattcattttttttcattgctaagtagaatccctttatcttaaataaaaggtattgcatttgactttatttgaatttaacagaagaaatgtttttgaaatggaaagaattgcagaacttcacatgatrgtgtccttatcacaagaaatgttagctcttaaagagccctctaaaatgaataacaaatgactatgaaaaattatgaaaagttgtagctgagcatttagatgtttgacatttttaagctatatgtgttaactttacagtatctactaactcccttctatgaaatatgaaggaattggtatactttttcccgcatgtctgttttatatgatatatttttttaccattatcaatatttataaaattacattttgctctgtaatttccactattgtttattttaattcaacttttaattgagtccagtacttattgactctacattttcatataaattttataattgatttgtcaatttacaaacacacatacacaaacttgttggtattttggttggaattccactcgctctatggattattttatgttcttgtggtcattatatgcataggttttgcacttgttcccctctgaaaattactcatccctgagtggagccaactatctgcctagtaccgtggaagaagggcaggaatgagctggggaaatcctcagcttccaatttgttgwctcaaacattctctcaccaattctaaggagcacacctgtattagtctgttttcacactgctgtaaagctactacctgagactgggtaattataaagaaaagaggtttaattgactcacagttctgcactgctggggaggcctcaggaaacttacaatcatggctgaaggagaaggggaagcaaggcatgtcttacatggtggcaggcaagagtgtgtgagaaagagtgaggaagtggcacacttaaaaccatcaactcttgtgagaactccctcactatcatgagaacagcgtgggagaactgcccccatgattgaatcacctccttccaggttcctcccycaacacctggggattacaattcgagatgagatttgggtggggacacagagccatatcaacacctctttgattttgttttccggaagttggtaaagctcacactgagcaaagcccatgaagctccaggccttctatttgggatctggccattgctgtctgccttccctccttcacttcttgttacctatgacaatgtctttggtctaggagattgaatatcagaagtcaatacaaatgtacatcagcataacttctccatcaactcctcttttgctgttgttttgtgttgtcaaagtaggtcttgaaaggaattccttgcttctcctgtgcgctgggcacatcttgagacctcttgcyctaattaaagaatcactgagtctgtgtttacttactaaacaaacaaaaaacccaacttgtgtgcaagtgtgtgtgtgcatgtgtgtgtgtgtgtgtctgtgtgtgtgtatgtcccactttgttccaaagaggatttgatggagcttcgaagaatacatacaacactaaagaaaaagaaaatgaggactaatggaaaaataagaaaaacgaggtgagcatagtaaaggccatacatacccaaaatgtatatcagagatgggccacaaatttggccaaaacgtttatcagacacaggccacaaatttggccaagtgctttctagcaactaatacaaaaactggaatgggatcttttatatgaatctatatccacaacttaataagtcaattagaagctcttctttcaagaacctcaggtgtgaaagggagaacagagaaaatctaaaagaatgtagaattaagaaagagtttttcaattaggaggcttgtacatgtttttagataaaaatgaaaatgagygagaagaaaaaggtatgaatgaaatgcagatatgtagtgctatatgcaaaagaagcagtactgaaatggtgactataaaccctttttcttcattatatcaatttttaaaaatccagtattgactcattttgaaaagtaagatagtttttgataatctatcaactttaatacagttgttttattattttggattggaaaaaggtataagagtaaacagtatttgtcacatatgtttctatatatttctttatatatagcgttttctttcacgtctattaaatagcaacaagtgtccaggtttacattaagcaatatgcactaaaacaattggtgcataataaatttgatgtatttgatttgttgtagattatatactctgcacaatctgacacttggtagagacgaggaagtctctgtcccaaggaattatttctctgaattcagcagtctgatttgcttctttaaatgacttaatgtgctataaatattaacttgtctaaaagtttaaggcattttcacacattcctcccctccccctgctttttttcctagtatagcaatcaaggttggcttcaaatattattaatttgccaagtatgtatctgagtcacataataaacatcactttgggaacatagcaatgttcatcagtgaacaaataaaggcagtgattccctgatgtcagtatgccactggatcaccccaagtccaaaaggaaggccaccattgttccaaaatcaggggcaggttaagtgggatcaaaatgactccacttacttttcccctccctggtaatccagaccaggttgaaaataacctgtatccagatttgattcagagattctggactgatatgtacaatagacttctgtgaaatgtcccaagtaagaaattgattcggggtccaggcacggtggctcatgcctgtaatcccagcactttgggaggccgagatgggcggatcccttgaggtcaggagtttgagactagcctggctaacatggtgaaaacccatctctactaaaaaatacaaaaattagctgggcatggtggtgggtgcctgtaatcccagctatttgggaggctgaggcaggagaatcgcttgaacccaggaggcagaggctgaagtgagctgagattgtgccactgcactccagcctgggcaacagagtgagactccatctcaaaaaaaaacaaaaacaaaaacaaaaacaaaaacaaaaaaaaacattgattttgatccagataatctctcttttgtttttgtaatttagactggtcaacacccattgcttcattctagctattttaaaagtttaactatagttgctatgatgaactcattatgttgacaaaacaaatcacaattttcccttctattacttatatatgctttgtaaaacaccacttttcttgtcctagaaaatgttataaaaagatgacttaagggaagatttatataaggcatagtgtagtgtctaaaacttgagttcttgtccaattattgctttctaatatttcaatcttctgaaatgactgagccatatttggtcttaggtttgcaattctatttctaccaggagctagcctcataactttacgtaataataataatgatacaacaataaattttaacagcgatttacagttttaaaatgcattcacagttgtcatttcatttgattcagcattccacagatattaattgagcatagactaagtgctaggcagttaggcagggcagctgttattatgcccatatgagaaaacaaatacagatgttaagtgaagtctctaggattataccactgccaaagtggggaagccaggaaatgaacctgggttccctcttgagaggtaatgtagtgtggtgcagagattaggagcacagactctggaaccatgctgcactggcttagacaccagttctgccacattctagctgtttaacctcgggcaagttacttcacctctctgtgctggggtctgttgtgaagagattaagaatattcacaaagcacttagagcctggtaggtagtaagaactaagtaagtgtttactgttattatttggtgttcaggacagtattgtttttggcattatgctacttctctctttatatagtttgatagactatctcctctttctttccagtggagtttttctgtattttgtaactgtcaaattcatttggcaaaatcactatctatctgtcatttggcctgtatgactaaaatggtctatttggaataactgggctttaagaaaccacccccagcttatatactcattttctttctttctttctttctttctttctttctttctttctttctttctttctttctttctttcttttttttttttttgaaacagggtctctctctgtcacccaagctggagtgcaatggcacagtctcagttcactgcaacctccagtccccagcgttaagcaatcctaccaccttggcctcctgagtaggtgggaccccaggcacataccaccacacccagctatttttgtatttccatatttttagtagagacaggagtctcaccatgttgcccaggctggtcttgaactcctgagctcaagccatctacccacctccgcctcccaaagtgctacaagcatgagccaccatgctcggcctatattctcattttctagaatgctaagaaatgaagctgatccttatgtgaagagatgtagtgagaaactctttgaagaaaggtctagttaagtcttggtaaaatagaattgcatgaaaacattttcaggataatgtggaaggatttcattattttttcctacatatacacgaatatgagtgtaatttgcaatttctgaaagaccagtggtttctatgatcactctaaaattacctggtagataaagtaacatgtctgacagttggacttctcccagaaattctttattaaagcttctcaattaatacaagcacatttttaatctattgttatttattttaatggtcctagaagaaaacatttatttactccaaaaagttaaacactgattacatgaatattggctaacagtatctatttttatagtttaaattaaattatcttacttaaagtatagtagaggggtttgcttagtccatgagataaaaactaaaagcaagccaaaaaaaaaaaaaaaaaaggaaggaaaacaaaaaaaaaacaaacaaaaaagtgttgaaagacttttagattttcttcttgttaagcatagtttcatttgttcagaggcaaattattgatagcattttattgtgaattttcrtcttacagagtttaaacatcttccagaacctaaataagcggcagtttgaaacagttattcatttgttcgaggtcgcaataatagcaactgacctggctttatatttcaagtaagtacataactctgcacagtggaatgccctatactctgtgtggttttaccttccataaattrtctgttgcattaatgttaaaaggcatttattcacacacatacacacacacagacacacacacacacatacacacaaaatttgctctccttttggattaccaagtagagtatcttcaagacagatgcctgccagtaaatttactagacctctgggaacatattttaaaaacataagctcctaatattaagtaggttgctctccgaacaggtttgaattgcagaatgtgcagccaagtttgtgccttgtcaaaagagtgaagccaagagacctctcaaggtggctttttgtccaggtgaattctctatggtccagaatctggcattttaatgtttcagcctcagaaatttaattctgtcaaagtctgggagctgaacaattttgatggcattgacacacattaaccaaacttacaaaactgagtcatacgtaacagagagccagcctatttacaacagtaatattgccaaggagaccagatactcccagtatctccacattttctcataagtgaactataaagttgcttgatgaaaatgggttagaacaagatgaactagttataggatggaaatattcagtggcttgggcattgtcaaattatgcctttctgatccttcactaaatatttatttattatttattattattattatatgtattattatacaggtctcactctgtcacctgggctggagtgcagtggcacaacctcgggtcactgcaatctcggcctccaaggttcaagcgattctcctgcctcagcctcctgagtagctgggacttcagtctcccaccaccacatctggctaatttttatatttttagtagagatgggtttcaccatgttggccaggctggtcttgaactcccgacctcaactgatctgcccacctggccctcccaaagtgctgggattacaggtgtgagccgttgcactgggcctgaatatttaattattaaatagttcaatgtgaagacaaatactaagaataataaaatggatatccaaatatctatagcctaaatttaacaaatgcgaaattttgccatatttgcctcagattttgctttataaggagaaaaaaactagtgatgcaattgaggtattccacccctactccactatgaaaaatcccttcccttcttccacaaagatatcaccgtctgacgttgatgtgtattcataatttccatccatgtttttatatggtattgttgtgtgttgttttttttgtttggtttcttgktttttttgcgacggagtctcactctgtcaccaggctggagtgcagtggcgcaatctcggctcactgtaatctctgcctcctgggttcaagtgattcttctgcctcagcctccagagtagctaggactacaggcacacgtcaccacgcctggctaatttttttttttttttttttttttttgtattttagtagagatggggtttcaccatgttggccaggatggtctctctatctcctgacctcgtgatccacccaccttggcctcccaaaatgctgggattagaggcgtgagccacctcgcccaacctgttgtgtgttttcaaattgtccataggtggtatcatactgtctgtacatacctttctgcaacttgctttattcatgcaacattgtgtttcaaagatttatcattgataataaatggagctccaatgcatccattttaactgaatagagtattcaactgttgaatattcataattaatttacccagtcttctattcatagacatttcaattgtttctaatttttcatcattgcctacaatgctaccttgtatgtccctgtatatatatgagagtttctctaagaaatgtaaaagtgacaatgctgtaggatttgcatgtcttcaatttcatgctacattacaaaactgcactcctgagaagttgtgccagttagcactcccacacacagtgtrcaagagttccagctgagtgaggtggctcatgcctgtaatctcagcactttgggaggccaaggcaggaggatcacttgaggccaggaatttgagaccagcctgggcaacatagcaagactgtctctacaaaaaaattaaaaaattagccaggcatgctggagcatgcctgtagtcccacctactcggtaggctgaagtgggaggatcccttaagcctaggagttcaaggttccagtgagctaggatcaagctatttcactccagcctgagtggtagagcaagattctgtctcaaaaaaaaaaaaaaaaaaaaaaaagaaaaagaaaaagaaaagaaagaaagaaagaaagaaaaagaaaaataccacatctgaagtactcttgaactcagcaaattgaaattttattttgctaatataatgagtgtgagataatatcttattgttcaaatttgtagtttcttgattagyagtgagaccagctggacatccgtgtgttttgggttccaactttttgttggctatatgtgttgtgatatcttatcatagtttggggcctttatttttaggttatggtctcttttctcatatgtaattttgtatttactttcatttttaaagagacagggtcttgctttgttgcccaggctggtttaaaactcccggcttcaagcaatcctcccaccttagtctcccaaagtgctgggattatagatgtgagccactgcacccggccttatatgtaactttttcgttgtaatgtattccaagttacctgttttgttttgtttttccctctctctctctctctctctgtatggtttgtgctttttctgccttaaaccctttctgagccaaagttataccaccattctctgctctcgtattttctggccctgtagactttgctatgtggacatcacaatgcaaagtgggaacgtgaaatctgaaaagcatgtatttaagatattttttctctcttttcataagctaaaattgttgctcacagctgtatcttttctaggaagaggaccatgtttcaaaaaattgttgatgcctgtgaacaaatgcaaacggaagaagaagccatcaaatatgtaactgttgatccaaccaagaaagagattatcatgtaggtagttgaaattgtatttctctcttgttttttgtaaaaataacttattttgtacttatttctattttaaaattttttgttttcttcctaagggcaatgatgatgacggcatgtgacttgtctgctattaccaagccctgggaggtgcaaagtcaggtgagtccagttaagttttcttttctgtcacactgtcaggtactgcctaggtcccatgtaaatgtccacctaaagatctcaggcaacctcagaattctgaaaaattamaaatattagtgagacagtaggcaatttgattaggccctagaataaagcaaatagaaggaactttggaaggagaattctttcttgaaagaattctttaacattgaaacactgtaaataatttatataaaattatccaagaaatgtctgagtttttaaatagaggagtgtattagcctgttctcatgctgctgctaataaagacatacccgagactgggtaatttataaaggaaagaggtttaatgaactcacagttccacatggctggggaggcctcrcaatcatggtggaagatgaaggaagagcaaagggatgtcttatgtggtggcaggcaagagagagcgtgtgcaggggaactcccctttataaaaccatcagatcttgtgagacttacttaatatyactagaacagcacgggaaagatttgtccccatgatccaattacctcccactgggtcactcccatgaattgggaattatgggaactacaattcaagatgagatttgtgtggggacatagccaaactatatcaatgaggtaagtcagaacaagatcaggatgcatcgttagtgttttcctctatcaagggtgtttttgctcctatagtctcttcttcaatgtgctgtgaattataagaaggcactgactgtgagatgatgtctaaggttgccttccactgaagttcttcccccaccttggggaggcactagtctaccacttgctttcttactaattggatgaaaaaaccttcctttttcctccaataatttctagggaaacccctaagcagaagagagcccagaattaaatgggtttaactataaaagtgggttgtatctttttaaaaagatagaataattagaactcagtgtaggggagaaaaaatatctatttctcacccatcctagcttcatgactgaggcccctataacaaaagacagattaacaagagaaaagcgtacacgtttatttgttttacatgtaatacaggagccttcgtgaggaaacaaagaccctaagaaacagttaaacttgtatgttttatgctaggttggatgaattagatagtcatggagaaatagaattcaacaaagagggtatgatctaatcgtgaggcagcttagcaaggccgatttgttcagattcttcttggcatctttgtgtctctggctcctttcctccaggaatagggagggcacctcttgaatgaaggtcttatgatctgcttcaggggaaggtcagaaaatccttacctggttttatgacctacttcaggggagaaggtcgggggaaggtgagactgatcttcctgctgctttagtttcctcaaattccgtcaccttaaaatattttggggcagggtgtcctgaactccgtcaccatcaagtccaaaaccaaatgcttcctctccttccacctcgacatgcctgctcttcttcctctgttctttatcgatgaggtcacccaagctagaaacctggggtcctgcttgagcttatctccctcatttcaaaatcatttatatcagcctcgctagtacctcagttctgacttttatcagaactatggtagcagcctcctaatagatgctcacatcaactccacaagtcatcctctgacttgctgccaggatgtctctacacagagctcaactcagccattctactccttaaaaggctcatactccccattgccagaggtttccaacttctttcccaaagaagtaaagtctattttctcccaacaaaacttgcccaaagatcactttataaaagagaaaaaagcaaagctactttagctttcatctctcttggtctccaccttcttgggccctagagcacttcaggggaaccctagactccaagagtaaacagcactggcctagagaatcaaattcaagcttcctggcaaaatttacatggcctgtcactgcctgtcctcaactcacactcccagcatcaattcccatcaccttctcccatgtcattgcttcacactctaagcctgcactcacagaagctttgtacgttccattttatctcggcaaatattcttcccctcctcttttcctggaaaattactcttgttcttcacaatacaacataaatgccacctccttccttcatgaaacttatctttactcccttctccctgacccatagcacttacactattattgttacagcacttaccacactgtatacatgactgtcttcgctagactctgaacattttaaagaaaaagatcaccccttattcctcttggcaagcctggctcatgccaatgtaaaggcagctagcaggtgttcaatgaacttgataaatgtttttttttagtgatataaattaatgctggaatatcctcacactgtaattaggtaaagctacatactaatgggtgtatgtcacatgtgcattcacagacatatgctagatgctaacagatagacaggacaaagaacaaccggcgaagtgttagaacttgaagcataatatttaatcctcctatttctccttttcgttggtgagaagtggtggcaatcgtaaatgggagatagatactcctagaataagcctagaacactgaagtaggaagaaaaagctcccctttcgcatttcaatataatctgtaaatgacctctttttaaaasttaagagcatacggtttgatagcacctcaaacattgactgtaaactcgatccttaaatgtcacttgtactaataaaatgcaagttctctattcataagtggatttagtgaaccaagcctttctcatttgcaggtagcacttatggttgcaaatgaattttgggaacaaggagatctggagagaacagtgttgcagcaacaacccattgtaagaccttgacataaaaatgtattacttattaaaagttatcaggacaggccgggcgcggtggctcacacctgtaatcccagcactttgggaggctgaggtgggcagatcacgaggtcaaaagatcgagaccatcctgaccaacatggtgtaamcccgtttctactaaaaatacaaaaattagctggycatggtggtgcatgcctgtagtcccagccactcgggaggctgagacaggagaatcacttaaactcagaaggcgaaggctgcagtgagccgagatcgtggcactgcacccagactggagacagagtgagactctgcctcaaaaaaaaaaaaaaaaaaaaaaaagttgtcaggacaaatcagtctgttttgttcatacatcttagaaacctgtcttaaaggatttatttctctttctagcctatgatggacagaaacaaaagagatgaattacctaaacttcaagttggatttattgattttgtttgtacttttgtatataaggtaagtaagcaaattatttgaattaaatacataaacatttggatgagaaattttctttcaaactgtcaccaaaatttagaagtcacccatacggaaagccattggggtatcactgtttctccaaagcagtttgaggttttaccctaatctcattcagggctggaataaaaggagggaactcagatgtgagcgaactgaacacttccttaggcaggcagtaaagacagcacgtgtctctttcccaaacttcataggcccgtggttaaacttatcctagcagctctgagtgctgtaacaattccttacagctcactctctgcatatgaaagatcctgaaaattaactgtatgatttatgtagtttctgacctaaaattccttttaggagttctcacggtttcacaaagaaatcacacctatgctgagtggtcttcagaataacagagtagaatggaaatcactagctgatgagtatgatgcaaagatgaaggtcattgaagaggaggcaaaaaagcaagaaggaggagccgaaaaaggttagatgggctctgtttttgctccctgtaatgtagccagaagctaggctgagcttaatggcatgtgacaaagccataaagagtcaccacaaacagaaaacctgctttactggtgcagactgatcattttaacaggccgattagtggttttcaggtccccctggccctgccacagacaacatcttatgtataactccagatcgaattgaccggtccagttgaagtagaggttggagctaggcttcttcatcttgctagaaggtggctcctctgcagaacactgggtgcttagggataatatgtaaactacagaatctgggggattagagttaggtgagaaaaaagtttttgtcccaacattatgcattagctgtgagaccttgggcagcttgcttaacctcgctgagtttaatattcttctccatgtaatgaggtggttttacagatcttcagcttaaggaagccctacatgtagagtaaggctgaaattgccggtctcccaaatgtctcattgggagatgtttttctggcatgagattcctgtgccattttttttctggcatgaaatttctattcctaaagtcactttgtcaagtttaatgttgtttttggattcttaaaatgcttaggattaactattagttcatcagatggcccaaacatcattttgaaagtggaatgctaatttctgtcttgaaagtttatcactctgaaggttttgtaagcaattgttattgcttaacaaagaaatcatctctatgtggaaaggccctgacatgttccttttaggtggctctattgcatttagtgaaattttaaataattcataggagaaaatatttttcttaacaaagttaargatgtccttcagaataaaagcaggagtttttgactccttgatatccattcacttatgtatttatcagatgtcttctctgtataaagccyggtgttaggcaggccctggggaaagatgggatcctttatcttgaacaatttaccatttggtgggggaactaaacattgtgaaccaatgcacaattaacgatctcgaagaaggcactagtgtgcacatgggccatggagaaggctttcctgaagaatgcttacgctaaccacagaaagcaggcattggggaggaagagtaagaaaatatgtacaaaggcttggagtaggaataagcttggtgcaattgaaaaatttttaagctgatatagctggagtctagagagtaaagagtgcgaagtacatatgaagctggtagtgcaggtagctgccagatactgtattgccttgaaggtgggctaaaaatgttcatgggtcatttgagagatttaaggtaagatatgatttgcatttcaaaacaataagtgatttttaccaagcaagtgaaaagtgagggtatttcttagtactattagatttaacctttatctcaactttattatgaagagatgatcaggtcctttaagtgacattggatatggatctgtattttatttgcacaaaaatttacttctgagtttttttgctactacatagagaattctttgtggactaagatcattattttctatcaccaggcatggagctttgtgcatcaagctcagatttccagactgcattgtctcagtgagaaactaagatgttaactggccaaccattgatcagattctgttttttatttatttaatttatttttttgagacggagtctcactcactctgtcgcccaggctggagtgcaatggcatgatctcagttcattgcaacctgtgcctcccagattcaagcgattctcccacctcagcctcctgagtagctgggattacaggcacatgccaccacactcagctaatttttatatttttagtagagacagggtttcaccatattgaccaggctggtcttgcactcctaatctcaagggatccacccgcctcagcctcccaaagtgctgggattacaggcaggagccactgcacctaacccagattttattttttgaatggaccaactctgaatattaattcaagtttttacatggtcaaacccacagtacttgctaggttaaaatgactaattagtctacaaagttgacactactatcatgggaatgttagaataaaaacactgtatatccactaactcctaataatattgctttccttgattttactagctgctgaagattcaggaggtggtgatgacaaaaagtccaaaacatgtttaatgttgtaatattatctaactggtctaaacttcaratatcattttacctttgaagaaaaccagaaaacattcaaaagaacttcaacaaatcatcacgtaacaggatcttcagaaaaactaccctgtgactatgaagaaaatatatattgctagcccaaaaatcccaggggcaaaataaagttcaacaaaagtgcaaaatatgacaaaaataggtacatttttggtgccaatttattttaaattaaaaaatatgcaatcctgaaactagtcacaaattcttttttaaaacattaattgtatttatttgctaaggctgctataacaaagtaccacagactgggtgcttaaccaatagaaatgtattttctcaaagtcctgggggctggaagttcaagatcaaggagttggcagggttggtttcttgggaggcctctcaacttggtttgcagatggccatcttctccctgtgtcttcacatggtcttccctctgtgtgtctgtgtcctaatctccttttcttataaggactccagtaggactggattagggcctacccatgtgacctcattttagtcttaattacctcgttaatggccttatctccaaatacagtcacattctgaggtactggggattggggcttaaatatatgaaatgggtgaggggtgggggagacacaattcacccataacattcgtaactgtgattcatacctcaagccactccccgaactaaaatctctcaacatcttaataaaagagtaaacgcagtatagaatgtatagtgttgtaaatatgatatagaaaataatgatgtcattttattcaacgtcattccatctgaaatgcttatctcttttctctacttttacccttgataatagaatgatgaagaccaaactattttttggcaatatttattaaaactatgcctttgacctacactcctccttcaaagtttgaaatcaattattttgggtgtaactaagaatattttttacagttcagaactattcttttcattaaaaagattatcaatgcacaagattctaactggataatcataatgcaagttaaagcagctaatgaatattatgcgttaagaagcatgtgattggattatgcaagaaccttatcaaaaatagtacagaaaaacttcaaccaagatgactttctaaaaatgattaatagacctaccaggcattctaaatattaaattgttaagacaaactaagggcaatcaactacttcgactgcatggtatatgtctgtctggatattcgagaaatttaagatttcttcttttacttatctataatcatagataaaattagaaaatagaataatatagttatgccatatattttatcatagaatttttttgtcacaagctatctacagtctaaagaattgaacatcaatgaacctatatattttgtaatagacaagataatgttcaattttgagcagccaagaaatgaatcgccatttatttttataagttaggtacttagaattgtcagactgcttctctcacattagaatgtaaaatttatgaggaaagattttgtctattttgtctgttttgttcacagctctatctcggcacctagagcagtgcctggcacaaggtaggcactcagtaatatgaatgaatactatgtgaataaatgttacaacaaacagatataaataaggtatgacagtaagtcatatgtacactcaaatgagtattgtttattaaagtaatcaacttagctaagtgatgcatgctcccttatttccattgcttaaaataattttgaaattccacttccagaagcactattattttaaaaaccacgtaagaaacgttattcctttagccctatgtaattttagaccccaaaacatcagtcagctcaaacaacttcccctccttagtcaccagaaattgtattgagggtagagatgtccaccactgaaggtctgccaaatacatgaactctgcataagagcaagtataagaaggcctaacttcaacacccccagaccagtggtctgctgaccaccactgaccgcactatagcaaagtttgagataggtgtgtaggagaattactttttaaactcatcatgttagaggccttttcaagactccttaaaaacataactcccattatctgtcactgtgtatgcatggattaagtattgtgattttatataaatttataaatgagcctgatgtcataaatctacttgaaataccaaatacactgatctatttttaaagggtctttagatattcttcctagttaaattcctaattttaattttgcaggaattttactttctgacaaccactaaacaatggacatatttttaccataagaatgtttaactgcatatattctactactaatatcagtcttgcggctggacatttcaaacactttttcaccggaaatacagattcatttttacacactacaagtagtgaggtgaaaaaaaacaatttattcaagaagtgaggggactatcaaacaatgttaaacactgataaacccaacactgatttacttttctgaaacaggttcagaaatgattgcataattacttcctagatggttcctttacagccatgcccagctcagtgcctcacatataatagaagcctgataaatatttgtggaattaatgaataactgtttaataaaaggaaaatctctgataataaccattttaaaatgataccaaattactcattttgcagtttattgccaatcattccgtgtttaaatgttatttaaaatagtatatcttcaataaaatacttgcttatgttcagttcattttctatatgtcctttctcttattcatcaagtcaagcatcttctcctatatctatccatctatttgctctttataaaagcagatctttgctagttttcagaaatcaataaatccttttgaaaatctgatttttgaaaatttgaaatttatggacttttcctccaaaaaacatacacagaagtttgcacagattctaaaaaggcttggatctcctgaagcacctccatagacccttgcgactaggaccttatgttaagaagttacattttatatttctgcatagaagttctattagtccattttcacactgctgataaagacataccagagactggggaagaaaaagaggtttaattggacttacagttccacatggctgggaaagcctcagagtcatggtgggaggcaaaaggcacttcttacatggcagcagcaaaagaaaatgagaaggatgcaaaagcagaagcccctgataaaaccatcagatcttgtgagacttattcactaccacaagaacaatatgggggaaaccgcccccttgattcaaattatctctcactggatccctcctataaaatgtgggaattatgggagtacacattcaagatgagatttgggtggggacacagagccaaaccatatcagaggtatattcatatttgcatgagtatatctgaggcaagatacatgcacatagtattattcagttaaattatcttactgcataatctctgccggggaggcaatttttgtgaacacatgaactgttttagactactgggacctcactggctccctgtggtaataatttacttaatagtaaattatccacaggctaggaagtcaaatttgattataacaaactctcttaagtggtagaggttaagaaggaagcaagagacaggcaagcaaaaaacctcaaaaagcagctggaaataggtggtaatgggagagcaggtacttaaaagaagggtgccagtttatcaatgggaaagaaagaagttaaagacatacataatatactttaatcctagtaatttaaaataattggcagagcatggtggctcacacctgtaatcccagcactctgggaggccagggtgggaggaatgcataaggccaggagtttgaataccagcctgggcaacacaggaggactccgtttctacaaaagaaaaaaatgaaaaacaaacaaatccagtattggtggctctaaaaaagagaaaaagaagaaataataaaataaaataatgaaggcaagagaagatacataatgaaggcagtgaaaaaaaacctacaaaatgtaggaacaatggaatctgtccagctctatcctctaggagctacaaataaaacagaattgtagataagcaattgaaaagatatttaaaggacaggaaagtctttaattgaactaatgaacttccaaagcctctgacattctgagagaacctggatttttatttccaaagacaaaccacacaagctgtaacttgcagataaaaacttatatggaatttcaaattgcatgaagtttaaaacttcatgaagtttcacattaaggagcggaggcttctctctctcgtctcatagaaacaaatcctgaaaatactcatcaaattcttcttccctatttaaaaaaaaaagcatacttaagatcaatagagtaaaaaaattactacatgatacattatatgagattaataaaaataaaatactttaagtcaacatattggctgattctgctatatatcaatatatcgccatgattcagccatcaaataattcttagtttctagaataatcataactatacccagattgattaaaataaaaatatttcatatggtggcacctctccctaaatgtattacctaaaattttgctttgaaatacttgtgaaatgtcattgcttctctttactttgtgggcttactttataacttctctgttcattctcattttaaattatagtctgctcaagaagtgaataaaaaagaaactatttttaaggaaaaatgtaagcctaagttatattggggaataactaaggggaattgggtaaatctccttaggctgtagtttttttactacactgagcatagtaaatatattatgtatttgtaacagtaaatattattattttactttttaaaagaccagtgggatagcagtatagaagtgtacttcccatgcaagggattcccttgcataggtttatgataatcacagtatgatggaataggcttctctggaagcttaggaaacagccatctctgaagaaatccaagcaaggaccagaggttcatctgttaaagtgaactgatgaaagatttatttaccaggaggaagctggatgtgttggctgcttatgacaatggctgggaataagctctaatcttaccaggctaggcagtccttggcattaaatagatcaccatgatgttgtatttttccattaataaagctgtggttatagcttcctaaactgattgaaaaggtacatattctctattaatatcagcacttactgtgatttttcatctgtctctggtagtggacccttccaaagttcagattctgaagcackttcttcctcatcagagtttcctgttcatttaaaaaagatgatttttaaaaacctattatacttaaagcacattttgaattattcgccaatacaattaactttttatttaactcagcttcaacttttatgactctctagaaatttaattcactctcacaggtacaataaattcttttaaaacatatataaataagccaagggttaccaaagaatctcagcaaaaaggccaaggattttaagtctcatcgaaacttctctaagttacactgagttaaagtagcaattccaatatcaactcttgtaagtcaattatctcttgcaatatagttgtctctgatctagtttcttctttttcttggttacacagaagacacgcaagttaagatttacatttgtagagaacatgtttacattaggattagtaccttaagaactgagctagtatgtaagaccagctagttaaattattttaaaaaaaattgtcagacattttaaaaaaccaatgctgattacataatgagaagaagcctgtttcagggaagaaactggcattctcacacattgctgggagtgaaaattctgtaaacctttttctggagaaaaatctggcaatatagatcagtttaaaacgcataccctttgaccagcaatgctgcttttaggaatttgattacttacatacataaataagcacctctgatacatatgtacaaagatgcacactgtgtaacaacaacaacaaaaaacctaattccccaccaattagggattaaggactggttaaataaatactatacagctgtttaaaaacattagcatatctgtatgtactgcaatagaaaaatgtccattctatatcaaatttttaaaaagttacaaaaagtatgcatagtataatagatatgttaaaaacatatgcacatcatatacatacatgtaattttatgtatgtattgtaagtttgcaaaagccaaccaaatttaactgattatattacctgtgggcctggaatacttttactttctattttaaacattttcaaattgtttgtattttaaacaatgagcatgaattaccttcaaaatcagtaaaaacaataaagacattttattaaagatgacaaaatagatatgtttcaaataaatcacctgtattagtcaactaaaaatttaaaaatactg

SEQ ID NO: 6886 - DNA, 41736 bp, Homo sapiens
ttttataaaatgcaggagcattttctttttatattaaatccagaactttaggacccgagatgtttagaagagagcccaagggcactaggattctagaacctggagaggaggcaggacgtgaaagcaccgatggccaagtcctatcctcccgccagagctccacctggggattggttggtagatgactgaggtcaactgctttcatttgatttattttcaaacaggaaagggaaagatgagaagatatattgtgtatcttctcaatgaactctaaaaaaattgagtacgatattcatggaatcaccttatttcaggaccagcccagcagaaatctaggcagtgatctgatgtttattcccaatcgtttggtttttatatgtagggattgggatggtcctttgcatttataggcaatacgttaattccttttcaaatatcttcatttaacacagctaactgaaaggctcaacactccagtgaagaagaaaccacaaatgatgaacaaatgttttgtcactctttcagattcagaaattttgcttgaaaaaagtctgaagaaactaatttaggaaagaaacctctgccaataactctaaagagtttgaattggttgcctttattcctaacactatgatgttttgggataggaactagtagatggtattttttctttcccattggcagtatatcatttacaacagatgttcccgactcaggataaaatgtaactggcagccagagtcacccaccagcccctgaggaaagggctcaaccttgagaacatctggctggcttcaagaaggtcacacaaatacaagatgatgctgaggataagacaagtggttttgagagaggaaaacctttaaaaatatttggaagagtcctgaagaccaataaaataaagacactgcaatacttcatggacaccagagagcaatttaacactgaaatgaaagcaacatgttgcacctgaacactgaaaaaagcccatgtgttaagaggaagaagaaatatgcaattcactgcaataaatattgaacctttaaaaaacagaaggaacatgaaaactaaaggacactgggccacagcaaataaggtggcggcagccatcccataatgattacatgatctccatgattgtaaaatgtatatgccacctgaatttattcttagaccttctctcaaagatgtctgcattcaacacaggcaataactgcaggtaatagtgaagaatccttcaggcatgatagaggaacagactaagtgtgggaaaaggaagaactaggccgggcgcggtggctcacgcctgtaatcccagcactttgggaggccgaggcgggcggatcacgaggtcaggagatcgagaccatcccggctaaaacggtgaaaccccgtctctactaaaaatacaaaaaattagccgggcgtagtggcgggcgcctgtagtcccagctacttgggaggctgaggcaggagaatggcgggaacccgggaggcggagcttgcagtgagccgagatcccgccactgcactccagcctgggcgacagagcgagactccgtctcaaaaaaaaaaaaaaaaaaaaaggaagaactagtcaaaattgctaataaggccgggtgcggtggctcatgtctgtaatcccagcactttgggaggctgaggcaggccgatcacctaaggtcaggattttgagaccagcctgaccaataggatgaaaccccatctctacccaaaatacaaaaattagctgggcgtggtggcatatgcctatagtcccagcgactcgggagggtgaggcaggagaattgcttgaacccaggaggtggaggttgcagtgagccgagatcatgcccattgcactccagcctgggcaacagagcgagactccatctcaacaacaacaaacaacaacaataacagcaaaaactgctaataaaaattttaacgagaatatttcaggaagtgaatgagttgtgttcatcttcaaatgtgtgaaaaattattcagtgaaaagatgggcagcttagtcttatgttgctctagacactatcatcaggagcattgggtacaaataggaaaacaatcagagcagtacatacagggaatgtgtattctgcagtcaacataattgttggagttgttagagaggttactagtgtgtggagagaagtatgacgaaagtccagtaatgaagagttttgttttgttttagcagagatgactaagtgataagaaattcatttgatgcctgtgtaatggggcattttgctataatgtaagctgttataatcagacttttcttgttcatagattggcaaagcatcatattggatatcttagattactgacatcttaaaaaattaatcagcctaatatttttaaatgcatttctttttgagtttacttttagttgaattttgagatttgtttcaatcattattggaattttgtagatgtcttctgatttccctagggaatgcctttgtgtccaagaacaagaaacataaccaataaagaacaatacatccgtagttttcctatattagtagaaactatttaaaggagatgaaaatggaaagaagatcatgaaaaaaataaaactccaaaaatggagctacaaaaccgacttgtaggtccaagatcaatgaaagtagaatacggaagtctggaaggaactatacattgtccctgacttacgtaacagagaagaaagttgggaagaaaagtgtgggcaacctccccacaagagaccagattaaaagccaggaagaaggctgggcacggtggttcacgcctgtaaacccagcactttgggagcccgaggtggacggattgcttgaggtcaggcgtttgagaccagctggccaacatgtgaaaacctgattctactaaaattactatatatatatatatagtaatatatatactaattatatatagtatacatactctatatataattgctatatataatatatactatatataattactatacatacagtatactatatatatacacacatactatatactatgtatagagacagtatactatatatatacacacacatacacacacacatacatatatatacacacacatattatatatatatatataaactgtgcgtggtggctcacgcctgtagtcctagctactcaggaggccgaggcaggagaattgcttgaactcaggagccagaggttgcagtgagccaagactgtgccactgcactccagcctgggtgacagagtgagactcagtctcaaaaaaaaaaaagtgaaaccccatctccactaaaaatacaaaaaaaaaaaatagctgggcttagcagcagacacctgtaatcccagctacttgggaggctgaggcaggagaatcgcttgaacctgggaggcggaggttgcagtaagcagagattgcaccactgcactccagcccgggggacagagtgagacttcatctcaaaaaagaaaaacaacaacagcaacaacagaaaagaagtaactcaaaatgtttcaaagaagtaactcaaaatgtttttctttctttcttcctttttcttctctctttctttctttttctcctctctttttcttctctctctctttctttctttctttttctttctttctttccttcgttctttctttctgtctctctctcttttctattttttttttttgatggagtctcgctctgttgcccaggctgaagcgcagtggcgtgaccttggcttactgcaaccactgcctcccgggttcaagtgattctcctgcctcagccttccgagtagctgggactacaggcgtgtgccactacgcccgactaattttcgtatttttagtagagatggggtttcaccatattggtcagtctggtcttgaattcctgacctcatgatccacccaccttggcctcccaaagtgctgggattacaagcatgagcccctgcgcctggcctagcaccttctagttctaattaggctgcatccatgagggtggaagaactgtctctggaaacaagcagtaattaggatgagaaaagttgtgttttatggggttatgcagtggtgagctttgtttgatcgtttaatgggggaaaacatggaaactcatgccccctaaaacgtttatataatagtatccccgcactgaatttttctaagtcagacttggcccatacaatttagagttgatatcctgtgcttttatgttgctttcccagtttctctatttccatcagcagctgatatctttgtagttgctctagagcagagggctcagtcttttcaatcttgtggtccctttacactcttaagaattattgagaaccaccaggaatttttgttaatgtggatgggttatatctagctatatttatatattttaagttaaggctaaggaatttaaaaatattcatttattgattcattttaagatagtgatgcacctatttcatgctaacaccaataacttatttttatggaaaaaaaacaacaaaatgaaaacagcgctttagttcacatttttgcaaatctctgtaatacctggttgaaacggagacagtgggagtctcctcactgcttctgcatttgcagaaccacaccccacactcttgggagcatgagaatgagaagggcaagtaacacagagggtcattagataaatggttttgaccttatggactctctgaaaggaataggaagtcctcaggggtcccctgcatcgaggcctccctgatcaagggagccaagctccaagggttgctggggagctggaggaggtgagatggggcagagaggccgttgtcaccaaaagcgtgtttaggctccattcacttcaccccaggtggcctactgagcccacatggccaccagcgcaactgaagcagaccccgatagaatcctgtgtagaattattttaggattcacccatcttggcatgcacaagccatttcaattgaagaatgttttctaataacaaaacattgtaaacctaagtatgtggcaatagtaatgattaagtaaattatggtttcccgaagcccagtgctctgcagccatcagagagtaaaagcgagaatgtgttcagtggagatagcctcaggatatttaaaagcagagagcacaaagtatagaatcgtgttgtgtatgttatgacctttttttctgtgcttttgaaaaagagaatacacgtatagcaggaaaagacacaccaaactactttatataattggttgtttttgtgtttggtaagatgtatgcactgaagaggaaggtttcgattttttttttttttttttttttttttttgagacagggctttgctctgtcgcccaggctggagtgcagtggcgcgatctcagctcactgcagcctcgaccgccccggctcaagcgatcctcccacctcagctgtcccagtagctagaactacaggggcgccaccacgcctggcgaattttttgtagagatgggttctctccaggtggcccaggctggttctgaactcccgggctcaagggatcttcctgcttcagcttcccaaagtgcggggattaccggcgtgagccaccgcgtcccgcctgtttttaatttttagcagttttaaatcttctggcaatgagtaatgttatagtgtcccagrtgtttggtcctttaagaaaaggatagcaggacgggttatctcggtgggagcgtgttccacctctgccctccgccagccgccctcgccggggatgcacccaggtattttcctccggatgcgtgagtggctcgcccgcggacacgccagccccgccccgcgagcccggtttccccgccccctccccgcccacgccctgcgctcccttcctattggtcccatgccgcgctttcccgttcaatcgcagcgcttagcgccagaatttgaatcttcgttttcgtttgaattgggcgggcgcgccgggctggaagaaggaagtggagggctgacgctgcgggcgggcgggcgggcgggaggactcgactcggtgggagccgctagagccgggcgcccggggacgtagcctgtagggccaccgggtccccgtcagaggcggcggcgggagcagcggggactgcaggccggggtgcagcgaacgckaccccgcgggctgcggcccggtgtgtgcggagcgtggcgggcgcagcttaccgggcggaggtgagcgcggcgccggctcctcctgcggcggactttgggtgcgacttgacgagcggtggttcgacaagtggccttgcgggccggatcgtcccaggtgagctgcggccgggactcctgggagctgtccggggtcgagggctgagccgcggggaccccccgagctctgcggggacgggcaggggacagacgcgcggcctgggcccgactcctcctgggctctggcgagggcgtctcggtggaagctcccaggaggcgcaggcgctggcgacaacaccccagctgccggactttggggcgccgggggctgcggtcggatcgtcctggggtccccgctagctagctgcggtgtgcgcttctgtggccggggataggtgaattgggcacggggcccttcttagctcctttgctatcagagtaactcgcacctcttttgcagtggaagagttgtaaatttgcttctggccttcccctacggattatacctggccttcccctacggattatactcaacttactgtttagaaaatgtggcccacgagacgcctggttactatcaaaaggagcggggtcgacggtccccactttcccctgagcctcagcacctgcttgtttggaaggtgagccccgcgggcgcgcgcggacgttttagctgagaaagaggaaaataccttagtcacagaataaagtccagaaacgcgctctaggattgggtcctgccgtcacttttccttggtgcttctcccattcgttactaagttgacatagttgtgtttttttgttttgtaagtataaatttgatgctagtttgtatgtttaagtggttttaaaaatcaagccaattaaaaaaatcgatttgctaatgttgcggtaaagaaagatgtagatgatcttcatatgtcactggctgcaggcaggcgtctgaagacactgtgcgcccccgggtgcctccacagtgggcatccctggccactggggacacagagaatgaaggaaggaagccatacacttgyctcttggctccttgtggcaataggaaaatgggacagaaagtcttcctgcctggaattcgagaacgtttcctcttatattgctgtcctgtttggtggtggtaataaccctgtccctgtataacaggtatagttgctgacagtgccccatcagcctctgacatgtgtcccactagaggcctgagaaggggggtcatttcccgtgtggtcatttcccagaccacacgggattcaggcctcaccctgtcctcccaaccccatcccggcctcaccctgtcctcccaaccccatcccctaccttgttcctcccgcctaaggcattccaagcctttgttcaccttggtacttcttacacacttggaagtttacaatgggaaagttctccccttcctcaagcttgtgtgatttccatcattcaggcatcaggtgaaatgtcacctctgaggaagccttgcatgaaaacttgtatttccaaccccacagcttcaggggtgagttgtgggtttgtctcccactaggctgagctccccaaaggcaaagactgtcttgttactaatcacgtgtgtagggccagggatggtgtctggcatagggggtgtgatcaatacctagcattctggcaagggtcagtagaaacatgggctggagccatggatttgcaatctcttgagaacagtggttctcacaggagggtcatctaaccttccaggattcatttgaatttccatgtcacaatataggacaggggcatgcgctgtcatcgcggaggagaggtcagggtgggcatcctaccaggctcagggcagcccccacaatacagawgcatctggcccawgatgtcaacagtgccaaagctcagaaacacccatctatagtcrtcctcctgccaaacaaattctcagttgtaagggatagtctttcctttgctctgatgtcctgttaccttaaaatcaaattattttattggggttaaggaagcttttcactttccatagatacctttctcttgaaaaggaaaaatataaacatttcatctccagtggcagtccttttgcttttttatacagtactccttgaatatatcttcatgcaagattttataatttagaaataattcctaagtgtttggtcacatgacctgggtaggaagagagattcttagactccaaaggttcagatgragaacagacaggccattgcatagtttattcaaatttttaagatcacaggctagaacaggaacactgaagactccaagaacctactaacaaactcttctgattattagtttgtataggtttaggaattgtctcttctgctactttgccatggtgttagctttctgtggaaaaacaagttgaatttagattttttttttgtgtcgcttgcaaattagtatttttattgtttagagacttgaatctgtcagtaaattcagtgtagttttaaaacaacaatgaaaagcttacccataatgagcatttactatgtgctaggcaaattagtgacatgtacaaccatttaattgaacatcacatgatgtaggttctaatgtaatttctttattgtatatgaagaaactgatgcacagaagtgctagcatcaaataagcacatttggggatgattaaacctctaaacatatttaacaytacaaacaaacgtttttgaaaaagcacagagtattaaaaatagtcattatccaaaattgatgtaagtattcctttgtgtcttttaagtatagcttttcatataaaaggtaattcgatttgtgttctagtgttttcccttgtttttayatactctctgttttaaagatctaatagttacatgtttaatacttccaaaagttctttgcaaaatgcaagatcgtttacattgcccattttgtttgttactcctttatgtcatatttacagatcaaacattctagtcaaattgtgttttattttgggaaattgaggtaatcttttaaaaagttgcagcaaccaaaaaaaccttcttcttttgcatgaaggggtattgaatgtgacatccgtatccagcttcctgttgtgtcaaaacaacattgcaaaattgaaatccatgagcaggaggtgagtgggttttttgaagatctacttttaaagctttttagttcacttttaatctgttcattagttacatatttccccttcttttcacttgcaggcaatattacataatttcagttccacaaatccaacacaagtaaatgggtctgttattgatgagccwgtacggctaaaacatggagatgtaataactattattgatcgttccttcaggtaggtaaaagctgattggtctaacagtaaatgtcatcttctgattaaccataaactagtgtcaaagtcaactgtcattcttctttaatgttcatggatgtcaaagtatttcaggttttcattctcaacactaatcttaatttaaaaggatatggatctaggaagatgactaattgggacaaaatgtgatggaatwcaaggatttgggtgcaaataattatgcagagggaggttgaccttgtcctaaaggagtttgttattttcttccaagtgttttgaaactgcatgagatttttctatycttttttattttaaagcaaaatatacacagagaaaaaggtacaaaacaagatggacaggtcaatttatcatgtgaacacccttttgatcaccacctattatggactgatttgtgctctcccgaaattcatatttkgaattcctaacccctcgtaccttaggatgtaactgtatttggaaagagggcatttaaaaaggcaatgaaggctttttgagctattagtatgggccctaatctgatgattggtgtcattataagtggagattagggaacacgtgcacagaggaaagcccatgagaagaggcagcaagaaggcagccatcttcaagtcaaggagagaggcacagagaaatccaatccagctgacaccttgctcttggacttccagcctccagcactgagaagggcatgtctgtttttcaaggcattcagtctgtgggactttattatggtggccctagcagactaatacatcctcagctcatatagaacatttccagaagctttttaaaaatgctgttgtctaatcactacttcattccctcagcaagtaaaccaccgttttggcttttaggatatcataaacgtctcgagtttcactayctaagcatggatctctgaacacgatagttttgtctgttcttataaaagtccttaacagtgatacaagaatgtatacatttgtgcctggcttgtgcttttctgtgtgtgagattcatagcatgttggacatctctgtagtttgttccttctcatggcataagkatttcactgaaaaaaaaatgtttaatatatacaataatatacataactatacagaattcattcattcttgatggacatttgactaatgtctagtctttgaaatgtgtcaaggtttgctttatgagcagatatggctaattatcttactaatctgccttgtgtaattgaaaactgtattctacagtgtctcatatatatgtaatatataattatatattatatatatcacttatataatayataattataatatattayatataatcatatataattataatatattatamtatataatattatatagtatatactatatgttatatagtaatatataatataataatatatattatatataccatatagtatatactgtatacagtatatactatatggtatatataatacatatacaatatatatacaatatatttatattatataatatataatatatacatatataatatgtaatatatatacacatatacagatacacacactcccgttagattcaaatctataatcttagtaaattttcccctactattattctaagagatatgttcaaatcacctactgaggattgattgattgatttgtttttatctctatcagtttttgctttgtatattttgaggctgtactatggtgtacaaacttagaatgatgtcttggtgcatggaactctgtcatttagagatgtcctctgtttttagtagtgctttcttttctgcttaatgtttcctttggatgatgagtatggttaaactaatttccttttgatgagtgcttgtgtagtataacttttccacccccttaattttaacttttcataattgttatggtttaagttgtctcttggaacctgttgtcaggtgacctcttgtgtttaactggaatatcttcttgctggattgatccttatataaaatgtcctttttctctatgaataacttttgtctgagatgattttgtctcatgttagtacagtactccagttcccctctgcttgctgtttgcatggtatatcttttcccatgcttttattttaaaagattgtgtctttgaatcaaaattgygtctcttgtagacaacgtattagttgggtcatttaaaaatccattctgctaaatgaatctctgttattgtcttcatttgtattagctgttttttaatgcaccacttaaattccctagtcatttcttttactgtgcttctgggaagtttgccttcatttttaaagagtatttttattgaatacagacttctatgtaggaagtttttctttttttctttttctttttgtttgtttgtttgtttgtttttgagacagagtcttgctctgtcacccaggctggagtgcagtggtgtgatcttggctcactgcaacctccgcctyccgggttcaagtgattctcatgcctcagcctaccaagtagctgggattacaggcacgcgccacaacacccggctaatttttgcaatttttagtagagacggcgtttcaccatgatggccaggctggtcttgaactcttggtctcaagtgatccacctgcttcagcctcccaaaatgctgagattacaggcatgagccactgcgcccggcctataggtaggaagcttttgatgtttattggagggctgaactatttttcaaaacaagatattatccaaattgagataaattcagatgattaaagacatccaacaaagatttgaaagtgaatcttagaaagagagacttgattccaaactctytaccatgagaaataatatcagatgtgtgactgcttcagatcttacttaggttgcctataaattcaaatcaggtcatttcactgaggccaaaagttttcattatgcaaaataaaggattgcttctatgacttgatcactgaggtttgccaggacaattatgtatcttgctaaaggtgatcttcttaagatgtacctgtcttgttcagatacagactgaatgtgtgggaaactgaagtgatcatagtgttctaaaatataggtttgtagttaccctgtagtgtaagtgtagctttttatttaccctgaagtatgtaacttcacaacgtgagaaagattcagttacctacaggcttcctggctggccttccaagccatccgatgatttccatggacttaaactagaagaaacttgactttgctctcatgtgcattagcttatgtcatagaaggtgcttggtaatattgtcaaatcatacctgggctgttcgtcagtgatcagaagttaatctgggtccccagcctctgacagtggtatttcaaaacaaactcgatgcaactaatcctagtttttagtgtaaaagcacttttctaactcwaaatttatttctttgtataaggtgatgtcttgaactaaacccaaagtttgttcgtygatccttggacattaagtggatatggagacttccgccccagggtataaatttttaatcaggatctttgtcgttctataaactgcaggtatgaaaatgaaagtcttcagartggaaggaagtcaactgaatttccaagaaaaatacgtgaacaggtgatagaaaatatccaagtttgggctgattcgtttcgatgatatgaaatcatttatgtatgctttaatgatttcttacttgaaatcagttacaaagagggtggttactgttatagtaggaaaatgtaactaaagtataaaaacgagttgaacttagacgtattaaaataatctaaaatgatatttcctctttattgttcaaaatcagagcactaagttggtcttacacttttagcmaaaaagtctattagagcatgttgcgagctttttgcaaacccatgattaggataaccccaacacgtagagctaacatttgggaattgcattatctggtggctcattttgtcgcccagtcattgtactcatccgtctttatgtgtctgaaataatcacattatgaaaatcatgagtgccaaagatgcttctctattttgatagatagacgacccatgaaacaggaaaagggatcctgtgctttgtcttgtgagagaatcctatagtttgagtgtatcagtgtggaacaggtattccaattgtacagcttatgaaaacataattgtcgacacgtgcttcgcaatttagatagtttgagtatatcagtgtggaagaggtattttagttgtacagcttattaaaacacagttgtcggcatgtgctyggaaatttagtgggatttaggcttargatgagccctgagaattcatatttttcctacattttagagtgctcctaaagctagtttcagatgagctccttggaatatcttggcttaggagagttatcttaggtgcacctgaaattagcagtaggtactcttgaatttcaacatttctgcctttttttttttttttttttctgagacggagtctcactccgtcacccaggctggagtgcagtggtgcgatcttggctcactgcaacctccgcctcctgggttcaagcaattctcctgcctcagcctcccgagtagctgggactacaggtgcacaccaccatgcctggctaatttttgtatttttagtagagacagggtttcaccatattgaccaggctggtcttgaactcctaacctcgtgatccacccacctgggcctcccaaagtgctgggattacaggcttgagccaccatgcccagtccatttctrccatttaagtactgccttcttccctagaggagcagccttaatgttgaatctgatggtcatcagttcccgtgctggaagccagtttctgaggcatcccacactgtagccaccaggcaacttgctagtctatgggagtaaataaaccaaaaagccagttgaactgtgggttagatatgtgccactcagcagtctaggaactgtttgttctgttactggtctgtgatatagtgagtactgaaatggagtatgtagtaaatatgacagcaattcgacagcaattttgtggctattgaatgtaatcgtacaacaaaagtgagattatatactttacatattcataattttattagtggttcatttatattgtktagtcataagattcttgttccacttcagattggaaataaaaaaccatccctcacatagatagttttagaagcaaggtgttacgtatcaagaaacctaaaattgattaaggaagttagattctttgcctttgttaatattttttagatattttcttaataatccagatgataagcttttcttcctttggsgcatcagacttttataaaagttatatatatatgttattctttagttcttccacccttccggaaataattccatatgaaggaaagttagggcgctgtctctggggagccaggtgggggcgctgcgcctgctcccaggctgtgaggttgcagaatctgtgaatataccatgtgtgcctgtaccatgaatttacctagggtgaatctaggctctcagatccaccctaagtatccaccagccaagagggygcacatgccaagtggagcctcagttcatcgacaggtcctatggcccatttrtgagaaaactgatgacgcagtcagtagttctgagctcgtggggggttacagatcttcagtataggtgatgtttaatattgactttggttcttccgcaataggatgttgggaaatatctttaaaggaagttataaaaacacaccgaggtttgattttagtaattttaagcctcgaatttgtttcctattaatcactcactattttttaatgagtcagctaataagtacttttatcctgaccactagctcccaactgacttgagctcatttctcaaacagtctttaaaagtcatatacgagtggtttggtaaagaaaacaattttttattgtttttatttttattttttgagacagagtctcgctttattgyccaggctagagtgcagtggtgcaatctctgctcactgcaacctctgcctcccgggttccagcaattctcctgcctcggccacctgagtagctgggactacaggcacctgccaccacatccagctaatgtttgtatttgcagtagagatgaggttacatcatgttggccaggctgttctcaaactcctgacctcaagtgatccgcccaccttggcctcccaaagtgctgggattacaggcatgagccatcatgcccagccagaaaacaataaataatattttcactgttgtgactgtcatcatttagaaagacctgcaaataactgttcttattttcccaacttacaggagccagcacgtcgtgtctcaagatctagcttctcttctgaccctggtgagtagtggttgggttttgttccagaatcctgaaagatcaggtctttgcgaagcatattggcaaagaaggggcaacaagaatgcaagtgctaaatgtctagcctgtcagaaatggaggaggtgtcatttaacatgtcaacgacagacagatgcctaactttcccttggtgactgatggtatgctatgcttaggagagactctagatatgagaaaattgcctgttcagctgtcaactcagttctcagtagttagatagcatgtgctatttcatactggttattggagctgatatgatttatatatttgtatcataatactagtatcataagacttgcaagttttaggcattaaataatttgtaggccaagtaaaagctagcttataagacaacctgaaacaattaaaatattgaattccacaaatgttaatcattgagaaaatgctgaacttctgtttcttatttcataattcattgccaagatgagaaagctcaagattccaaggcctattcaaaaatcactgaaggaaaagtttcaggaaatcctcaggtacatatcaagaatgtcaaagaagacagtaccgcagatgactcaaaagacagtgttgctcagggaacaactaatgttcattcctcagaacatgctggacgtaatggcagaaatgcagctgatcccatttctggggattttaaagaaatttccagcgttaaattagtgagccgttatggwgaattgaagtctgttcccactacacaatgtcttgacaatagcaaaaaaaatgaatctccctttwggaagctttatgagtcagtgaagaaagagttggatgtaaaatcacaaaaagaaaatgtcctacagtattgtagaaaatctggattacaaactgattacgcaacagagaaagaaagtgctgatggtttacagggggagacccaactgttggtctcgcgtaagtcaagaccaaaatctggtgggagcggccacgctgtggcagagcctgcttcacctgaacaagagcttgaccagaacaaggggaagggaagagacgtggagtctgttcagactcccagcaaggctgtgggcgccagctttcctctctatgagccggctaaaatgaagacccctgtacaatattcacagcaacaaaattctccacaaaaacataagaacaaagacctgtatactactggtagaagagaatctgtgaatctgggtaaaagtgaaggcttcaaggctggtgataaaactcttactcccaggaagctttcaactagaaatcgaacaccagctaaagttgaagatgcagctgactctgccactaagccagaaaatctctcttccaaaaccagaggaagtattcctacagatgtggaagttctgcctacggaaactgaaattcacaatgagccatttttaactctgtggctcactcaagttgagaggaagatccaaaaggattccctcagcaagcctgagaaattgggcactacagctggacagatgtgctctgggttacctggtcttagttcagttgatatcaacaactttggtgattccattagtaagtttatttaattgtaaatttatttttctaaaagatgaacaccttctatgtagctgtgagaccttcattctttcagtagtgattagctttgtggaagagaatgtaagcacataaggcacagggataagacagacacgcacgctgttttcgctaatagatgaatactgaaggcctaggtaattgtaacaaggaatgacagaagagatggaagttgtcaggcaatcatgaagcaggggttattgaaggagatagggtggccccaaaaatatttgattctcctccatctatcacaaaatagaaaagagaataatcataattgcttttcacatggagtttaattctgaactacaatcaactgtatcatatgagtttggtcatgtggaataaatcactggtaatcattaaacatagcggtagttctcaggtgttgatactctgttttcagagtgtcctacaaacaatttgctgtaaacactggactgtacccatgagtccatatgccacatgaacacttgatccttggtgcaatagcagtgcccgtggctaggttgtctttttagagctatgtcacacatgaggaaacgcacaacccaaggccagtcaggaagtggcagaggtaggacctttatagcaggtgtggtagctcctcgggagcttcctacactcctagggactggctattagaagaaaagttgtctgggccacagacgcagtattcgtactccaggctgtgtttctgcaggtggcctatagcggtggggcatgaggctgtcgataaaataaggtttgtaacatcagtctcagtattccaccaagcttcctagtggggaagcatcacttaggcaagggatttacattaactggtggctcaggaaaatgtgtggccgggactgggctcctgtgaattgactcagaaccacctggaggagtttttacagctcatgcattctggtcactgggtggctcaggctgagacccaagtgcatgtctttagagagttctctggctgtcgtccccctactctaaggtgaaatctgctgctgcagactcctcctttctatgtccacacataatgtttcaatgttttaaagaaagcctctgtactgtccagtggcaacttgacgtcttagtggccactcccgcaatcctttaggaactcttagtagcttagcttcaccaggattgcaagaatagaggcgtgctgtaggtactgtgtttcgatgacttttcacttggtttgtctttaatgctaacgtgaaataaatcactwgtcttggtatgttttttcattgctstttccacatttgtatycgttactttagatgagagtgasggaatacctttgaaaagaaggcgtgtgtcctttggtgggcacctaagacctgaactatttgatgaaaacttgcctcctaatacgcctctcaaaaggggagaagccccaaccaaaagaaagtctctggtaatgcacactccacctgtcctgaagaaaatcatcaaggtgagttgaacaagcagcatcccattcacgcccagtggctcacacaccgggtacctattcctttccaaatactgacacaagtagaattatgatgaagacctttatttatttattaaagaaacaagtttttaaaaagacgaatgaaagctcattgatgtgggcaccagcaaaggagcccctgggtccctgaccgtggtgctgatgcgaccgagtcgggggagtccttgatgttgtccttttcgtgcagaagttcccagacacccacgcttacagcactgcgtaatcacctgcaggcaccgtcagaatagccaattacaaagattctggatacattaccacgtcgacccataaggattgttttattttcttttagagttacaaggctatagttaaggcatttacctggtgtgaaggaaaatcaatggcacatcttccttttacaccttcagctctttagaatatttgcttgcctgttcctttgctgtgttgtccttcctgggtttcacacctctgggaagtcatggccctatagctcataacctttgtaatagggcctgggcggtctttctttccttctcttcccagcaggagtggaaagtgatgtctggctccctttccattttacactggctcccaggggcaagcagtcctccctccatgtggactgccgggggctgggtgctcacagctggtatttactgggactgagatcagaccctgcttgtctttcactgatcaggatgttccttccacctttttacctgaaatgacctcacttcagacttggcttgcttctctttccttttccttaaatgactgagacagtctcacctctaccatagtcttcaaagacagtggcttaagcatttgatgcttcaagatttaaacagctgaaattcttaactgaataggtttttatcagtcattccagagatgttagatccttgttaaggcttcttgtaaacaattttgtcttgtcaggaacagcctcaaccatcaggaaaacaagagtcaggttcagaaatccatgtggaagtgaaggcacmaagcttggttataagccctccagctcctagtcctaggaaaactccagttgccagtgatcaacgccgtaggtcctgcaaaacagcccctgcttccagcagcaaatctcagacagaggttcctaagagaggagggagaaagagtggcaacctgccttcaaagagagtgtctmtcagccgaagtcaacatgatattttacagatgatatgttccaaaagaagaagtggtgcttcggaagcaaatctgattggttagtctgacattagaatacatatattaaggtgaattttttcatgaatgctaatttttgaaaagtttcgtcttttccctttgacagttgcaaaatcatgggcagatgtagtaaaacttggtgcaaaacaaacacaaactaaagtcataaaacatggtcctcaaaggtcaatgaacaaaaggcaaagaagacctgctactccaaaggtaggggcctcactgaatggctgctttacacataccggtgtcatcgaagcttgcattcwgtgtggatttatgctttaatgtcctgtttacctccttcctgttttctacagaagcctgtgggcgaagttcacagtcaatttagtacaggccacgcaaactctccttgtaccataataatagggaaagctcatactgaaaaagtacatgtgcctgctcgaccctacagagtgctcaacaacttcatttccaaccaaaaaatggactttaaggaagatctttcaggtaaaaacgtagtcttagatcttataaatcttttgactctactgttttttactgtgttaatgtttgttttgctaactttgtttatctgctgtgaaagagattataaaataaacgactcaatcacccttctggggtcttagtgttcagggaagataaagctgttttggcttgcaaagacaagtctctgctaatttttgggatcacatgtcctgcatgaaatargtgtggaaatgtcaaatgcatgtctttaccctggagagcagcgtatacatagaaagctggaaggtgctttacagtgaagagagttaacttgttaatctgcaggtacaataatagtttatcccaggtgtgggccagttgttgttgagcaacattttgcttcttcaggattgactttctaggtagcttaactttcttgaaagaaagccctatgagaagattcccataaacgattgttgaagaaatatttccattcaattcccactctcagtaaattgtggcctgacttgtgtaatttaaagtggggatggccggcgcagtggctcacgcctgtaatcccaacactttgggaggctgaggcctcctatcattccaaacagaatgataatgatattagattttcaaaaatatatattattacttgacagtactaaaaatgggcagctctttgtcattttctaaaatgtgggtacgtgttatttgtacttaaaatctagaactgagcacccaagactttgagaagcatgaaggcatttggcctctagatcctagcagggaggcctatgggtctcaggagcccgtcaccagcctccgtgctccagagctcacgtgtggggtcttgttaggaggacccagaggtcagctaacttcatttgtttcctttccaagaaaagcaaagcgaagagcataacatatcttctctktgctctcttttttacaaaatgagtacattattaatggaatcactctttttatgaggcctatgtaccaggatttcaagggaggaatctactgttatttcccaccatttgcacgttacatgtgagggctgggatggttgtctgcatgttagcaatatgtcaatcacttttcaaatattttcatttaacaggaatagctgaaatgttcaagaccccagtgaaggagcaaccgcagttgacaagcacatgtcacatcgctatttcaaattcagagaatttgcttggaaaacagtttcaaggaactgattcaggagaagaacctctgctccccacctcagagagttttggttggtttccttgtttcctaacactgtgatgttttgggataggaacatacagtattatttttttacaagcagtatgatattacttctctaaaacaaatgttcctggcacaaaataccatttccgtcttctctgttctaattgaaagggagatttcaatcagcagttgaactaacattggcatycattgacttatatagaaagaaagactccgttaatgtgtgtaaatgacctgtgtacacttttggcttctttattgtaagtaaccagggtgacatagcaaaaaaatacaatggtgtctcaccatatttacatataaattactcatattcaaaattactgccaattacaaaacagaaagataacagtttgtatactgtgcaattattcctgctaaccttttaggtgggagcaggcccggggtaagtgtgagatgggagatgagaatctgtctaatctctcatttggcactggtcactgtattcctgtcacagagggaacagcttgctaccctgaagatgtttgcggtaggyaaatatttcctgtgtaatatggaccctaaccacataaggataatccatgttattttattggcgatttaaggcaagaaacagctgttygtttctaatgtttgaaggaaaaaatgcctatatttacgtcaatgacacagggcatggcaacctttggaggaaccttctgaagcagtatttttaccttctatgatcatttcagcatctaactttgcttaatgatgaccccrctatagcaccaaataacattattcttaattgtgcatggctcttataagacagatttatagacacataagtagcctcatgtcgttcagtgaatacgaagctaaatatttagttttttaccatattttatgaggctgtaatactygattgacatgaracactaatagaatgtttttattgtgtatgtttttatttcaggaggaaatgtgttcttcagtgcacagaatgcagcaaaacagccatctgataaatgctctgcaagccctcccttaagayggcagtgtattagagaaaatggaaacgtagcaaaaacgcccaggaacacctacaaaatgacttctstggagacaaaaacttcagatactgagacagagccttcaaaaacagtatccactgyaaacaggtcaggaaggtctacagagttcaggaatatacagaagctacctgtggaaagtaagagtgaagaaacaaatacagaaattgttgagtgcatcctaaaaagaggtcagaaggcaacactactacaacaaaggagagaaggagagatgaaggaaatagaaagaccttttgagacatataaggaaaatattgaattaaaagaaaacgatgaaaagatgaaagcaatgaagagatcaagaacttgggggcagaaatgtgcaccaatgtctgacctgacagacctcaagagcttgcctgatacagaactcatgaaagacacrgcacgtggccagaatctcctccaaacccaagatcatgccaaggcaccaaagagtgagaaaggcaaaatcactaaaatgccctgccagtcattacaaccagaaccaataaacaccccaacacacacaaaacaacagttgaaggcatccctggggaaagtaggtgtgaaagaagagctcctagcagtcrgcaagttcacacggacgtcaggggagaccacgcacacgcacagagagccagyaggagatggcaagagcatcagaacrtttaaggagtctccaaagcagatcctggacccagcagcccgtgtaactggaatgaagaagtggccaagaacgcctaaggaagaggcccagtcactagaagacctggctggcttcaaagagctcttccagacaccaggtccctctgaggaatcaatgactgatgagaaaactaccaaaatagcctgcaaatctccaccaccagaatcagtggacactccaacaagcacaragcaatggcctaagagaagtctcaggaaagcagatgtagaggaagaattcttagcactcaggaaactaacaccatcagcagggaaagccatgcttacgcccaaaccagcaggaggtgatgagaaagacattaaagcatttatgggaactccagtgcagaaactggacctggcaggaactttacctggcagcaaaagacagctacaractcctaaggaaaaggcccaggctctagaagacctggctgkctttaaagagctcttccagactcctggtcacaccgaggaattagtggctgctggtaaaaccaytaaaataccctgcgahtctccacagtcagacccagtggacaccccaacaagcacaaagcaacgacccaagagaagtatcaggaaagcagatgtagagggagaactcttagcgtgcaggaatctaatgccatcagcaggcaaagccatgcacacgcctaaaccrtcagtaggtgaagagaaagacatcatcatatttgtgggaactccagtgcagaaactggacctgacagagaacttaaccggcagcaagagacggccacaaactcctaaggaagaggcccaggctctggaagacctgactggctttaaagagctcttccagacccctggtcatactgaagaagcagtggctgctggcaaaactactaaaatgccctgcgaatcttctccaccagaatcagcagacaccccaacaagcacaagaaggcagcccaagacacctttggagaaaagggacgtacagaaggwgctctcagccctgaagaagctcacacagacatcaggggaaaccacacacacagataaagtaccaggaggtgaggataaaagcatcaacgcgtttagggaaactgcaaaacagaaactggacccagcagcaagtgtaactggtagcaagaggcacccaaaaactaaggaaaaggcccaacccctagaagacctggctggctkgaaagagctcttccagacaccagtatgcactgacaagcccacgactcacgagaaaactaccaaaatagmctgcagatcacaaccagacccagtggacacaccaacaagctccaagccacagtccaagagaagtctcaggaaagtggacgtagaagaagaattcttcgcactyaggawacgaacaccatcagcaggcaaagccatgcacacacccaaaccagcagtaagtggtgagaaaaacatctaygcatttatgggaactccartgcagaaactggacctgacagagaacttaactggcagcaagagacggctacaaactcctaaggaaaaggcccaggctctagaagacctggctggctttaaagagctcttccagacacgaggtcacactgaggaatcaatgactaacgataaaactgccaaagtagcctgcaaatcttcacaaccagaccyagacaaaaacccagcaagctccaagcgacggctcaagacatccctggggaaagtgggcgtgaaagaagagctcctagcagttggcaagctcacacagacatcaggagagactacacacacacacacagagccaacaggagatggtaagagcatgaaagcatttatggagtctccaaagcagatcttagactcagcagcaagtctaactggcagcaagaggcagctgagaactcctaagggaaagtctgaagtccctgaagacctggccggcttcatcgagctcttccagacaccaagtcacactaaggaatcaatgactaaygaaaaaactaccaaagtatcctacagagcttcacagccagacctagtggacaccccaacaagctccaagccacagcccaagagaagtctcaggaaagcagacactgaagaagaatttttagcatttaggaaacaaacgccatcagcaggcaaagccatgcacacacccaaaccagcagtaggtgaagagaaagacatcaacacgtttttgggaactccagtgcagaaastggaccagccaggaaatttacctggcagcaatagacggctacaaactcgtaaggaaaaggcccaggctctagaagaactgactggcttcagagagcttttccagacaccatgcactgataaccccacrrctgatgagaaaactaccaaaaaaatactctgcaaatctccgcwatcagacccagcggacaccccaacaaacacaaagcaacrgcycaagagaagcctcaagaaagcagacgtagaggaagaatttttagcattcaggaaactaacaccatcagcaggcaaagccatgcacacgcctaaagcagcagtaggtgaagagaaagacatcaacacatttgtggggactccagtggagaaactggacctgctaggaaatttacctggcagcaagagacggccacaaactcctaaagaaaaggccaaggctmtagaagatctggctggcttcaaagarctcttccagacaccaggtcacactgasgaatcaatgaccgatgacaaaatcacagaagtatcctgcaaatctccacaaccagacccagtcaaaaccccaacaagctccaagcaacgactcaagatatccttggggaaagtaggtgtgaaagaagaggtcctaccagtcggcaagctcacacagacgtcagggaagaccacacagacacacagagagacagcaggagatggaaagagcatcaaagcgtttaaggaatctgcaaagcagatgctggacccagcaaactatggaactgggatggagaggtggccragaacacctaaggaagaggcccartcactagaagacctggccggcttcaaagagctcttccagacaccagaccacactgaggaatcaacaactgatgacaaaactaccaaaayagcctgcaaatctccaccaccagaatcaatggacactccaacaagcacaaggaggcggcccaaaacacctttggggaaaagggatatagtggaagagctctcagccctgaagcagctcacacagaccacacacacagacaaagtaccaggagatgaggataaaggcatcaacgtgttcagggaaactgcaaaacagaaactggacccagcagcaagtgtaactggtagcaagaggcagccaagaactcctaagggaaaagcccaacccctagaagacttggctggcttgaaagagctcttccagacascartatgcactgacaagcccacgactcaygagaaaactaccaaaatagcctgcagatctccacaaccagacccagtgggtaccccaacaatcttcaagccacagtccaagagaagtctcaggaaagcagacgtagaggaagaatccttagcactcaggaaacgaacaccatcagtagggaaagctatggacacacccaaaccagcaggaggtgatgagaaagacatgaaagcatttatgggaactccagtgcagaaattggacctgccaggaaatttacctggcagcaaaagatggccacaaactcctaaggaaaaggcccaggctctagaagacctggctggcttcaaagagctcttccagacaccaggcactgacaagcccacgactgatgagaaaamtaccaaaatagcctgcaaatctccacaaccagacccagtggacaccccagcaagcacaaagcaacggcccaagagaarcctcaggaaagcagacgtagaggaagaatttttagcactcaggaaacgaacaccatcagcaggcaaagccatggacasmccaaaaccagcagtaagtgatgagaaaaatatcaacacatttgtggaaactccagtgcagaaactggacctgctaggaaatttacctggcagcaagagacagccacagactcctaaggaaaaggctgaggctctagaggacctggttggcttcaaagaactcttccagacaccaggtcacactgaggaatcaatgactgatgacaaaatcacagaagtatcctgtaaatctccacagccagagtcattcaaaacctcaagaagctccaagcaaaggctcaagatacccctggtgaaagtggacatgaaagaagagcccctagcagtcagcaagctcacacggacatcaggggagactacgcaaacacacacagagccaacaggagatagtaagagcatcaaagcrtttaaggagtctccaaagcagatcctggacccagcagcaagtgtaactggtagcaggaggcagctgagaactcgtaaggaaaaggcccgtgctctagaagacctggttgacttcaaagagctcttctcagcaccaggtcacactgaagagtcaatgactattgacaaaaacacaaaaattccctgcaaatctcccccaccagaactaacagacactgccacgagcacaaagagatgccccaagacacrtcycaggaaagaagtaaaagaggagctctcagcagttgagaggctcacgcaaacatcagggcaaagcacacacacacacaaagaaccagcaagcggtgatgagggcatcaaagtattgaagcaacrtgcaaagaagaaaccaaacccagtagaagaggaacccagcaggagaaggccaagagcayctaaggaaaaggcycaacccctggaagacctggccggcttcacagagctctctgaaacatcaggtcacactcaggaatcactgactgctggcaaagccactaaaataccctgcgaatctcccccactagaagtggtagacaccacagcaagcmcaaagaggcatctcaggacacgtgtgcagaaggtacaagtaaaagaagagccttcagcagtcaagttcacacaaacatcaggggaaaccacggatgcagacaaagaaccagcaggtgaagrtaaaggcatcaaagcattgaaggaatctgcaaaacagacaccggctccagcagcaagtgtaactggcagcaggagacrgccaagagcacccagggaaartgcycaagycatagaagacctagctggcttcaaagacccagcagcaggtcacactgaagaatcaatgactgatgacaaaaccactaaaataccctgcaaatcatcaccagaactagaagacacygcaacaagctcaaagagacggcccaggacacrtgcccagaaagtagaagtgaaggaggagctgttagcagttggcaagctcacacaaacctcaggggagascacgcacaccgacaaagagccggtaggtgagggcaaaggcacgaaagcatttaagcaacctgcaaagcggaasstggacgcagaagatgtaattggcagcaggagacrgccaagagcacctaaggaaaaggcccaacccctggaagayctggccagcttccaagagctctctmaaacaccaggccacactgaggaactggcaaatggtgctgctgatagctttacaagcgctccaaagcaaacacctgacagtggaaaacctctaaaaatatccagaagagttcttcgggcccctaaagtagaacccgtgggagacgtggtaagcaccagagaccctgtaaaatcacaaagcaaaagcaacacttccctgcccccactgcccttcaagaggggaggtggcaaagatggaagcgtcacgggaaccaagaggctgcgctgcatgccagcaccagaggaaattgtggaggagctgccagccagcaagaagcagagggttgctcccagggcaagaggcaaatcatccgaacccgtggtcatcatgaagagaagtttgaggacttctgcaaaaagaattgaacctgcggaagagctgaacagcaacgacatgaaaaccaacaaagaggaacacaaattacaagactcrgtccctgaaaataaggtgagaggaagtattacagcatcacycaatatcgtcttggatagttgtgaatttctgtgttatactttgcatgtaacctgacgttataagtggttatcctttccccagagggtttcctttaacactgaataactgcaggccatggtaaagaatcttcttgggacctatagagggaatagactaatatgggaaaagaactagtcaaacatgattaatgcaaacttagaagagtttctcaaaagccaaatgagtaatgttcatcttcaaatgtttaaaaaattgatcagaggataggtgggtggttcagttctatgttctggatactgtcaccaagaccaggactgggttaaaaatcctatctatgtcacyattttaactatcagaacaatatcaataaggaatgtgtatycttgagaaggggaaactgtctggactgttagatagagaggctcccactgyatgcagagaagtttggggaaactccagaaatggcaatttcctgttctgccttagcagtgatggttaaaggaataggaattcatttactccctgtaaatgaatgaataacggaccttctttctataatgtaaactgtaaaaattasatttgatatatatcttattaggcattgttattgaaatttatcctgaattccttatttataatttgtcagcagagacagtcatttctccataggagcaaagtaccaaggcattaccttgactatcctagatgacaagtctcttagacaattcatcagtgtgtgattttcaaatgatttctccttttaggttactgttgattgtgctccctgttgaattttgaagtttgttttactaattattggaattttgtggatgtcttctcatttctttagggaatatccctgcgctccagacgccaarataagactgaggcagracagcaaataactgaggtcwttgtattagcagaaagaatagaaataaacagaaatgaaaagaagcccatgaagacctccccagagatggacattcagaatccagatgatggagcccggaaacccatacctagagacaaagtcastgagaacaaaaggtgcttgaggtctgctagacagaatgagagctcccagcctaaggtggcagaggagagcggagggcagaagagtgcgaaggttctcatgcagaatcagaaagggaaaggagaagcaggaaattcagactccatgtgcytgagatcaagaaagacaaaaagccagcctgcagcaagcactttggagagcraatctgtgcagagagtaacgcggagtgtcaagagrtgtgcagaaaatccaaagarggtaagccatttactgtttccctgttttaaaagacacagaatgttttgatgtattttttgcccaaggttgcaaaggcaaacaaaaagcattatcttcaacagcactctgccagctcccagttacattaatggaaggagcattatgctaagacataaatttggtcattttagttatattttgttgtgtctactttgggaatttcacttcaaatagcaaattcacgttatgaagactttcttcagaaagaaaaggaatttgtctagtggctaatttctgactgcttatgatgtacctcatgatacaattgtaggtagatgtcttcagcctttctgtagttcaaaatcacctcttgaaacaggaaaattctttttccaaaaaaaactattgaaacagaaaaatttccaaggcattctttggaaaggcagaaggaacagaagttgggatgtccctgagacacatgctcactatgtgagagttcctggtcagtgggggatgcgtctgccctccaaccctcctccagccagagactatctaagctaatgaactttaagtgctactgaaatcacatcaagttgagccactcataattacaagcatgtggacaaatccataagaatgattagattccattrgtgttcttctggggaatacttggtttagctaaaataaaaataggttgaattgctccctttttgtgagcaattcacaaaaatataatataaatttaattcttagcacacacaaaatttggacctaaaactaccatattctgagttcagcaaacgaaactcatgtagcaataacctcttcagatacagaattctggcaagtacagctgtccagacagaccctcttcggcacaaactaggaagcttcaactgccaagaaaaggaaagattcccaggtgtccccagtacctgctgcatagccaggcagccagtggagggggagggmttgtgtgtctggatggtgggcaggaagtcctagtggggagatgcccatagactgttccagagagggaagaggagaggctcaagaagggcactgatgcccacacaggtgtcctaagtcagagactgtacttctggggcaggctggaagcagaagacacccgacagtgccagacaaggtcctagaaaccacaggcacaccagggacgcaacagctgacgtgggtcagcacgttcacccgtcgagtcttacaataaaacgcaggctccaggcgcttaccgaattcacagtctggaaggtgctgcttcctcagaatgaaaccaaagaagggtgaaagcgaatcttttaactaggatgattcctaaacacagagcaaccaggcccaaggctgagccaggcctggtgtgttctgccgggggcgttccagcctcttctcacacacaagcacccaggagacgcccaacacacacatgctcctctttgccgagctcttcggtgggtgtyggtagtcctagaaaatgcatatataagatasattttttccagtaagaagcttgtagccatgcttttcaccatggttcctctcccttagccaaggggtgagaactactgcaagagtaaaggccaaggcaggtcycctgcatgcaagttgggcatgcttctgtctacaggggttcctyggtttaggagacccaaaagacttaatcctggttggattcactttttctgagtgacattttttagtttgtgaaaatgtgtgcatcgatgaagaaattttatyatgaattagcttaaaaatgcattaggaacttctgtatgaaaagatcacattayttaagtgtaaaaaaactgcataataaaagcagttcaagtcaagaaaaacaatgttaatggaatatattttaaaacttatttccaacctcaaaattaattttctgcaactaaggacctgcataatacctagtaagcctttggggttttgcagakkaggtcgattctaaaaatgrgtgtttaaattacttaagagttctattttttttcttcccacacaggctgaggacaatgtgtgtgtcaagaaaataasaaccagaagtcatagggacagtgaagatatttgacagaaaaatcgaactgggaaaaatataataaagttagttttgtgataagttctagtgcagtttttgtcataaattacaagtgaattctgtaagtaaggctgtcagtctgcttaagggaagaaaactttggatttgctggstctgaatcggcttcataaactccactgggagcactgctgggctcctggactgagaatagttgaacaccgggggctttgtgaaggagtctgggccaaggtttgccctcagctttgcagaatgaagccttgaggtctgtcaccacccacagccaccctacagcagccttaactgtgacacttgccacactgtgtcgtcrtttgtttgcctatgtyctccagggcacggtggcaggaacaactatcctcgtctgtcccaacactgagcaggcactcggtaaacacgaatgaatggatragcgcacggatgaatggagcttacaagatctgtctttccaatggccgggggcatttggtccccaaattaaggctattggacatctgcacaggacagtcctatttttgatgtcctttcctttctgaaaataaagttttgtgctttggagaatgactygtgagcacatctttagggaccaagagtgactttctgtaaggagtgactcgtggcttgccttggtctcttgggaatacttttctaactagggttgctctcacctgagacattctccacccgcggaatctcagggtcccaggctgtgggccatcacgacctcaaactggctcctaatctccagctttcctgtcattgaaagcttcggaagtttactggctctgctcccgcctgttttctttctgactctatctggcagcccgatgccacccagtacaggaagtgacaccagtactctgtaaagcatcatcatccttggagagactgagcactcagcaccttcagccacgatttcaggatcgcttccttgtgagccgctgcctccgaaatctcctttgaagcccagacatctttctccagcttcagacttgtagatataactcgttcatcttcatttactttccactttgccccctgtcctctctgtgttccccaaatcagagaatagcccgccatcccccagrtcacctgtctggattcctccccattcacccaccttgccaggtgcaggtgaggatggtgcaccagacagggtagctgtcccccaaaatgtgccctgtgcgggcagtgcccygtctccacgtttgtttccccagtgtctggcggggagccaggtgacatcataaatacttgctgaatgaatgcagaaatcagcggtactgacttgtactatattggctgccatgatagggttctcacagcgtcatccatgatcgtaagggagaatgacattctgcttgagggagggaatagaaaggggcagggaggggacatctgagggcttcacagggctgcaaagggtacagggattgcaccagggcagaacaggggagggtgttcaaggaagagtggctcttagcagaggcactttggaaggtgtgaggcataaatgcttccttctacgtaggccaacctcaaaactttcagtaggaatgttgctatgatcaagttgttctaacactttagacttagtagtaattatgaacctcacatagaaaaatttcatccagccatatgcctgtggagtggaatattctgtttagtagaaaaatcctttagagttcagctctaaccagaaatcttgctgaagtatgtcagcaccttttctcaccctggtaagtacagtatttcaagagcacgctaagggtggttttcattttacagggctgttgatgatgggttaaaaatgttcatttaagggctacccccgtgtttaatagatgaacaccacttctacacaaccctccttggtactgggggagggagagatctgacaaatactgcccattcccctaggctgactggatttgagaacaaatacccacccatttccaccatggtatggtaacttctstgagcttcagtttccaagtgaatttccatgtaataggacattcccattaaatacaagctgtttttactttttcgcctcccagggcctgtgsgatctggtcccccagcctctcttgggctttcttacactaactctgtacctaccatctcctgcctcccttaggcaggcacctccaaccaccacacactccctgctgttttccctgcctggaactttcccwccwgccccaccaagatcatttcatccagtcctgagctcagcttaagggaggcttcttgcctgtgggttccctcacccccatgcctgtcctccaggctggggcaggttcttagtttgcctggaattgttctgtacctctttgtagcacgtagtgttgtggaaactaagccactaattgagtttctggctcccctcctggggttgtaagttttgttcattcatgagggccgactgyatttcctggttactstatcccagtgaccagccacaggagatgtccaataaagtatgtgatgaaatggtcttaaaacccatggtatttttattatagggagagtggggaaagaaactaagtgtgggtggggcagacaggccagtgtaagagagactggttcattacgttccattttcatttctacaaggacttggctggatggtcattttctctcttggccaataagtcatcgcagctgcttttagtcctgcaggaatggcctgctgtatctcgagaactacctgcaaccgcagctgtgcctgctttgttgcaacagaggtgctgagttgagggatggggatttgacccagggctgccccaagtcagcagatgaaaatacatgccctgactttcctctggcaaccctgatttgacatggatcccgggagtgaatttgctggcaagttccaggggcagtagcctgcggtaggtcagttagtcctgaagaagaggcctttctgtcggagagaaaagtttgcaggtgggtgcatctaccatcttgagaggctgaggagggagggagagccgtgctcggtggtcagtctggtgaaggaagtgggttcagtctgcagcccacatcctgggctgtcatcaagaattaacatggcaaacggcgactccataaagtaaactgtagctacttaactaaatgatttcgtgtggctgagatcctactgtttgctgggtttcctggaaaagtcctctagatgaactgcaggaatctcctggcactctggttacagctggagaaactgatttctgtgctgtccaggtgctcccagacccccaaggcatctccaggacacagtcaccaaacccccatcctggtattmctggcatygagtgccacgtaggcacacagcactccataatttggaaatgtggatttcattgctattgctcttcatgagggaacaaataatatccatgatgtattggcaggaagccacgccccccctcccccgctgccacccccacagcgcgcacagtgatttcaggaaggaggtttgattggtttgttgtgtgttgccctgcaagggccccaatcagcttcctgctcatcagccccatctcaggcaagtcccacatctgtgatgtcaagccctgagccgggtaattggacttggatacctgcttgactcatctttccagtgaggttcctaaggagcatccccaaccccacctcccagggggagctctcgatgtcacctgaagaacaaacaaacaaaaactgtgttgatggtacagtcccagggctccgtgactggacaggctccctgcgtgatacacctgtgtatgtcactacagaaatacagctggtgcaggcctgtccgcctctctcacaggtcagagtgttctaaaatccatcctggcccttgttgtctgtctgcttggggttagggcaggtgctcctttatcatttgtaaagtttatgtgatgtctggtatgtgttccacacccttgcagagtgtaaattcctagagagagttcagacttcggagtcaaatgcacaggtgcaaattccagcttgtctaatttgctgctgtgtgaacgtggacagtctttcaactttgctagtttcccatctgtaaaatgaggctgttcagtacctgagcacatagcattgttgagaagattaaatgagacaatatgtgtaaaacacttagcattttacccagagcttggtaagcatcaatacatgctaattatcatcatcatcagaagatgaatatatttattagatgcctaaaactccaagatatttcccttggctcataaattctttatcactagggatttctctatggaagtgaaggaagaatctggaacgtaacaggcctgaataaccaggggcagtggctcacacctgtaatcccagcacattgggaggccaaggctggaggatcgcttgaggccaggagttcaagatcagcctgggcaacatagcgagaccccatctctacaaaaaaaaaaaaaaagaaaaaagaaaagaaaaaattagcgggcattgtggcacatacctgtagtcccagctacttgggaggctgatgtgggaggactgcttgagctcaggagttcaaggctgcagtgagctatgattgtatcactgcactccagcttggtcaacagagcaagaccctgtctcaaaaaagaaaaataaaaatcctgaataatatgtctatgtcttcatcgagcccacgtattgaaaactacccaaaccaccaacaatgcaaagaaacattatttaactaagagtcgagtaaccaaatttcagggttatccaaactgaatatggcctctgcaggagaaaagaatatgtgtgatgtggcagccacaatctgataccatattaacactgtcttttatttttttttttttgagacggtctcactctgttgcacaggttggagtgtagtggcacaatcttggctcactgcaacctctgccttcaaggttcaagagattctcctgcctcagcctctgaggagctgggattacaggcatgcaccacacatacctggctaatatttgtaattttttttttaggagagacagggtttcaccatgttggccaggctggtctcaaactccagacctcaggtgatccagccaccttggcctcccaaagtgttgagattacaggcgtgagccaccatgcccagtcaacagtgtctttaaatgacatcagatcgcagaactttgctgagcttggcccagacacaggtctggctaaaacaggtggtgctgggaccaggcatggccaggacatagggaagcacatccctgcatagaaaaggttctgtggattttaatccaggtcagcaattagcaaactttttctgtcaaggaccaggcagtaaatatggcggcttcgtgggccatactgtctgttatgctgactcacctctgctgttaaagaacagaagcggctgtaggcaacacgcaagcaaacaggcatgtccaaaaaatggctaataaaaacaggctgtggggctgggcacggtggctcacgcctgtaatcccagcactttgggaggctgaggcgggtggatcacttgaggccaggagttcgagaccagcctggtcaacatggcgaaacccagtttctactaaaaatacaaaaattagccaggtgtggtggtgggcccctgaaatcccagctactcagaagactgaggcaggagaattgcttgaaccagggaggcggagggtgcagtcagctgagatccagcccactgtactccagcctgggtgacagagtgagattccatcttaagcaaaacaaaacaaaacaaaacaagcaagaaaacaacaacaacaacaaaaaccaggctgtgggcccattttgactgaggaccttggtttgcatatccctgatctagagaaatgagtgatttaacatatatgcctcctaggacatatcacattgaaattagcagcccttgcaatataacgggtcatgagcagagggtgcatttcactttgggctttggggtcttcccgggccctggaacccccaccggctcccagccccaggacgttggaagctgagaggcctggcttccaatcccagccctgtcccttgctcgctgcatgacttgggcccattgcttggcctttctgagcctcagtttccctagctgggagagtgaagatggcaatttcttgcctcgtagggttgtgaggacaaaagaagaaaactcgggtggattgtgtagcctggcccccattctcagaaggtctccaagcggtgccgtcttcctcttatcccagcgtggcctcagccttcgagaggcctagaactctgggaaaggagcagtcaggactggacacgactccaggcttttcttatttcttgtgtggggtctggaaaaggagaagtgcaattatatccaaggcccctcttgggcaggggtctcagatccaggccaggctgatatgagcaaggggaggcgggtcaggccaggcagcactgtcaattttgatgttgggagggaggaggggcatgactgtgtatcagcaaattcctaaatttccaccctggctcgggagatgcagcttgtgctgaagtgagtcacttattcctgggcccctcatctgcctgcttgcttccatgtcccctagagccaaaaacaactataggagcaacttaggggaaaagttacctatatttatatataagcgtatgtatttatatataaatatgataactatagatataatctaatatattgtgtataatataaattaaatatatttaatgtaatgtatataacttaagtatattatatattcataactatataaaatatataaatatactaaatattattcactaggttttcatcattggcaacctaagttctatataaatatataaatattatctatgaaaatttatacacaaatatgtatataaaatgttataaatatatacatacatatttaagtaaaaataatatatacataaaatatattatatgtttatatagatttaggttggcaatgataaaaacttaatgaagaatttttagtgtaataaaaactagtctcgtggtagctctttgtgtttcagaatccagctatttggctctgggcccgccctctgttactccgagaaagcactgctttggaggtaacacaacgctaggtggcccctgaggctccctgagcaccgtccgatacccctctcagaagcacctctgccccctcctctgtacagcccgctttgctcgcctgcctcttcctttggattccaggttggtcggggaagcaatgggccatgtgtgtgcaccgtctgtgcctgccttcacccacacgagcctgttggaagacgacagccatacggaagaccgctgagctaccccggccccccagcccaggctagttggggttacccaactaccagccaatccccagacgtgaatgtgaataagcccagccagcatcacagagctgcctcgtcaatgtctagctgaccccagatgccacctaaacaatttgggtttctcacggcagttctcttcccaacctctgttcccctgggttcctaagaactaagggttgtgcccaccaatcaaagcaagagggaaacgggccttggattttaaggcgttgcactgctgtgacttgaaaagggatatggtttaaaatcattcatttaggccgggcatggtggctcacgcctgtaatcccagcactttgggaggccgaggcaggtggatcatgaggtcaagagatcgagaccatcctggccaacatggtgaaaccctgtctctactaaaaatacgaaaattagctgggtgtggtggctggtgcctgtagtcccggctactcaggaggctgaggcaggagaatcgcttgaacccgggaggcggaggttgcagtgagccgagatcgtgccattgcactccagcctggcgactgagcgagactccatctcaataaataaataaacaaacaaataagtaaatgattaaaaatcagtcacttaaagacgtattctaagatgagaccctcttgctctataaaactgaaggtcgtgtccactaagaagagtggatctgacctcagccctgcactgtgacgccacattccattagggcagaggaacagcatctggcaagagaggtcgtcccagaattctaaagaggcaggatggccctagtattcaaacttggaccacacagatctgcacgtctctcatcccagaaaggagaacccaaagtatgtgtctcggttcatgattctgaggatgagggaattatggaaggcaccaagtccattcataaaacacaccaccccctccctgtcccggttaatgacagtgggtggtggcttgagcatcaaagtggcccatgatgtcttggttttgctatctggttatgccatctggctttcttggtcttcgtccattcatttccctggagtcctggccatgctttgcttcttactaaccttatgcagaagccaaggcaagcgaggacgaggcatacttggagtattcccactggagtaacttctgcaactagaagct

SEQ ID NO: 6887 - DNA, 290367 bp, Homo sapiens
  misc_feature (1)...(290367): n = A,T,C or G, or insertion/deletion polymorphism (see Tables 1-2)
gaacccattttaaagttttgttaaaattcatgcttgtcacagtctgatttctttcagattttgtccatcttccaaattcaaaatataattccataataatattcatggctaagtgtatttctttttagaagtaggagaatagagaagctgtcttccagaatttttttttattataattttggctgtctctggcccacgctatttgtctccctttaaaaaaaaaaatttttttttaagtccacattcccctggcccaagtttcaatttttctaatctgcccagaccagaataactaaagcaacaacaacaaatgaggagcaataatatgtattctttatttacatggcaaccttcttttacagattctaaactttagactagggagtgagaaccttcccttctaaatatttgtgggctggatctaggttccttggttaaaggcttttaatatggatggaaatacttggcataactatcaaggttatagttttctaaggactgcttgttatttttctttgttatataaccctatctcatctctgcccctctcaataggccttccagactagcggactatcagagattagaaagctctgctggttaacagaacacattgttttgagtgctgcaggccgccctgggcttcttagatctccgactcttaacacagagaaagcagtacttttatttcagtgaaggttagcttcataacagacttttaatcttggaagattcgtgctgaaaactggattaggaaatcccacgtccctgtacctcttgcctttgtttgggaaccttggagaacaacggctgcatctagcagcaaaccagtctctcttcccttctctgtgtcactagcatcatttctgcctactccccaatagactccagccaaggggacttcccacacccaacttgtacatttttacccacctccaggccatacaagcctttacagagcacctactgtttgcagagggagcactgtgtttcactctccaagctttgcttaactgtacccctctccaagagctccataaatctgggctctctggtgagcacagctccagcactgcctcaggcagttgtcacttcagctttttaactgtgacccacagggaggaatacatttgacaacacaacaaccctgcacacacataaatacaataaatacatacaactcataaatacagtgaactgaaacaaaagatttcatgaaaacaatacttccttttttttggagccagggtctcgctatgttgcccaggctggtttctaactcccggtctctcgccttggcctcagtagctaaggctacaggcgtgagccaccatacctgggttcaatgctttttcttactatgtaggatgtactttcgtgtttttacttctacttctgttttatcaaaaagtaataataataaagctggtctttatccacaaaattgattccaggacccacagtttgaaaagctctgtgtaaggaacccagaatatttagaaggcatagaagctaattagggattctaaaagatgaaactatattttcactaggaggtgacttaagggagaatgttcacaagtattatcaaggaagtgaggattgccccaaataaggtatttgcaacaaaagctatgtttgaacaaatcctctgactttctaagaattcattcattcattaaagcaaacacacacacacacataatttttttggagcatcaagtttaatctagacttcaaacttgcaaaaatgggtaagacctttgccctcccccaactcacaggttaatgaaggacacagagaagtgacctggtgattacagtccaacatttgatggctatgactgcaacttaattgggtgctgtgggagcagaagggggtccttagttcagaaagaagcaggcaggcttcttgaagttggtgactcctggaggaggctggaaaggaggtgacaccttctctctagaccaagcaagtgtgttcagagagcatggaacctcttgaatatgcagggcattgggcacaagtggtccctatggttggagtgaagggtgcagatgaggccatagccagagatgggccacggagcttgcgtatttctcctggaacatccagggaatccattgagagagtttaagaaggcctgcagggtcatcaggtttctgtttttgaaagatcactgaagatatggtgtgggggatgctggctcagaagccaggctggagcagggatcaggaggctggcgtcaaaagccagaggggaaatagtagaagggcctggactgaggcaatagtggtgggagtgggaaagaaggaggcctctgggaggcatcagggacgctgtatgaaaccaattgaagctggtgaggtgtaaagggtgtggcagagggtcttctctcagatgatgcccgggtttctagcaggcacgactatggtggagctggtgccatccactcagatgggtaatacagggaaaacaaagtgtggggaagagttcaattatggccacacattactgtgcttggagtgtctgtggtgatccagcagccactggatctggagcttggggagggcctggcttggtgttaagaagtcaagggttcagctgggcacagtggctcatgcctataatcccagcacttggggaggccaaggcgggcggattacttgaggccaggagttcgagaccagcctggctaacatggtgaaatcctgtctcgaaaaaaaaaaaaaaaaaaaaaagaataaatcaagggttggatgaagccacaaagaaaagttacaaagtaggatcagtaagtgcgcttaatttggggcaatgaccaatttgtggaagatgacttttttcagatgtctctaggtagtgtggggtcagcatcgaagtcctcatcctcacatccttcctgtctaccccagctgtaaatgtgtcagagctcccatagatggcaggcggaatgaggcgtcttaggcatatttattcaccacagtctctaattatggagcccatgggggatgacaatgacatggggagtaggcagagggcagactgggcaagggtgactctggattgaatcgctaacaaaggctaagaggccggttctgaaatgtttgctggtaaagggtctcaaattcctgatagatcccctatattcttttccacactggagtgtcgctgctactgctgtgaccacaaatcgagttgagagggctgtttccttactgcattttcaatcctcccagcttcccttcacagcacttgacaatgtgtgagtccacaggtcagcttgtcgtggagggcatgagatggagtaggggataggggaggctgaagtccaacttttcttttcttttctttttttttttttttttgagaaggagtctcactctgtcgcccaggctcgagtgcagtggcgcgatctctgctcactgcaagctccaccttccgggttcacgccattctcttgcctcagcctcccgagtagctgggacttcaggcgcccgccacctcgaccggctaattttttgtatttttagtagagacagggtttcaccatgttagccaggatggtctcgatctcctgacctcgtgatccacccgcctcagcctcccaaagtgctgggattacagacgtgagccaccgcgcccggccctgaagtccaatttttattctagcatcttaggagcaatggagctcacagttatggactgaattgtgcaccctccccgctcccccaatcccaattcatatgttgaggtcctaaccctcactacttaaaaatgtgatgtaggtgacacacatcttggtgacagagcaagactctgtctcagaaaaaaaaaaggcatgcaattggagacagggtctttaaaggggtgattaagttaaaatgaagtcatatagtgtctttaggagaaaagattaagacacagacacagagggaaggccttgtgaagacgccacaaaaagccatttacaagcctaggagactggcctcagaagaaaccaaccctgaccacatcttgatctccagaacagtcttccagactccaagactgtgagaaaatcaatttctgttgcttaggccacccaatctgtggtcttttagagcaaacaaaaacactcgcttttcttttttgtctgatggtgcatattcaggaggaaacataaagtagtctaacactcagaggagcacaactacctctacctactgaaacagacaagtaacatacttaacaggttgaaatttatctacttatctactgttctgccgtttaccaagcacttttacaagccctaactctcaatcttcgcggctgcctcagcatcacctgggaatctgttcgaagtgcaaattctcgggccccacagaagtcttacagaatcagacactggagggggcacgaagaggggcagtcatggtgttttcacaaacgttggaggactctggtgtagctaaagtgcgagaaccaccgaggcagggttcggtccaggtggaggggattggggggtcccgcgactttttcacaggtgcgcgtggccagcaaggacggtctcctttgcaactggcccacagcgttggcacaggtcgccagattttatttatccctggaaggtctggagactcaaaggggcctctcagggctccagggtaagcggctgcctccgggcagcagagccggtgagagccagggagccctgagccgctgggcgcgtgcgcgtgggcgcgtccctgggccgggcgcgcgccgagggggtgggtggcgccggccccgccggcctggcgcgcggtccgagccactcagagcgcctggcggccgacacccgggggccctacaattaataccgggcgcctgcccgctggccgggactcgcgcgccggctctcggggacggaggcgcccggtccgccctgacgagctcgccactggctctgctccggcggcgacggcgacagtggccctggccgactttcccggggcccacacctcctcgagagccagcttgggcaggggacggtgccgcaccaccaaggccccgcgctagtgtgcacccccggcccgggcccggcaggtgggcgaggagggcgggcgcagtcgggctctgcaggagcgcgcggaggtgagacgggggggaaggtggggacgcgagtgtgggcgcgtgagtgtgggcgcacccccgggaaggtctcggagatgtcctctctcccttcttcctggtcccctccagagtttcgctcaggtcctcaggggacagcctgagaggccaacctgctggaagagttcactcgggcgacagagcgagttggacagccacacccccggccgggagagcgatagggcggccctggcctccagcccctgggatcctaaagccccgcatctccggggctgcagcgggggctagcccaagcatcttcccagccctgggaccgggggggcgtgactgccaccaccctgagagctactgagacacaggacacaaacttagtttccaaacaaagtaaaatctgcctttccggtgttttaagataggacgtgcttatgccgattcatcgcggtttccttgggccacctccgaggacgcggctggacccgctggccgtggagggggtcggctccgggcgcgagttcgtgtcctggggcgtggggacagctctggtgcttcccccgagagtcgtcccagcgtggtccccgcgcactggcccctgttttgggaaggggtgcccgcgttgagagaggcaggggtgcttgtgcttggcccccctctgtgtccccaccctctccgcccgatccttgcccagtccgagggtgctcccgcctggtggcccagcagagggcgccagctcccggccgmcgcgcgggtcgcaaggggtggggacgcgcgagcctccaggtaaggagcgaagtgaatcatcccgagcggggacccgctccccgcgcggtgggaacgaggcggggcgtggccgcggcgctgctgagaagtcggggccgccgagccgctgtcggcrggaagcggcgatcctgccaccgggaggtgtggaagagccgggtaggtgagcaaagtccctccgcgcggtggccgaggggcgcgcggagccggggccggcagacgccaggacgcgccgctgcgctctgctccggggcgggargcgcgggtcagtctcgctctggctgcgggaggccctgccggggaccgaagcgggaacgggggcgcctcccgggggtggaggccggcgggtgcccgggccgctgcgacggggcgctgcgctcggcccgcggggtccccgagccgtaacaaaggcgcggcgcggccgcggctcccacccacttccgtccccggagcgcgcctcggggaggagcgggccggggcagggtttctctccgcggagtttcgggaagttagcgcggctgcccgttacgctgagagcatggcggggaggcgggtggcccggggagtggcgcgccagtgatcagaactacgacatcgcccggttcctttcccgacaccagccgcaagtggccggagctgcggtggctcccgcgccccagcccggggtcccagaccggcgcctccgcagggcccgcgcgggtttgaacccgatgcgtggtgcgccaggccaccccagctgcccacgtttctgcgcgcgtgcgggctccccgaagggagtggtttagtccccgggtgacagccagcagtccctggcaccccgagtggagctccagaaggcggtaattgcattacagtgagtgagcggcggggaggctccagtccaggccgcaatctgggtcaggtgcgggattaagagcttcaggcgttggcatgagagatcttgtgaagtctgacagtttattgcaatgagaagttcctcacaaggggagaggccagctggggaaattaaaggagctcctgtccgccatccccagccccatcccgaggttgtgataacttgtgcctgtgcaaaccctagcacaggcacgcgttttgtcatagaaatgtcagaggcagcatctctactgcgccagatgtttctcagcatctgaacaggagaggaggaggtggtattgaagagaaacccaggacgttctgcttgctgtgaaccctagcccctcgcagtcaatcgatggaattcacgttttcgtgtcttgtcttatctgcctccacccccttcttctgttggaaggaaagggcaggcactggtttttatgaagggctaatggaccagggactctcccctacacaatgtggaaggctcttcattttctctttaaaccttacaacctcttcccaggaggttatttctgtttcacagatgaggaaactgaggcttaaagaggttaacagatccaagagtctgccctgttccaaagaggactgtttattcttccaggttatttttttatttttgacaaagtcggttactgaagagcgctttatggactgctgggtgtgtgctgtaccccggggttcaggtttgattatgctaggctatagggcttgatggactttccacctatctctggcttgtgttaatgccagtgccatagctaaaccaactcatatttaaaacttaatgtatatgaagagaactaaggtttcctccccaaacctttagaattatgacagttccaaagagaggtggaaatagctgtcctttgctttttgcagtgtttcatcaggcaggtgggcctggagtcaggaattctacacagcacggagctctgtttgccttttcttttgcaaggagctgcagttcccaccttgtttaagctgtgtgtgactttgccactgtgctgaatgtgcgtttaaaattgagtgaagtatgctttggaaataatggcccaccttactgactgataagttaaaacctcagaatttctttgagggatccaaggatatggttgtatccacaacttttatacaacatttgagctcaagtttacaaaataggactttggcattgtcctgaatgtacttaaaatgtattgccttcaagaaagatgtttgcaactctggcgtgacagtcagggacttggaacgtcctaggtagaggcagccaggcacgctgatgagggcaagcctggaaagtctgggaagaatggctgggttcggttgctgccttcaccatttagaggtctgcagccttggacaatttgcctagcctctgagcttcactttcttctyttaaaacataaatcaaaggccaggtgccgtgcctcacacatgtagtaccaaggctttgggaggccgaggtgggaggatggcttggggccaggagtttgagaccagcctggrcaacatagtgagaccctgtttctacaaaatatttaaaaattacctgtrgtcttagctacttgggatgctgaggtgggaggatcgcttgagcccaagagttcgagcctgcagtgagctatgatcgcatcactgcactccagcctgggcaacagagctagacagctgtctgtaaaaaaactaaacaaaacaagctaggaataataatagtgcctcctggtttcaaaccatgaggactaaattagataattcatgagatactcggcacagtgcctagcacatagttgctattcaacaaatgttaactaataatgatgatgtttaagaacagaatccttcccttcctcccctcatccagagaggtaaagtagttcttagttgccctgaactgactgttcttagtgaatatggcaatatagtacagttagtgattcctccttctctcagcaagttggggctagggaaaggttggtagtgatggaaaacttggtccagtcgcccaaggagtttacaaggagctccagaactgtagagcttttctcctggttttgccactgtgtaattttgtggtgggcctttcagccatttccctttcttttaaatttaaagcccagtattctaatggccaagatggtaggaattaaaaaaaaaaaaacaaaaacccaaaccaaatgaactggtgaaaaggaaatatgtattctcctttctcattcactagccatcaatggcactaaagaaatgtatctgcttctgtgaaaatggtgctggcctaatcctgggaagagggaccatttccttggaaaatgtagtattttctgatagtctgtttaaaggtgaaccaccaagttgatagaagaggaaggagagtttgagacataacatttcaaaaatatttccttaaacatggtcaactatgtatgatctgaaaattgctaaactaacttttagatgacagcatgaagcataggtcagttaaactgaacaattaatgagcaaccagtatagctatttcatatgttaaaaaaacttgaaagtttttcaaatgagcaaatatactctatattgtatatacatgcaagaaatataaaatcgtatattgtatctatatgtatatagtatatataatggatataatttcttataatacatctgatcattttttgctattttatacctcttgatttgggttttgctcttttaaacaattgatatggactaaagcaacataaagaaacgttataatgtcattatacaccacccgatgtgtagttaccatgaacattatcttcaagaaagtgcatggacaggaggacagagagggattgtcattatgtaggttttacatctggatatgatatgcagcttctcccacactggaaaatgagctgcgtgcataaccaattggaggcgtgtaaagagttaggagcaagatccctgcttttgtgcatttcactccatttgtagccacttgttgcactccatctggaaagaaagaagccgctgcagggcatgcgccagacctgckctgggccgtcgcttccattgtacggaagatgaacaggcggcgttattttggatcacatagcagcttgttcaaaagcatcttgcattccccagctgttccacaacttcttcgcatatgggagagaacttgccagctgctggggcaactgtacttacatttgctgcctttgttcagtaaacaaggaaggtaaaaagacaggcgcctttgttaaactgtagtcattgtaaagagacttacttgtttctgttatgtcaatgttattccagatatagtctgtcaggggaggcggtttaaaaggaaatgtcagaattaacatttttttttwatccaaataaatgttattttagggtaaccggcatgtatagtttttccatatgtaaaaccttaggctgcttttatatttcattgcctaacaaaggaatggatctaatacctaaaaataagtgtttatttaaaaattgacatatgaatcagatttaattctatacatttttctattgcatgaaatgcataaaagttacaatgtgtctccagacagtgcttttgtgttttcagaacattctgttgtttttgcatttgttggagctggagggtaccttgcccacatcctttgtttaatcaatgagaaaacttcagtttataagaagttgttgcttatccaaggtggtatggctagtggatttaattcagcaaatcttctgttgagtgtttatagtgtgacaggcctgggaaacctataaagatgaataagggttgggcccagccctggatggactcgcagttcagaaacaacagacgtaaacaaatacttcaagtatgagggctagagcagaggcagcacctttttgttttcagaacagtgttgtaatcatgtcagctcaaataaagccagagtagcaagttgatgtgccagtaagaatcgaggagcagaatcttgggtacaggaagatagaagaggcgttatatggtttatcaaattttacgtacatgtccttaaaaaagatttcgtattgtgyctctacctaggcctgcttgtctcccagttcctggccagcaccccaaaacatcttgccttcctaattattgtgaattgtgaataaatggccctctagtagctccagcatcaatcacaatcctttttgggatattcagtgagtttcaatcscctttgttctataaaaggttgtaaaataagccataattgcttgggcatgtataaaaccctctgactccaaatctcctcgaaatcttaggggttccttgtactggaaactgctgttgcttcagatcccctgatgattcacggttgctgagttgcacccacaattctaagcccttaatccacttctggcctccatttayacattcatgtatctcttacttcatcccttttgtgcagtaataacagatktttacagtctttcagttttcacttggtttactgacgttttcacttgagatgctcaagaaccccgttgggttcttagggctggtgacccagggtttccatcttggagatgaggaaactgaggctccacggttgagaaccttgcctgcgctaagattagaactaagatctcctgattgaaaattcaacactcccctctgactggaagggtcaacttatacgaagctggaggttgagtctcatcttcttctacagcttcattgtacatgccctgacttcagtgatcctcactgggtttttcacccaggactttcactgggataaatctcccttccttagtacatttctttgcacattacagttctcttagcatcttattcttcttttacttttttcttttttagagacagggtcttgctctgttgcccaggctggagtacagtggtgtgatcatagcttactacagccttgaactcctgggctcaaggaatcctccctcctcagcctcccaagtagctgggactacaggtgtgcaccaccacgcccagctaatttaaaaaaaattatagagaaatgttgcccaggctggtctcgagctccctgggctcaagtgatccttctgcctcagcctctctaaatgctgggattataggtgagagaaacagtgcccagccatcatgttacgtttctaagtcttgtctctcaagagcaattgccacctttttttttttttttttttttttttttgagatggagtctcactctgccacccaggctggagtgcaacggtgcaatctcggctcactgcaacctctgcctcctgggttcaagcggttctcccgcctcagcctcccaagtagctggaactacaggtgcgtgccaccacacccagctactttttgtgtttttagtagagatggggtttcactatgttggccaggctggtcttgaactcctgacctcatgatctgcccacctcggcctcccaaagtgctgggattacaggtgtgagccaccgcacccggccaattgccaacttttaaacacatacatccctctgtcttgctacacacaccacatacatacacacacacacacacacacacacacacacacacacacacacacctccataaacacagaggcccagcatggctactgtacccactatcctttttcacccagcccagctcctttcagaagatgacttcaccttyataccatcaaactttttcctcctgcttaatgtcttgggatgctacaaaattcttgatggatgtcagatataggtgggcggtcaaagttagcctgtttcctctttttccacaggggtactgttggaaaatgatccagttccccttgatagtggtgactatgttgtccccccaacatcatggtccttggggttagaaataagagccatttcccttaggaggaagaaggtgatgagcttagttggggmgggggacctcctttgctcaggacttctctagtattccttatgcagccatagtaccactccccacaaacatcctaacaccgcccctcacccccagactttggcagctttctcctccttctaggaccctttgtttgtttccctctttgacattctgcccctcctgttcctggtctgttgctgtcgcccagccacctcccggcaggcctgggtttcaagtgtcttagggacacatttgccttggatgtccttatctccatctgtcattggtgtttaattgctttccctccactccccagcctgctctttgacttggggtaagtttcccccttgcgatcctttctgattacttctttcagctttcctctggccaattcagctgcccgttcagctcctccatgctgctagctcaccttttgtgtctgcagtttcccagggtttccaatacatggctttgtttctatccaaggctgctctactctttttcccttccttcctttccttcctccccctttttgacagtgcttcttgatgcttgcattcctttccctttcatttttttcttcttaacaatttgcaaacccttctccctttgttctgagtcaatctcatttggctgtcacctttgtttagtataataatgatattgaataccctatcaaagtttttatgtacaggaaatttctgcttttaaaaagggttctttggaactgcaacttggaaataccagttttgaaactggttttgaaaaggtctgaactttggggaaaattgtttgaaatttattttggctttccttgcccgtggcagtaccttgaaagtaactgaaacataagcttgttttggataacctttcccttgcaaatggaaattgtacatacacacagcagaattcacgttggctttttttttctttttcaaatcatatttctggaaaatcttggaagggagtttgtgctttgtggccagtccagggtgggtgtaagtcatgaatgattggycatattaagactgtgctagacccttttgatcaaaagccycgctagggatgctttctacttatgatcctctgtccatgagaatataccagagagtaggtattaggaaatccttgacagattgacttgattaaggaatctttacttttcccccaaagctgtgaacataaaggtttactcagggttggtaatagagtaggatggtagttggaggttctcgccctgccttgaggtagagctgcaggctaccgttggtcctgagcagccagggggtctagcactgtttgcagtgcacccagagccctcccacctggcacttgttccctgcaaaaatataaaaatattgctctttttgtgactttttcttttttttttttttttgtgttcaygacttaattcacatttctcctttctctaagttctgcaataagtgaaaagatgtttacccatgccgaaatagtctggtactttaatttcccaattaaaagggagcacaattttcttgccccagtagcagtgttacttatcccrggtggtttggctattgcatgtaattctgcaaagcttctgttgcgtgtttacagtttgaccggcctgaggaatctgtaaagatgaataatggttggactcatggcacccagggagtttgagtccagcccggacaacatttctctataattttttttttttaattagctggtgtggaggtccccacttatagtcccagctacttgggaggctgaggaggcagaattccttgagcccaggagttcgaggccacagtgagctatgatcacaccactatactcccgctaatgttagtacagactggagcacacagaccaaggaatctttgtttcagcaatcttctttaattggtgttactggacatagaatcttgatgtaaccatcaacttcagttaacctagtcaagttatccacctatattattatgttattattagcatctgaagaaaggtccttgaaattagaattgtatagaaacaagaagtaaaagtaatcaaactgctgattttgtctttcctttgttcagctaacatttgataaccacgtggtgtgtgtgtgtatgcttgtgcacgtggatgtgtgtacccatttaatgcttgttattgagaatatagagtgaatcctgccttcacggagcttacagtggcggatacatttgtaaataaacaagcataggtgttgtgatggaagcacattctagatgtcatggagacatgaggggaygccatgatggcggtgctgccactggtagcatcatctgttgactgtccactgtttgccaggccctgtgctgagggctttgagggcttgacatgctgttcttattttaattagcacttttttttttgagttagagtctttctttatctcccaggccagagtgcagcagcgtgatcttggctcaccgcaacctccacctcccgagttcaagccattctcctgcctcagcctcccgagtagctgggattacaggcacctgccaccacagctggctaatttttgtatttttagtagaggcggggtttcatcatgttggccagtctggtctcgaactcctgacctcaagtgatccgcccgcctcggcctcccaaagtgctgggattgcaggcatgagccaccgtgcccggccacagttagcacagctttttaagtggaagccttgataggttaagtacctcaaatgaggtatgacaataagtagtagagtctgggtttggattcagatccaaggtcctaaagcttttgccataaatgacaggatgtatcagtagcttcctaggtttacttttcctcctctaaccatccctatctctgcacataaagaaggaataggaagcctggagagccatttgatataaaagatatatgtgggggccaggtgcagtggtgcatgcctgtaatcccagcatgttgggaggctgaggcaggaggatcacttgagctcaggagtttgagaccagcctgggcaacttagtaagaccccatctctacaaaaaatttaaaaattagtcatgcatggtggcacacacctgtagtcctagatacttgggtggctgaagtgggaggatcacataagcccatgatgtcgaggctgtagtgagctatgattgcaccactgcactccagcctgggccacagagcaagaccttgtttctaaaataatttttttattttttaaaaaaggatgtaggtgaggagttagccctagccccactctctcctataaaggatgtaccatggggatctagtctagacggttcctcagtgtctgtaattatgcattttctctgagtattcttyatattcaatgttttgccaactctgtttctaaagaggctttcttttccctctgctgagcgttgcggaaactggccatcagcctgactgagccccagagccctctgcctcctttctcagtgctgtgcatcgcaaccagcagcctctggtttctgccttgatcccctcaatggtgcttggtgaggcaagcagctctatttcaggcctgcagaaggggagagtcacttcctctttaggatctgttctttaaatgaacccctcgtggaggggaagcctgcctgctaggacacatctgtgtgcatgaatacaggctctcggaaatctcatcctcacttcagcagcctgctggttacactgctcttatctcccctttcctgccttttaaggattgcaaggctctgtggttctgataagacccagttatgacctgaagaatactggctggacagattggaggaaacctatcactcttgaagggaaggagaggctcaaaggggacacgagatcctgcccttttccaaaaggaacccttgaggacacaagagcggtcctctgcaggatgaatcaccctgaggctctaggagaaactttgataagcatgctctgccttagggctgtgcctgtcctgtttcctgctcttgatagcaggcaagtagaaagacggacctctgaccctgaactgtgtgccataatgaggaaattccaccctgaaaatttagaaatttagaggtgagcatgcatgctttttttttttttttttttttttttgagaccgggtctcactctgtagcccaggctggagtgcagtgacatgatcttggctcaccgcaacctctgcctcctgcagagaaccttcaagtgattctcatgcctcagcctcctgagtagctgggattacaggcatgtgccaccacacccagctaatttttgtatttttggtagagacggggtttcaccatgttgaccaggctggtctcgaactcctgacttcaagcgatccacccacctcagcctcccaaagtgccgggattacaggcgtgagccaccttgcccagctgctcatcagtttttaagtccaaaaataaggctaagaacttcctggaaaaattgatagaacatgaactcaaatgaagagacagcttacttcaaccagtgttagatgatgtccatccacttcctaaaaatgaattcggtattagactttgaaataggatttatatattttttttcattctgaccccagaattatccaattattttttaaaaaatagtcaccatcatatatcctgacactgagtttccaggaaaaagaaaaatcatattatatgcttgagaagaaaattacatggttggaagatgttttggttgattatttgtataaacccaacatcwrtgwgtrkgtgtgtgtgtgtgtgtgtgtgtgtgttttaaatcctcataaaaaaagaatgaaaagctttcattgcatggctcttttttttttctatacacttgcttctcacagtgttggaagaagtcacaagttagttatagcaggcagtgaaagcagtttatgtttttccatgaacaaattggttccatgtcttgtatttaggcttcttgaaaaaaaaaaaaagagagaaaacaaaaaactcagaagaaactgcaagcttattgtggaaaactcactttcattttgagcacagatactggttctaggttcaaatagtagcatcctttatctgtttgcagaacttggtagttctacaatttataaacccgttcatacttcccttgccccatacccaagtctctctaaacacaatgtcttctccattattttccatttcagctagaagttggttttgaaaagttaagtgctgtgtttgcataatcttcacccaaccctttttctcctccaaactttttatcttgtttggttgccaaattcacacgcattgcttgtagttacccaacaatggcttttgtttcattttttcatatgttctcaatggttttcccacaatttttgattctagggacaactagggagagttcatgagttgcagaaacaaggaaagttgcctccattaattgtaggcttactgaattagttaccatcaccaagtataggtaaataggagaatgactatttaaaagatgaaaagaatagatttcatagtaagagagaagtttcctctctcaagatattccttcttcttcctcattttcctcctcctattatataataataattattattattccctgaagcattgttcatagtctggtgggacaaacagttgttgctaagagtaatgccttcttaacagtgaataccgaaagtttcagttcaagtactagaaagtgacttgtcatgaataatcacagtttaaatttaagtgatgcttarttatacatttattttttatgtttttgagacaggatctcactccgtaacccaggctagagtgcaatagcacgatcccagctcactgcaacctctgcctcctgggctcaagtaatcctttcatcttagcctcccagtaactgagatacatttttaattttttgttttttaactttttggccagtggctggctaattttttgaagagacaaggtctcactatattgctcaggctggtctcaaattcctgggctcagccgatccttctgcctcagcctttcaaagtgttgagattataggcatgagccaccacgcctrcatttataaatatttatggaggacttttatgyacagggcagtctgccgggattttcacttayctaatgtcatttaatcacaagtaccacgtgaagtaggtagtattactcccatttcacagatgagcaacatcaaggcttgagaggaaaaatgattggccagagtcatgtatctaggagtgacaggattgagatttaaatcaagatcttctgattccagggtcacattcacttcccagccaataagtaaacggcagtgatgtcaccatggaggtcctatgtgtgtgtaacagtggattctggaactcagcttgaaagctcatgcagtagaattttaagaacaaaactgtccaattagggttggagtttttagtgcccctacattggatttagaggctagaattcaagcatctgcctgctttttgctaaaaatgtttattgtacaaataaatctgtacccaactcctgaaaacaccargtttttatttttaaatgtgcacaacttccaaaggccggtttggtgctgaattggaaaggattctagttcgcaaaacctggaaaatgaccattactcttgttttctttctttcgttctttttctttaaacagttgtattgaggtataatattgccatgttttcttaasctagctttttggaagaaagtttgggtcaatgttaagccaraatttcttaacttctagggctttttgatatgrtcttgcataagtttctcaaactctcacttttttattactcccagataaatcttttcagtagaaatttgggaaatttttgcattttaaaaactcrtacttgctgatgcagttttttttctttcttttctttctttctttytttttttttttttaagacagagtctcactctgtcacccaggctggagtgcagtcactgcaacctccacctcctgggttcaaacgattctctggcctcagcctccccagtagctggaattacagatgcgcaccaccacgtctggctaatttttgtatttttagcagagacagggttctgctatgttggccaagctggtctcgaactcctgaccaaaggtcatccrcctgcctcggcctcccaaagtgctgagattataagcgtgagccaccagcacccggcctgatttatttttaaggttagctttcctgaaaatgccttcttctctaactcctggttagcctgcaagccagacaaaatagcactagttacgatgataccagtaagatgtcaaaataaaactttgccacaagtcaacatggatatggactgcttattagtataaagcagggatccccagcagtattgaaatatgtggctttgtaaatttgtctgtttccttgtgcagttctgtcagtttttgcttcatgtatttggatgcatagctattattaaggtgaataaacccttaggatccttatgtccccttgaagaactggtgactttatcattatgaaatgaccttctttagaccagctgatattctttgctgtaaattctacttgttatttataaagccacttcagcttttttttttttggattggtgttagcatagtataactttttccatccttttaacccttttgtggctttatttaaagtgctttttttttgtaggcagtatacagttgtatcttttttccccaatatgaaaattagtcttttaattggtatatttagattacttacgtttaatgtaactatcaatatagtaattttaaatctgtcatcttactgtatgtgttctatgtatcttgtctattctttattcccttttccctggtttctctgccttcttttggattgaggtgtttttttgtttgtttgtttgtttgtttttgtaatgattccatttgtctcctttgttggctaattagctatatgtctttgttttgttattttgtggttgctttaagatttacagtataatctgggcataggggctcacacttgtaatcttagcactttgggaggctgaggcgggtggattgcttgaggccaggagtttgagaccaacctggccaacatggcaaaaaccccatctcttctaaaaatacaaaaattagtgggttgtggtggcacatgcctgtagtcccagctactcaggaggccgaggcatgagaatcacctraatccaggaggcagaggttgcagtgagacgagatcayaccactacactccagcctgggcacagagcaagactgtgtctcaaaaaacaaaccaacaaactatttagagtatacatctttaagttatcatagtctacctttaagtgatattatatcacttcacatatcatataagaacattacaataggatacttccatcttggcctttgtattgttgtacagtttacttttacatatgtgattaactccatataagttattattgtttgagaagtcacttctcttttaaawgcttaartaataaggagaaagctcttatgtatttacccaggtagtaactatttccactgttctttattcctttgtgtatatccatatttctacctgattattttttctacttaaaataatttactttagcattttttgttatgtaggacttctggtgatgaattcattccatttttatatgtctgataaatccttattttgcctttatttttataagtaccatgtgctaactagttgtataatyggagctacagttttatttttggaagctatttttgctgggtatagaattatagattgacaattttttcttyttagtttatgaaagattttgcttcactattttacacttgccttgcttttgacataaaatctgctatcattcttaccttcttttgtttatgtgatatgtcctttttttctaattgcatttagtatttttattttttaaaaagtgaagtctcactgtgtcatccagggcagagtgcagtggtgcagtcatagcccactgtagcctcaaactcttgggctcagtcttcctgcctcagcctcccgagcaactgggactacaggcacatgccaccaygcccagctgcttttaagatgttttgtttgttcctggttttaagcaatttgcaatgtgctttgatatacgttagtttatatttcttgtgcttggaattaaatgagctccttggatctttgggtttatatttttattaggtttggcatawtttttcagccattatttctttaaatatcattttctatccctctgtgccccccatgtggaatccaattacatgtgtttaggctgcttaaagttgtctccacagctcactcatgctttgttcattttttttaaactttcttttctgtttttcattttggatatttctattgctatgtcttcaagttcartagtcttttcttctgaaatgtctacctgctattaatcctatccagtctactgtkcatctcgcacattgtagatattatttctagaaatttgatttgtgtttttatatattcatatctctgcctaaaatcttgaatatttgtccttgtctgctaattctaatacctttcttaactcttggtcagtttcagttgattgacattgctcctcgttgtgggttgtattttcctgcctttttgcatgcctggtaatttttgacaggatgccagacattgcaatgttatcttctggggggatggaaayattgttgagctttgttttgggatgtagataaattacttggagacagttgattcttttgtcttactttcaagatttattaggtaggagcagtgctaattagacagggataattatttcttaacccgtttataccgagtgttccataattggaacactaagcttgtgggagttatttatatcctattgcttaaggtcatcaccaaggtctgatttctcacacacaaaaaatttgcaacctccagcataaatgggttaagcaacatctttctgagtacccagtgcttgtgaattatgagtttttccattctttttgtttgtttgttttgagacagagtcacactctgtcatccaggctggagtgcagtggcacgatctcagctcaccgcaacctccacctcctgggtttaagcaattctcctgccagcctcccaagtagctgggatgacaggcactttctaccatgcctggctaatttttgtatttttagtagagacagggtttcaccatgttggccaggctggtcttaaactctcgacctcaggtaaactgcccacctcggcctcccaaagtgctgggattacaagcatgagccaccatggctggctgagtttttccattctatcaggtggaaacagacactgttttgcatcagtaccagacactgttatctccaatcttttctagtgttcccccaccccctcaggcacatgtagtttgctcagaaacatgcactgactactcaaagataaatctctggacttctctgtgtagttctctcctatttggtacttggtcctgcaaattctaatggcctgggtctaccccagattctcggctctgggagtctgctgggtgataacctagggcggtcatattgcctagaatctgaaaattcagattctgttcagtaggtttttgctagggtctgagactctacatttctaagaaacttttagatgctgtcaatgctctggaaagactacttcgagtagccagggtccctagatattcaacagatatgtaatgtaaaccacatatgtaattttacatttcctagtaatcgcattaagaaaattaaaaagaaacaggcgaattttttttttttttgagacggagtcttgctctgttgcccaggctggagtgcagtggcgcgatctcggctcactgcaacctccacctcctgggttcaagcgattctcctgcctcagcctcccgagcagctggatctacagcgatgtgccaccacgcctggctaatttttgtatttttagtagaaacgggatttcaccatgttagccaggatggtctccatctcctgacctcatgatccacccgcctcggcctcccaaagtgctgggattacaggtgtgagccactgcgcctggccacgaaacaggtgaaattaatttaattatatattttctttaactcagtctacccaaaatgttatttcaacatgtaatcaatgtaaaaatattaawgagacattttttcttaaattttatagtaagtcttaaaatttgatatgtatgttatagctatcagatactacatttttatctgaaatacttggtctatatttagcttttataaaatttatagttgaaaaagtatatttgttaaccaaaccccaaatatacaagttctccagcaactgaactcagcatcaaaaaatcattctccacgatattcgcattcaacttgacaaaactggttcatcttttttagaataattaatttgactttttgaaacaaaaaatatcagtttcaaagctacatctgttcaacttaggcaaattcactaactcttatgccagctcagaattgttgacattaaattcaaaggaatattgcaaaaatggaaaaactaactctaaatttatcaatatcaacaaagtattccccaacattttcttatggattttgaaggcaatttatataatgcttttgatttcagtgaagtcatccacatattgattcaagttacaaaaatgtatgaaaccattattttttacttctcttatgaaaaatgtcaattttgacataaattctcctgcctctctagctaggtcataagtaagtttttcctttccttgaaactttaaatttagctctttcatatatagtgtgtgatatctgtgaaaaaaaacataaatcacactgcctatttttttttttttttttttttttttttttttttgagagagagtcttgctctgtcgcccaggcttgagtgcagtggcgtgatctcggctcactgcaagctccgcctcccgggttcacgccattctcctgcctcagcctcccgagtagctgggaccacaggggccccccaccacgcccggctaatttttgttttttgcatttttagtagacggagtttcaccatgttagccaggatggtctcgatctctgaccttgtgatccacccgccttggcctcccaaagtgctgggattacaggcgtgagccacggctcccagcccacagtgcctatttttgtcttcatttcttgcttcagcaagcattctttttttgtaaagaaaatcctgcattgtagttaactgtacagtgaatgtttgtaaaaattcttctatgattcaaccagagatcattggcaaagaacacatgatcaatcatttctggttttctatttctttcagcagttccataaactgcttcaagaatccaagatgttttataactggccagagttatgagctgagatgtaaaaaatcattaaaacaatttttttggccattcttattttgagtgactaatttcattgatctgtttttgactgtcgaggggagatggcatcaaattcattatgtttttgctgaaattgtctgttaatattttctgctttattatctttgactttttatgtaacacacagctttctccttttgctctgccacagcaagttataattgccattgattatgttgctttttgcttaccttcctctcctgtctctttttttcttgactgttctgattgtattattaatttctgtgtctccactggattttgtatcagtcctaaggctttggaaagtgtctctgtgttaggactgctacaaaattttcaaagtgataaattagaaaaattggccatatttattttataaactagagaaacaatgtaattatatcttaattaaaacaagtattttgatataattaccaattatgatttacatagttatcaccataacttgtgctgtctgtgtaaaatattcatatgaacacattacagtgttacatcagtgtttagaaaaaaacatttaaatggaaacactttattgacaccaagtagatcagtgatgctttcctttgtagactcatctgctacaatgcaccaaataatattttaagcaatatagtatttaaagtaaaatgtagttctaccaaagcaatgcattaatgtttaatggaacatgttttacattgcttcagtttttacatttaaataaaatcaygtgaaattaattaaaagttgacattcagttcctcagttgcactcaccaacttaagtagccatgtgtgcccattggttcttgtattggacagcacaggccaggggctacttgcatttgaacctaggaaccttgtatcaataactagatggttgctcacttttcttgcccagcaactacatcttccttgccttgtcccatggcactcaggaattttaggagtttggcaaataaagtcttgtacaattaagtggtctctgaaggtctcttgatgaccatgactcttggacaacttcccactgtgctaggccattaggacaagtctggggacaacttctgactccagggacagtctgtgggatgtaatagggattagcttgggacaaggccaaggcagagtttataggtcaactgcagctactcttcctcttcccatgggttactaaccaatgactcaagagcaatctggcttgatcttagttggatgggaatgttgtcggcagaggtagcattctcattgttctggaaggagcaggtttcattttcacaccaatcacgagagtgttaggggaaagctgtcccttagctaagttggctaggaaggttttcaaaaatccatctcaattaatcatcataggctatgaaatgacacctgaaaaatatgaagaaaatggaatgggtggtttgtgtgttgaatacaaaataatgatataaagcattctagaattcagaaaccaacttatgaaccaagatgttattttcagagtggatatactcaccttgcctggaccctgattaaactcctcctctttttttgtttaaagttcaatttatattctgaccgttttctttgtttagagttatattgctttggttcatatttttgtactgccttcacaaaatattaggggtgtttacttagatcttaggtttctcaagtctttttcttccttccttccttctcttttttcttttctttttcttctttttttttttttttttttaatttcagacaagrtctttctttgttacccaggcaggagtgcagtggtgcagtctcaacctcctaggctcaagtgaccctcccacctcagcctcctgagtagctgggaccacagctgtgtgccaccatgcccagctaatttttaattattttgtagagatgggctctcaccatgttcccaaggctggtcttgaactcctgagctcaagcgatcctcccacctcagcatcccaaagagctgggattacaggcatgagtcaccacgcccggccaagcctttttcttttgtctctgatcctcctaaactttcttttatctccaaaactcttgctctgtgctttgtacactgctgcatgttcagatagagcttaatctgtacttactcatcactgatgattcataaaatacaaagtgtgctttagtaacactgaatagtatagtctagaatcctaaaaaagttgagaaaaagactttgttctccttattttctatttttttctattgctccaccttgtattagaaattaggaaagactcgtggtgaatgtgtccaatcagttcacctcacctcatgttgtttctaaataaaataataaaatctgaacccatagtcttcgccttttttgaggtttaagtattggttcatctatgtcgttmtgtaatttcaaagtgccttccggaaaatccctcgggatggagatgactcaggatagctttgcactggtttgttatggggccatctaaatgaaggaatggccctctgaaatggcagcaacaaccctaagctgcctgggttccagtcccagttctgacaccgtctaggtgagtagcctcagccaagtaacttcccactctctaaacctcatttttctgtctatacaaggtaggaattagatgatgacattgcttcccaagccttcccacccaacactagtggcccttgagatatcattgattgggtgcttctccagtatatccatggaaattggagaaatgctgtgtgctgaattctattccrtatttggcttccaaaagctcataagcacattagagactgcaagaagccttgaagtaaagaaatctgcttaacatttttaaacctagcattttctaaactctttgaactggaaactctccctcttttggaggaaaagcttcaagtrtattggagtatcctgtagtacatagtttgggaaatgctggaatagatcagtggtcggcaaatagcagcctgcaggccaaatccctcttgccacctgttgtgtaaataaagttttattggaacamagctacactcattcatttatgaattgtctatttgccccagaatagccaagttgcagagttgtgacagagacctgtatggcccatactgccaaaaatatatttaccatctggttatttacagaaaaaaaaaatttgctgactcctacacacaggattattttcaaagtgattcatgaacatggctgaaaaaatcagatcgtggaggaatgctgtaaatgaaaagcaatagctttgttccagaagcaacacatttttaatggttcctgttaaaattattttagtggttattactaatagttgtataactcctcactcagccgtttctgatgtatgtgctttgggttgcctctgtttgatagaccacgttcacatgmacacacacacacacacacacacacwcacagaggcatgtacaacttcttagttttatcagtacatgaattcctctcttgattaccactgcagtttttttttttcttttttcttttttgagatggactgtcactctgtcgcttaggctggagtgcagtggtgccaccttggctcactgcaactgcctcccagattcaagcaattctcctacctcagcttcctgagtagctgggattayaggtgcccgccaccacacccagctaattcttttgtatttttagtagagacggggtttcaccatgttggccaggctggtctcgaactcctgatctcaagtgatccacctgcctcagcctcccaaagtgctgggattacaggcctgagccaccgtgcccagccctaccattgcagttttaatgttcataaacctctatatcttgttgcatttatttcctacctattaggtgccaaattttataagatgaggggactagtaccactaaccttccgcattcctctcttttcctgttgtccatctttcagcttttctcagctatgtctttatttttacagtgttgagtctgataacatttgccttctctatctggaaatattttccttgcattgcccattgattgagtctaaaggttgcaagctgtcttagtccctttagtgttgctataaaggaatacctgaggttgggtaatttataaagaagagttttatttggctcacgattctgctgctggaagattgggcatctggggaaagcctcaggctgcttccacatatactgaaaggcagagaggagctggcatgtgcagagatcagatagcgagagagaaggcaagagagagaggaagaaggtcccaggctctttctaacaaccagctaaggtcgcaggctctttctaacaaccagctctcctgggaactaatagagcaaaaattcactcactgcctccccgccccccagaaagagcattaatctattcatgaggaatccacgcccatgacctaaacacctgccattaggcaccgcctccaacatagaggatcagatttcaacaatgttccaaagggtcgaatatccaaaccgcagcacaagccaatgagcagtgttaatgtaaatactgtctgtagaagagccaagcagtgcttgctgtgattatacttccctctctataattctaatatcacaactgcagcatcactcaaaatagatagttcttaatatctttttctttaaaattttttaaatttttatatttttattaaaatatataaaaaatattgaacacgtcatgaatttgcatgtcatccttgcgcaggggccatgctgatcttccaattttagtatatcattccaattttagtacmtgtactgtaatccaccygccttgacctcccaaagtgctggaattacaggcatgtgccaccgtgcccagctgctctaatatcttttccaattgagttcattctgctmatttttaccagttgctctaaatcatggcactttttttttttttccttgagacagagtctcactttgtgtcacccaggctggagtgtaatggcgtgatctcggctcactgcaacctcyacctcccgagttcaagtgatttttgtgcctcagcctcctgagtagtwgggattacagggtgcaccaccacacttggctaatttttgcatttttagtataaacggagtttcaccatgttggccaggstggtctggaacccctgacctcaggtgatctgccyrccttggcctcccaaagtgctgggattacaggcgtgagtagtgtcrcctgtccagtcatggygcatttgaaccatgtctctcctgctttttgttggtggcatttgttttcccttgaggtttatttatttattgagacgtagtcttgctctgtcacccaggctggagtgcagtggcacgatctcaccacagtacaatttccacctcccaggttcaagtrgttctcctgcctcagtctccacagtagctgggaccacmggcgtgcgtcaccatgcccagctaatttttgtatttttagtagagacagggtttcaycatgttgtccaggcttgtctcgaactcctgacttcaggtgatctgccctcctcagcctcccaaagtgctgggattacaggcatgagtcgccattctggcccccttgaatttttttattggtttgtttttttggtgtgtgtgccttgttgagggaagaattgtgcctccttgactatttccctcaaatcctctagtttttaacgcatttgtctattgcctgaaataaatgcattctttttgaagacattctttgcggattccactcactgatgtcctcatggcttcctagacttgcagttgttaattttccttaaattcaaggctttgttctaccatgtgttggatgccacatctctttgcctgtgttttacattgattttttttgaaatatatttaatagtcttaagtgatttattctgattgaggctcactttctgagtcttacgtgtttgaaaatgtctttactatgattggtatgggtttctaggcttgaaataaatttttctttaaccttcaaaaatcttgctatattgttgcagatttgaaaaggcacatgctggtctgtgtttgttattaactgactcttttttcctttttgaaagctactagagtttctttctctttattcctcaatattctgcaataattattaatacaattatatagtaatttgacagtgagatgtctaaatgtgagtctttgctcatttattgagtttggtagtcagtgggtgtatcagtcaggttctcttcacacaaaaatcacacagatttgaacagggaaactttaaacaatcattgatttgtagcaggggattaactactaaaaggaaaagagagctgtaaagaatacaggaatggttggctgggcgtggtggctcaygcctataatcccgacactttgggaggaggccaaggtgggcagatcarttgagcccaggtgtttgagactagcctgggcaatatagtgaaaccctgtctctacgaaaaattaaaaagttagccgggcatggtggcacgcacctgtagtcccacgtactcaggaagctgaggtgggaggattgcttgagctcaggagtttgaggctgcagtgtgccatgatcacactccagcctaggcaacagagtgagaccctgcctcaaaaaaaaaaaaaaattaagaaagaatgtgagtgacacatacattgagcagcccctccctctagggctgaggcaagatcgagttcagaagtggctgcctctcgcgcacccccaaatctgaaattcagatctcagggcatggytccgtggcccattgaggcagcacagtctggggaggagctgcatgctagcccatgtgggataccgcctgctctggtgtttaaaaaactgctagaaaccacccacccactgggtgcctgcaagccttgctgggagccggctgggtgctgggggtactcactggatacctgctcacaggtttgctctactgaaccttgtgaggatgctgcctgctggggtgtctgccagacttaccgggaaccacctgcagggtgctgccgaaactcactggggtgacgcccctgggtattccacaggctgctagctrctgcaggcacaagctggtgagagcataccccataggagaaaagtcgcttcctcctgcacgacttctccagcacyctcaaccagcaaagcttaacctgatgtcagctggcaaaggagagacattgaccacgtccagctcccgtaattcaaaggaaggcaaagaagggtatctgcagctgagaggtaacacatggataaacagcaaacatcttgaagtctaagcttgtcaccttagctctggggagttttcttgtacaggttaagcatccctaattcaaacatttgaaatgctctgaaatccgaaactttttgagtgccaacatgacacgacactcaaaggttatgctcattggagcacttagggtgtcagagttttggattagagatgctcagctggtaagtacaatgtaagtattccagaatccaaaaacgtctgaaatctgaaacacttctggtctcaagcattttggataaggggtactcaagctgtattatttctttgataatttcttccttttccccctgccccatatttttctgtggtttttagaactctgattggtcaaatgttaggcttcttcggttccttctctggctttttaatcttttcttcaattttttgtgtttttattcttttgctttgtgttctgggagacttccctaacattatctttgtactgttctattgaacttttcattgtgtaatcatcttttaaaattctttcggcaggttttttgtttgatttttttgttgttgttgagtttgtttttgttctattggctgttttgttttctttgctttttcttgtgtttttckcagtagagcaaacctgtgaacagatctccagtgagctccagtgagctccacccacacccagcaggcttcccagcaaggcatgcacactgtatactttttatagcattctgcattgtttttcttttatatttgcatgttttatggttatattcatcttccagaaatgtcaaaatcttttgttttctttttcttttcttaaattttttgagacggagttgcccaggctggagtgtagtggcgcaatctcggctcactgcaacctctgcctcccaggttcaagcaattttcctgccttagccacccaagtagctgggattacaggcgcccgccaccacgcctggctaatttttgtatttttagtaaagacagggtttcaccatgttggccaggctggtcttgaactcctgacctcaggtgatccgcccacctcggcctcccaaagtgctgggattacaggcgtgagctaacgcacgtggccaaaatcttttgttttctgatgactgattattttctcttcgctgatgtaaatttgtacattttttttttttttttttttttgagatggagtctcactctgtctcccaggctggagtgcagtggcacaatatcggctcactgcaagctccgcctcccaggttcacgccattctcctgcctcagcctcccgagtagctgggactacaggcgccctccaccatgcctggctaattttttctattttttagtggagacggggtttcaccgtgttagccaggatggtctccatctcctgacctcgtgatccacctgcctcggcctcccaaagtgctgggattacaggcgtgagccaccgcgcatggcctgtacattttttttaaagttatttttaccatcattttagcaggccagactacatgagtttaaatcacarccctgatatttactagccatgtgactgttctaagccttcattttctcatttatgaaatggggatgataatagtgacctaggttataaatcataagagtataaatgaaataatacacgaaaagtccttagcacagtgcctggcatatactcactgttttaaagatagcttcagctattattatttgtaaacataccacattattttaaactgattataatccatttaatcattattttaaaagcacttctagtctgtaaaatataatttctttggtcttattaattaccactgctactgctgtcactattaccactgctaccacagatatcttcaagcaagcagatgtaggaattaatagaaatttggtttaagggcaaattaatggcatacaatttggagacatttacttaggatacaaaatcaatatgcaaaaatcacaagcattcgaataaaccaacaatagacaagcagagagccaaatcatgaatgaactcccaatcacaattgctacaaagacaataaaatacctaggaatacagctaacaaggaatgtgaaggacctcttcaaggagaactacaaaccactgctcaaggaaataagagagtacacaaacaaatggaaaaactttccatcctcatggataagaagaatcaatatcgtgaaaatggccatactgcccaaagtaatttgtagattcaatgctattcccatcaaactaccactgacattcttcacagaattagatagaaactactttaatttttacatggaaccaaaaaagagcccgtataggcaagataatcctaagcaaaaagaacaaagctggagtcatcacctacctgacttcaagctatattacaatgcaacagtaaccaaaacagcatggtactggyaccaaagcagacatataaaccaatggaacagaacagagacctcagaaataataccacacatctacaaccatctgatcttcgacaaaccaaacaacaaaaaagcagtggggaaggattccctatttgttaaacagtgctgggaaaactggctagccatatgcagaaaacagaagctagaccccttccttacaccttatacaaagattaattcatgatggattgaagacttaaatataaaacccaaaactataaaaaccccagaagaaaacctaggaaataccattcaggacatagacatgggcaaagaacttcatgacaaaaacaccaaaagcaattgcaacagaaaccaatctaattaaactaaagagcttctgcacagcaaaagaaactatcatcagagtgaacaggcaacccacagaatgggagaaactttttgcaatctacccatctgacagaggtctaatatccaaaatctgcaaggaacttaaacaaatttacaaggaaaaaaaaatacccatcaaaatgtgggcaaaggatatgaacagacacttctcaaaagaagacatgtatgcagccaacaaacatatgaaaaaaagcttgacattactgatctgacatgcaaattaaaaccacaatgagataccatctcacaccagtcagmatggtgattattaaaaagtcaagaaacaacagatgctggagaggatgtggagaaataggaatgcttttacactgttggtgggaatgtaaattacttcaaccactgtggaagacagtatggtgattcctcaaggatctagaaccagaaataccatttgacccagcaatcccattactgartatataccccaaggaatataaatcattctactataaagacacatgcacacacatgtttattgcagcactatttacaatagcaaagacatggaaccaacccaaatgcccgtcaatctacaggcatgagctgctatgcccagccaagtcgatttattaaaagtagctcagtatatacccaaaggaatataaatcaattattctattataaagaaacatgcacacatatgttcattgcagcactatttacaatagcaaagtcatggaatcagcctaaatgcccatcagtgatagcctggacaaagaaaatgtggcacatatacaccatggaatactatgcaggcataaaaaggaatgagatcatgtcctttgcagggacatggatgaagccagaagccatcgtcctcagcaaacttatgcaggaacagaaaaccaaacaccacatgttctcactcrtaagtaggagttgaacaaggagaacacatggacatagggaggggaacatgacacactggggcctttcgggggttgcgggtcaaggggagggaaagcattaggacaaatagctaatgcatacagggcttaaaacctagatgatgggttgataggcacagcaaaccaccatggcacacgtttacctatctaataaacctgcacattctgcacttgtatcccgaacttaaaaaaaaaaaagatttgaagtgggaagaacagtctatattctccctccgcctcctttctgtatggaccctgatggttacatggggccctccagaatatctaggatcatttcctcatctcaagatccttcaatttatcacatctacagaatctttgccgtgtcaggtaatattcacagtttccaggaattagaatgtggatatcttttggggatccattattcagccaaccacacacacctttatccttttgtccgtgaataaagttaatatttacattaactttggccatacccaaaatctctttgggaaagttgcaaattggaggagaaaatgaccccttgcatttttcctttaatttccaatatccagggataaagaacttccaatgctacttcaaggtttatattactatatttttaaaaattgtgaggctctcattcctagtctcattacatttcaaaggcattaataccctgctttaaaaatcagcaccaaatgtacatggtttagacagatccattgcgtacatctcaatctgttacataagcgagaagtaattttttaaattgcttctttaaatgtagtaggagttaaaggagttccctgttcccttccccaaccccctgaaaatccccaggactcctgagaggtgtctgcatgtcttttggtttgggagattaggtagggcttgagtcactctgagttgtccgctaggatggagggggcagtgacgttgaacaggtacctgaatggccaaggaggggtcaagtgtagaattcagtttcaccaataaatgatgatcgtggttgtgaatgaagggaacaatttgcggggggaaatgatcaaatgatcaataaactgagaaattaaattttaagcagaatttggtgaagaaattattgagacctactctacatgagaacccatgttagatgctttggaggattaaaaaagaagaggccagcactttgggaggctgaagtgggagaatcacttgaggccaggagttccagaccagcctgggcaatgtagtgagagcctatctctacagaaaaaaagagagagagagagaaagcrtgagaaagtcatttctgctagtgagagagacatggtataaacatttcaaaattatttgtaagacaacatattttgtggcacagtttggtgcatgctcagttcctcggtgaacacacatacacacacacacgacactgcaagtttagggagtggcgtgagctctacaacttggaaaacttatgagaaagcacagacgtggctgagggaggagtggttacgattttgagcatggtaggctgaggcgcccagcccactggagcaggaagtaccagtgaactaggatattaatgaacagttcaagaacccacctgaggctaggcacagtggctcatgcctgtaatcctagcactttgagaggccgaggcgggagaattatttgatgcccggaattcgagatcagcctggccaacatagggagagaccccatctctacaaaaaattaaaaaattagctggggtggtgtcatgtggctgtggtcctagctactcaggaggctggggttggaggatcacttgagcccaggagtttgaggctgaagtgagctgtgatcacaccagtgcaccccagcctgggcgactgawctagaccctgggctccttcccccaaaaaaacaagagcccacctgacagggactttggaggagagacttggcctttactrttaactttccccaactgtttgtcagggccactgaggaatcccatttgggatgagaaacaccccacattgcagggcacggctacctgaaggcaatcctgagaatccccctggacgttggtgtctggatccttctgatgcctgcctgctggttccacgagtctgctggccccaggccaggccctttgtcggagcccccgccacaggggctgctggcgtgcatctggagaaccagctgacagaaggcctgtgttctattcccctccccttctctgcttcacttgccatgaatgagcagaacatgagtggaaaagagtgatgcatttggggtggaagatgcgattgtcaagagcagggtttctggcaccaggtggtggagaaggagaaaggcctgacatctctggagcagtggggggctggtctggggaaggggaagcgcagaaatgctcagcatctggcgtttcaccctcacggtgatccaggttaccctcaaatccagtgttaagagggaacgttaaataatgaacccagagaaactttaaaaacagcagagaaaaattatgaaaatggaggaataatcctgcatctgtttcaaggttagarttttgtttttgcttttacagaaactaagctctctctttttyctctattaaaaataaatgcctagatcctttcacattgcaccctcgcttacatggggccccttcacatttttgaactgtcttggacgagagcctaagatccaagatgcrttctttttttttacagcaaagtgaaaggaaataagactcattcatttaacgaatatttgtgaggcagcctgtgaagttgccttagaatctgggccaggtagtgagatcagtacgattctaccctttttctcctaaagtctgaagtcaaaggaggcaacttcaaaataaatgaaggtatctatgatgggctgagtgttgagagtttgcaccagggacagctcagagaacagctgcgtggggacaggaactatctgggtgagcagattgtccacagataattcaaagtcatcaaaggtcaaaggtctgtgagctgtgcttgtttagggattcattttcagtgtctctgtaataagttttgaactgatggctgttagggtttccaaaggacagaaccttgccttctttatgaaatggaataattttattgataatttctacatctgataaacctcgtgaacgtgtgatctgagctaacttcctgatactggctgcagctttgctcagtatccagggagtagctgagtgagctcagaaacacagagcccgtggctgctctgtgggtccatgcagttgttaatctcacgcagaacccagcggggaggtcagtgtggatggtttttgtcttagatccagtgagacatataaatgctgtaagaagactctggttgcactgttgaatgtggatttttttttctttgaatatttttttcttattttgatggaacatttattcaaaatgtagcacctcctctgtcctttatgaagttatagtatgggasagttcattgtgacacacttttaaagctctttacttttttttttttttttttttttggagatggagtctcgctctrttacccaggctggagtgcagtggtgtgacctcagctcactgcaatctccacctcccgggttcaagtgattctcctgcctcagcctcccgagtacctgggattacaggcaccygccaccacgcccggctaatttttgtttattttagtagaaatggggtttcaccgttttggccaggctggtctcgaactcctgacctcaggtgatccatctgcctcggcctcccaaagtgctgggattacaggcgtgagccaccgcgcccagcctatagctctttactttttaacatgccaccatatcttgtctgacatgagattattcatttagaaacattttatttggtcttccaaatacattagaatgtcagccacaaaagatagcttggggccttataattgaaccatttacttataagatttcaagtgtcaagttgcaataattttctgcaaaacataagtaactattttatgaatatgtatttgtgatgaatgatttcctacacaaatgaagaatctattttaatagaaaatggtaactggatatattactagatacaattttttttatttccctattttcagtttcaatagggaaaattaaaattttccctgttacttccttattttatttccctatttcaatgaatgaaatcataggcaactctaagtctcttgaggaaacttgggcgttatacatctctctcttctcccaaactcaaactagcttaagcaaaacatggaatttgttgacatgaataataggaaaatccaatgatgaagctgsctgcagatggaactcaagagttttttgggtattggccttattctctcttggagtacaggggcctgagaggtggcccctggaagcttttccagcttcaacccaaaaagaaaaaagagagaccatctttcttctagtgctactaaatcaggtcttgtggaaggaatctctttggctgtggacagaggagtgggtctgtgcatggtctatttttgcagtgaggggtgggtggggtatggttataaggagagaggaagaatttccagatgaatagaggggtataatgcaggcaaaagccatacatgtccactgtaacaygcaaatatgatccatacctgtgtgcacacttcagccctgcatcagctcaaacacaggcggcagggctggagcgtggagaggaaggtggccctaccagctgggtctacagcttgtctccttccttctgagaacagtcaggtgagccttgaagcgatgggctaaggtgcagtgcttctcaagcttgtttttgttaatactcaaataaccaagaggactgaaatcgtgattgcaggtgggggtaggggtgccacaggtaactcctggctcacataaagaatggaaatagtggccaggcgcagtgactcacgcctgtaatcccagcactttgggaggccgaggcaggcggatcatgaggtcaggagattgagaccatcctggctaacacagtggtgaaaccccgtctctactaaaaatacaaaaaactagtcgggtgtggtggcgggcgcctgtagtcccagctactcaggaggctgaggcaggagaatggtgtgaacccgggaggcggagcttgcagtgagctgagatcgcactactgcactccaggctgggcgacagagcayatctccatctccaaaaaaaaaaaaaaaaaaaggaaatagtaagaatttcttctctgtgttataagctatgggaggggagtcacygagcagtgtgcccaaaatttttcctgtgtgacattttcaggctgtagtgggtggaaagattttgtaaatgtatcttcttggtgagagggtgtcctctgaatctgctggtaggttggagtgtttgcagggaaatgttcatcaaagggcttgctctgtgaagaaygtgacttaggatgatctttattttacgtgcattccatcatatgtaaacaaagttagggtctcaacattcccactagcaccttcagccaactcccaagcttctgtctyrgcaaagcgtttgctgtagaagcctacactttgaacccatccttattttaggtgaaatcatttatttcgtctatgtttttactctctagtgtgtcatatcttactttttcacttcttgaagaaaaaaaccaattctgtcctgagtttggaaacctttccttggtaagccagggcccatttgtgtagagtaagcttttcaaatcactttacagttccttccacatttgttgaaagggagagtttagaatacaaatcactgttcagtagccaactgtgttaccagcccatcaatgccctgaggacactgcatagcagacattctcccgctggtgccttcaggtgcccsgaggcctgggcctgaactggccttccacactcttggctggagatgtggctccatctggcttcaccttcagtgcctcctaactcgtcagtaacactcagtaaagaattgagcagaacttactgaaaaagcaaaacgtctttgtgagtttttatggcttcagygtgtcctgagctatctttaaaaatagagcaacttgggctgggcatggcggctcacacctgtaatcccagcacttttggaggccaaggagggtggatcatctgaggtcaggagttgaagaccagcctggccaacatggcgaaaccccatctctactaaaaaatacaaaaattagcctggtgtggtggtgcacgcctgtaatcccagctactcaggaggctgaggtgagagaattgcttgaacccagggaggcagaggttgcagtgagccaagatcgcaccactgcatttcagcctgggtgacagagcgagactccatctcaaaaaaacaaaacacaagcaaacaaaaagaggtggtcatggtgatgcatgccagtagttccagctacttgagaggctgaggcaagaggattgcttgaacccaggagttggaggcttcagtgagctatgatcacacactgcaytctagcctgggcaacagagcaagaccctgtctctaaaaaaaataaaaaataacatasagcaaccaaacagcagttcagttattaaaatctgttcatgtattcagctattagacaaagacaaggaccgagttagatccagcctgtggaccagttgttccaatttgtctctgagcacactgaaatacagttttatagtgtcattcgatgagggtgctttatgcagcccgccggctcctttttgctggaaacaggtgtagtcacagccggagggagattcactgcagagtcaccagttgtgtagtttttccattcatcttgattctgaaaagagcttaaagacaactttaagcaattgttactttgtttgtatgcatctgcttcctaaggtctatacctagcgcctagacttctttttagatacaaaatgtgtgatttattttccttcaaaatttgcttctttttttttttttcctggagtaatatgactcatgcagcagggttttattttattttatttttatttttattttttttagattataaaaacttcctctttaatcaaggcttttaacatgaacagatttcttgaataaaatggaaagtttccagtacactgaaacataaatccacaagtcaccatacatacaacacccggcaggaaaaaacaaaaacagcaagtttacatgatccctgtaacagccatggtctcaaactcagatgcttcctccatctgccaagtgtgttctggatacagagcacatcgtggcttctggggtcacactcagcttaggctgtgggtccacagagcactcatctggctgggctatggtggaggtggctctactcaagaagcaaagcagttaccagcacattcaaacagtgtattgaacatcttttaaatatcaaagtgagaaacaagaaggcaacataataatgttatcagaaagatgttagraagtaaggacagctgtgtaaagcttgaggctgaaaagtagcttgccagcttcatttctttggtttcttgggtagtgggcgccggaacagcaagatgtgaggttctggttcatggatcatataatggacccatccctgactctgctgaacgccaagattcctccattcagattcagacatcagatgggttttagggaccagcttggctatgtccttgggcagcatgacatgtcgatactcaaactccttgtcatcgtatttgtccgaatagtaaatttgtttgtgcgacataaatgatttaacttttattctgaaaagcctcctgaatatttatatccctagaacgatacataagaattgatcatctttccttatgggaggacttttttttgttgttgttgttgttttctttttaattttattttttttttaattgatcattcttgggtgtttctcacagagggggatttggcagggtcataggacactagtggagggaaggtcagcagacaaacaagtgaacaaaggtctctggttttcctaggcagagtgtttgtgtccctgggtacttgagattagggagtggtgatgactcttaaggagcctgctgccttcaagcatctgtttaacaaagcacatcttgcaccgcccttaatccatttaaccctgagtggacacagcacatrtttcagagagcacagggttgggggtaaggtcatagatcaacaagatcccaaggcagaagaatttttcttagtacagaacaaaatgaaaagtctcccatgtctacttctttctacacagacacggcaaccatctgatttctcaatcttttccccaccttgcccccttttctattccagaaaaccgccatcgtcatcatgrcccattctcaatgagctgttgggtacacctcccagacggggtggtggccgggcagaggggctcctcacttcccagtaggggcggccgggcagaggcgcccctcagctcccggaccgggtggctggccaggcggggcgctgacccccccatctccctcccggacggggcggctggccgggagggggcgctgaccccccccacctccctcccggacggagcggctggccgggcagaggggctcctcacttcccagtaggggtggccgggcagaggcgcccctcacctcccggacggggcggctggccgggcggggggctgagccccccacctccctcccggacggggcggctggctgggcgaggggctgacccccccacctccctcccggacggggcgtctggctgggcagaggggctcctggctgggcagagggactcctcacttcccagtaggggcggccgggcagaggcgcccctcacctcccggacagggcggttggccgggcggggggctgagccccacctccctcccggacggggtggctgccaggcggagatgctcctcacttcccagacggggtggcagccaggcggaggggctcctcacttctcagacggggcggttgccaggaggagggtctcctcacttctcagacggggcggccgggcagagacactcctcacctcccaaacggggtcgcggccgggccgaggcgctcctcacatcccagacggggcggcggggcagaggcgctccccacatctcagacgatgggctgccgggcagagatgctcctcacttcctagatgggatggtggccgggacgaggcgctcctcacttcccaggtgggatggcrgccgggcagagacgctcctcactttccagactgggcagccaggcagaggggctcctcacatcccagacgatgggcagccaggcagagacgctcctcacttcccagacggggtggcggccgggcaggggctgcaatctcygcactttggggggccaaggcaggcggctgggaggtggaggccatagcgagccgagatcatgccactgcactccagcctgggcaccattgagcactragtgaatgagactccgtctgcaatcctggcacctcgggaggccgaggctggcggaacactcgcggctaggagctggagaccagtctggccaacacagcgaaaccccgtccccaccaaaaaaacacgaaaaccagtcaggcgtggcggcgcrcgcctgcaatcgcaggcactcggcaggctgaggcaggagaatcaggcagggaggctgcagagagccgagatggcagcagtacagtccagctttggcccggcatgagagggaaaccgtggaaaggagagggagagggagacgggagagggagagggagagggagagggagagggagacgggagagggagagggagacgggagagggagagggagacgggagagggagagggagacgggagagggagagggagagggagacgggagagggagagggagacgggagagggagacgggagagggagagggagacgggagctgtttgtacatcttattttttattttatttatttttttgagagggagtcttgctctgtcgcccaggctggagtgcagtggtgcaatctcggttcattgcaacctctgccttctgggttcaagcaattctcccacctcagcatcctgagtagctgggattgcaggctcatgccaccacacctggctaatttttgtattttagtagagacgggtttcaccatgttggtcaggctggtctgaaactcctgacctcaggtgatccacccaccttgacctcccaaagtgctgggattacaggcgtgagccaccacgcctgggctattttttaaattttttaaaatttcaacagctttagggatacaaatggtttttggttacatggatgaattgtgtagtggtgaagtcagggcacttagtgtacccctcatttagtgtacctgccccctgaatagtgtacattgtacccaataagtactttttcatccctcactcccactaccccttctcataggagacgtcaaggtgagtcaaccttcaaaattactaattgggaatcaattagtattttaaataagcagctcgtacattccatactttctggagtggctgctgcttccggctgcagaagccctagtgttggtggtgccacatcttcattcctagtttgtcttcattgctttgggacccggaggtctctcttgacctcaagcagaaattgttctccaaggctctggaaccccaattcactagaattgccgaatttctgccctcagaagtaccgtgcattgtgcgaggcatgcagaatggaggagcgctcaaccctgcagagagagataactcaggcccctcccttcctctagctgcctttccttaggaattcacagtttccttataattctgtccctcgggctgtttaggtccaacggcttatagcgtatgaatctctcaccttgagctttcctataaattccaagttcttccttagttttccttttcccctttggttatattaagagaacgttaaattgtattttggggccaggcccagtggctcacgcactttgggaggccgaggtggaaggattacttgaggttaggagtttgggaccaacccggccaacatagcaaaaccttttctctactgaaaatacaaaaattagctggatatgatggcacacacctgtaatcccagctactggggaggctgaggcaggagaatcacttgaacccgggaggtggaggttgcagtgagccgagatcatgccactgaactccagcccaggtgacagagtaaaactcgatctcagaaaaaaaaaattgtattttgggaaatgcttgtaatgtaaccatgctcacaataactgtatcaatttatttttttaagagacaggttgtactctgtcatccaggttggagtgcagtggtgtgatcatagctcactgcagcctccaactcctgggctcaagtgatcctcctgcttcagcttggactataggcatgtgctaccatgcctggctaatttaagaaaagattttttttttttttttttttggtagacacagtgtcttgctctgttgcccaggctgcttcaaactcctaacctcaagcaatcctccggcctcggcttcccaaagcactaccctgccaatatcaatttttgttattcctttctttgtttacatcttctgactttgttcgttcattacaattctgggtaggggggctgtctatgggatgggagaggacactgggctcctkagcccatcataggatctagaagatggaattgcaattttatctatgtatctatctatgtatctatgtatgtatgtatgtatgtatatatgtatctatctatctatctcaataactatgtcttaggccaaaacactccattttttaggcttgcctctaaaatgaggataatgatctaatgaagaaagaagatttgattaatgtgggtaaggaacttttataggccaaacacgtattatttttccactgttttggtagtagctattagtatcctggcttttctcacatttgagtaaggcattcctatttaagaaggtgctttgaaagacgttttttcgggagaaggaaagggctggcacttgcaggtgtcttgtgtgtgtgcagttgtgatgcacacagcggcttggctctggagtgcagtgaggtctggcgcccacctggctctccaggggcagcttagtcctgctgggtgctcaggcatctattctctcccatttttccaggcatctctaggaacttactgccctttcaacgcaaagtttaaattttttatttgaagaaccagccaatgagaatgtatttggtgatgtcttcatagctgcaaccttttctatgtatgcgtgcctgtgaaggggtaggagggagaaaccttctagattgttttcttttttccttcctcttctctccttgcctttgctcctctcccccaccccccatccccaaataaatacacaaaacagaggtcctatagtgtcatgcttgagaattatggattcgggccaccctgcctggtttgaatcctgacttgtctctaacacctgggcaagttggttagctgttctgagtctcagtttcctgatctgtaaaatgaggatgaagacagttcttacctcacaggattatgatgagggttaggtgagttaacatatggaaaacactcggagtgcctgccattaacccatttatgcctgaggttgcagtctttttgtgtgaaaaatcggaccttggcgatgaccttgaggggtgggatataaataactcccacaagcttagcgttccaataatggaacactaggcatatatggttaaggactatgtcagcgtcagtgaccatgagacaaaaaccatatgggtcatagctatttgggagtagttgttaggaaaaagaattttagaatggagcattctgaaatactagtgtttctatatttttacagtaataggaaaaaagtcccgcctgggcacagcagctcacgcctgtaattccaacaccttgggaggctgaggcaggaggattccttgagcccaggagtttgaaaccaatctgggcaacatagggagaccttgcccttatattaaaaaaatatatttwtatatatatatcatatatacatataaataagcatttatatgtattgttatatatatataaggttcagagaaagtagaatgttattgtattccgtgtgtagcaggaaaaataatcatcacagatctctcctgaacatttggtgtatgccaagcactataatgagtgcttgacactgatgatctcattgcaggctcttatgagtttgttcctgtgcttattttccagaagaggaaagaggttttgagagattaaacttgcccaagttaggaagtggctgaatgcaatgggattcctgagctcacctgctcatacggggtggaatgttctgtctccrtccttctgctgagcagaaccagggagagttcatcggctttgtcatgaaaatcacatcgtctcatatggttgttagtgagtctagtaatgcatttcctttaaaaggcagttttcatgttgacgaacctctacttgcttctacttgtaagccagaatgccaaaaacaagaaaccaagttcacgattctttgttttctatgatttgacgaaggtttctggcatgagaaccttctttttgtagctgtaaagcaactgaggttcttcactgaggttgacagtgtcttagctgagtgagctgcggcagggattcccctgtttcctgtgtttccagttgcttattggctgatccaacttccagatgggtgctaatttcattccaggaaggggaccagagctgagcagctcatctgttttccttagcgtgctsctcagttatttgaaagggtgatttgagcttatttttcttcttgtttgtagacaacagtggtgagataattcgagtgtctacctataacagagtgtkacagggattccgtaatctttgctctccagcatctgttggccggggtagatggggggtttgttgtccttggaaacctggaaggaactattagtcatgtcttaatcctgagccataaatttacactcatttgagagataagcaaatttggcagaaagactgagtcaaaaatctttgtcttgatctctgagacaggattagtggacaaactaaatcataaattatttattattttggtcacagaagctggagcgtcgccaagaaaagaatctttaaaaattattcattattggggctgggcgcggtggctcacgcctgtaatcccagcactttgggaggcccaggtgggtggatcacgaggtcaggagatcgagaccatcctgcctaacacggtgaaacaccgtctctactaaaaatacaaaaaattagccgggcgtggtggtgggcgcctgtagtcccagctactcgggaggctgaggctggagaatggcgtgaacctgggaggtggagcttgcagtgagccgagatcgcaccactgcactccagcctgggcgacagagtgagactccgtctcaaaaaaaaaaaaaaaaattattcattatccaacatactttacattgttcattattggtcatttaggctccaaatactgttacagattgaaaagtaagagaaaaaaaaatctttctactatagaacattgcagttttatttaatgggaaaaatattcttttagtctttttactcttccagaagaaaatgttccactgaataattgatgcttctaaaatgaagctttgcgttttatgatactagaatagctttcattatctgaacgaatgaatgttagccctgaatattaactatcttcatataaaaaacatttgaacgtaagaaaaatcagccaacttgattgttctcaggtaaagttcagaccatgaattatacagaaccccagataattgcagatgatggaactaatcacaatatgcaaatcagcaatgattaacaaccatatgcaggtkttctcatgggttgtgttcgaatgaaataggatattaaaactggaaacttaattatgtaattcaggatgataaatacattattatgctttcaccttttttaaaagaattgagacaaatgtagtcatttgtgattttgtaatctttgtttttattttatataaattaaaatataaaattcattattttttatgacagacaggtgaaataaaaacatagggccttctagtattgcatattctgatctgaagttctgcttctgaaatgtatgcttggttctaaatgatataaatagcctccatattactgacttatacttctaaaacttctttctgaagattcaacagcagatccttgttatccaaggataatgagaaccagaaaaaaggccatttaaggtcaatccacttaaatggggaccaacatttcatataatgaaaaaaagctttgggactttatcatgaaaaaaattaactgaaaactatgaaaataagttattttagcatacatttatcaaaatttaggtgatcattgtgactatggctagctcttagaatgagcagtgtgaaagtcaagtgttgattattttgaaaggagtaaattttttgtataaaatgaggcgattctacattttggtactttttatatcacaattgacatttacatcacagcataaagatgaccagtgttacaaagatattcaaggtcttggtcattttcctctggagccgtttagatttttaaatactaaaatcactgtagaaagttctatcttgtcaccaacgttagatttttctctgaagtgattgtttcctaatcaaactgctcagctcccactggccattgttttacctgttattggggaaattctctaatgccattttgattagcctcatgaaattctgtatttgggggaaagttttgcagtgttgctctgcagtggacatacatctgtgggaggtacgagacagtcactaacagaattagggatagaggctgactttgaacaatgatggatttttaagagggactcaagtcaaaaaaatggctatttggaaatattttagtattttgaaggtgtgcttccctgaacaagcccatcatttgtagggatttgggtcatgaatactccaataacaagggctccctgacctgtgtgtatgaatgcattgcagtatgcagtatgaaaaagagactcggctgggcgcggtggctcgcgcctgtaatcccagcactttgggaggccgagatgggcagatcacgaggtcaggagttcgagaccagcctggccaatatagtgaaaccccatctctactaaaaatacaaaaagttagccggatgtgttggtgtgtgcctgtaatccccactactcgggaagctgaggcaggagaatcacatgaacccgggaggcggaggttgcagagagctgagatcgcgccakggcactccagcctgggtgatagtgcgagactctgtctcaaaaaaaaaagaaaacaaagaaaagagactcatgagtcggggagataccagttctagcctcagttctgccagtgggtagctgtatackcatggatgaatcacttccttttggcataaatttacttatctgtgaaaagaaaaagttgagctaaggtcccttctactcattctgtgattctaaattggatattttgagttggggaagagctatatcactgtttgcataattcctagagcttagcaaatatcaacaactccttcttttagtttatttgcactgtatatatatgtgccttttatgatttcagtatcttcatccatatgtaattatgctctgggtaaagttgtaaacagcactttggtaaaattttaaattctgctcttttcactagtcttatctcataaatgtttgcatatatattgtaaacttaacatttttctctgttttcacatttacctttcctaatagctgatagcacataataagtgtattaaaacatatacttaaaacatatttaaatatattaaaacatactgatacacatcctgatcactgggcaactgagcatctccatacttcagagatttttttatgtttttttgggccgtgttaccctagacatttttgtagatagayaattttttaaaaagagctcctcacacttgtagctcagttctgtgtgcatttcagtgcwcaaatgacttttgccactgctgtaaacaggaagaaacaaactaaggcaaagagcccagctaagtgaaacagagaggaacaaaagaaaattagaacttggcttttgytgctgccaagctgggcaaatagcgatcccagggagcctggtgttaaataacaaagaaagcagggaacgaggcagaaatcccagtgggatctgaacggcatcttcagatgcttggctgcccctgccacactctagggagcatctgatcacctgggaggtatggtgacctttggcttctgacgttgcactggtcagaccaaccgtctccagagagctaagccatcaatcatcccctgaggggagacagtcaggctcactgcctcaccgcctcgaagcatccacaaactgaattagctaatgctacattattagacatttctgcacttttcatttatattcagaagcttggaaattttcaatgtgtctttgggggaaaatagtttgttcaaccattataattagattttctaccccttatctagataaatgaagcgtaattgacactttccccttctaccggggaaagtgtcattgctgcttctgcatatgtgtgtgaactatttgcaatgcttgtttctcatggcttaccccagaactagggcggttattgggcaagaaagggaactatccattgctgaaactgggagtaacttgtgataaccaaattagtgactgaggcaaaagtctcagtcgatgagtttattaagccatcttaagggcataatccaggggaaaaacaaatgccatagacagacctgtggctgttattccaaagaagttttcaggaggtttagtatttataccttttcttaaagggggaaggcattgtagaaaaaggggcaggtaggtggtaaagcaaatttacggggtttttgtttgtttgtttattgagaaagagtctcaactctgtcacccaggctggagtgcggtggcgcgatcttggctaactgcaacctcccttcccagattgaagcaatcctcctgcctcagcacaagtgtgcactaccacggctgcctaatttttgtatttttggtagagacgggggttttgccatgttggcaaggctggtttgaaactgctgacctcaggtgattcacctgcctcagcctcccaaagtgttgggattacaggcatgaaccacctcacctggccaaacttgacatttttgggagattttatttagtgcccagtaaatctacattttgcatacggtaaggtgaatgtttgaagagaaaaaagggaataaaggaagaatcaattatgcagagtttttgggtaggtggaggaatgattgatctggtcttgtctttgttctayaccagggaagataagcttgtaattgacattatcagtgcggaatcgaatagactttagttttaagagctagacttagattgtaaacataaaattacaattggcatgtccttgtttatgggagggcagcaaaaagtttacttacctatggaggcagtcctgaggccttctcctctggataatgctagtaacagctcttcatttgaaagagggtgttgcatgactcagcctccaggcttaatcttttattttgcgtaaggagtttgggggtcttgagatttttttaaatattcccttgcacgtggttgtttgcaagaagtaatggcaaagcctggttaaagtggattcaatcaaaacaattttagtcatgatttaaattaccaagtaggaaaaatctagaggattctagaaattgtgtgtcagtttcaaatcctactgtgctggtcatatggaagtgaggaatattgataaagtaagaagcagtgcggtatttccagaggttaaatgcaaaccgattcattccatttcatttaagtatatatttctaggctttggaaattacatcctatgatttttttaaaacttttctcccccagattctggctacattggagattggttgctttctaaaactgaaggagaagcccatgaagagatggtggattctcactgagttttgactagcggaagaaaaggtaattattgatgatttcggaatatgtttgcagtatcatgtggagttcagctgcagtagcagcaaagacaaaactgagagttttagacattttctgttataataacaactggtaccactctaatttcattgtgtgagatggactttttaaaaacaaaacttaaaatgttcttcttaaataagcttttccaggtaggtctacctgaggattaaggtgttaccatcaaagcagttgactcctttccttagaccatgttcctgggcctgattcccagcttgttctgtgtgacagcctcacatttatagggattatgaaagaatttccaagatagaggttacaggaagaccactaaagtgtaggaactcattttaatcacaggttccttgcttgtccattctgaaagtatcagtttattttttctctctacttcaagttgctctgcctaatgattggatttatagttaaaaataaaccatatttaaattcatattgatctactttgttaggcaaattggtcctagggccaatgggtggaagatataaagaaacagatttgaattcagtataaggaggattttttgaacatctgactgactaatgaatgggttgcctggcctggaygaagctctccattgatggagatatttctattgtaaaccaaagattaaattctaagccaagtgactgaatggaacatcctctcagccaagggacccaacaaaacctgaaaaattagttcagatcatgatggaaagggagggtcaggcatgcctcattacactctcctccctttggagttcaggcaaacaactgaccagcattaacttttcaaaagaagacatacacgtggccaacaagcatgtaaaaaaatgctcagcatcactaatcattagagaaatgcaagtcaaaaccacagtgagataccatttcacaccagtcagaatggctactgttaaaaagtcagaaaataacagatgccggcgaggttgtggagaaaaggaaatgcttatacattgttggtgagagtgtaaattagttcatcgtggaaagcagtgtgacaattccttgaagaacttaaagcagaattaacatttgacccagcaatcccattactggctatagacccaaacgtgtatacattgttctgccataagggcacatgtacacatatgttcatcacaacaccattctcaatagcaagacatggaatcaacctaaatgcccatcaatggtagtagactagataaagaacatgtggtgcatatacactatggaatactacacagacatgagaaagaacgagatcatgtcctttgcagcaacatggatagagctggaggccattatccttagcaaactaatgcaggaacagaaaaccaaatacygtatgtactcatgcataagtggaagctaaacaatgggaacacctggatactaggaggggaacaacagatactggggcctacttgagagtggaggcttgggggagagaaaagatcagaaaaaatactcattgggtactacgcttmctacctgggtgatgatctgtacaccaaacccctgtgacacacagttttacctacgtaataaacctgcacgtgtaatacccctgaacctaaaataaaagttaaaaaaaaataaaggtcctaagactgacagaacagtaagataccaaattccaacctgactctactgtagcatcatatggtccatagcaggcactgaaaacaaatcacagtattttatccctttgacatattttgaaatagctttgtaaagctgtttcttttgggagaaatttacattccatagagaatcctttccctttccaggtcttttcctaatactgaagagattggctgagagtctagcaccttttaacggtctgcataggaagcattgaccatctattgcgtttgggggcagccacctatgagactatgagacttcatctacataagaacttttgyctccacaacccccatattaacccaaacactcctctcctttctgtttattccaggtctttagacaataacttaactctttcaaccaatttccagacagaaaatctttgactccacctatgacctgtaagcccccaccccccaagttgtcccgcctttctggatcgaaccagtgtataccttccatgtattgattaatgtcttctgtctctgtaaagcacataaaaccaagctgtaacccaaccgccttgggtacatgttctcaggagctcttgagtctgtgtcacaggtcatgatccataaccttggcaaaataaacttctaaattgactgagacctgtctcagatactttttggttcacactatagaaactctgtgtttgtctgacaaggatgttgctgcagaagagcctccctgaactggagttggtcaaactgaatcttcctaggtctattttaaccaaaaggaattctacagtttctctattgatggcccaaaggaagcagagttttttggagtttttttcggtgggggtggttggctttttgttttcacacattaaaaaaattacgcaaagatgttcaactcaattatggcacttgtaatttctggtgcttctgtcatgatttggggtgactttcatgaaatgcttattctcaagcatatttcctgaccagtgtgccatgaggttagagaggctattcagagtgaggatgattttgtgcttccatggtgaagtgcagcacagaggggttctctggggcaagttgggggagcccagagtgcatggagagtgagggcctggcrcaggctgtrtttggatcctaaggaacctcttagtgcaggtgaatcagggtaaatgacaatgaaaatctgcccgagggagaagatgtgatcaaagtatgtgcaaagcaagtgtgtgtgttttgctaggttgggagggagaagattgctgtaagttgaytataataagcctgtgtaaaccaaaaataaaattctaagcccctcagccatctgaatgaacccctcctcttggccaaggccattccaaaattaacctgaataactagttcaggccctgatgggaagggcgaatcagacatgcctcatgataccctcctcccttttggaattcagacccagctgaccagcattaagatgaacacagaccttaagactgatagaacagactctttaagtctaataagaaacctttacaatcagttttctgaagcctgaagcctgctacctggaggcttcatttgcatactaacaccctggtctccacaaycccttatcttaaccagacatcccttcttattgattctaagtcttcagacagtaatttaactctttcagccaatttccaataagaaaatctttgactccatctatgacctggaagccctcacccccactcccagcttccagttgtcccacttttctggaccaaaccattgtacatcttacaagtactgattgaagtcttatgtctttctcaaatctataaagccaagttgtagcccagtcaccttaagcacatgttctcaggatcccctgagcctttgtcatgggcccttggccactcatatttggctcagaataaatctcttcaaatgttacagagtctgactctttttatcaacacctgacttagaatctcagcaccatctttggacccacctgctctgctacctttgagcccttagtttctgcctcccttggccaactctccccattaaccattctatgaggacaggtgaatagtcattaaacatgaggtgaagcacagtgttttttgagaacatctgaatgtcctgtgaccattcctgtagctaacatacacttgaacctagaaaagcatatctgaattgtaacagaatttgtatactcctctttcttcaccaagcctgtctaattccaggcagaaatgtttctccttcttccttctaaatgcaacatcattttgtcctttgcatgtttcattggtttggttccttttattaattatgtaataattatggtttggttccttttattaattgtgtgtaaagggtatctcctcactgatcactagacgataagctccaggaggaaaaggatttctttctgttttggttgctactttatgccaggaacctagagcagtgtctggaacttagtaggtgcttcataaacatttacttaatgagataacaaatgtgtctctctggctaaactgaaagcttcttggggacaagaagagtctcttcgtctgtgacttcatcattgggctgacgcagcagctgccttctcctctggctatgggactgtgggctgagatacctacacgtgggctactctctcaaaagggctgaggagggggygtggtattggagctgtgttggtgactagaggttaagatctgccaacctgctgcttaaggcgtagaagattctttccaagatgcatacaaatgagatttggaagagatgcaaagcccagagccagcatgggtgtccatgctaggaccttttactagctaggatcaccagcccctcccaggaaactctctgatgggctgagggagtggggacaggaagggcgtgtgctgggtgtcacaacagagccttcccttcaagacaggtctgagcggaagtgtgtggtaagtcacatggaggcagaaggtctgttcctgatcagggttaaggtgcccctttggtctcccttcctagcctgtgtaagaagccctgcatctgttgaaataaacaaatgcgacaaggaagcgcagaagcagcaagccttattgcaatgtgcctagtgtggtttgtagcaaggaggaagtcctgctggtgggagcatccagcccagctctgatgatctgaaaccatctttgagtaactggtgcccagagggaatgttttactttttggctgcttttcygacgtgatcattaggaaagagataggcacacttttgcacaacttctatgctaagcttctttgtctggaaaggaaattttagttgcaaggacttaaaatttccttcttgtgagctgatacttttgagacagtcaagaggatgttaatttaatgaaatcatgaacttatgcttcttatctcctcctcctcctcctcattcttctctctctctcaacacacrtacayacacacacacacacacacacacacacacacacaccattccatctttagaggtcatcatgcctttgcatgtcatgctttgtgctgtggtggctggagactctctttccatcaccagctrttccctgggctgtcattctgtgtaaaatcctttctgctgacttctcatccttccttgcctgcacgtgccctaaatctcacttttctgcccatcctctttggctcatcctcttctcttcccacacaattcccttctcccagtgccatcctccttcccagttgtaccagtcacagccccattccctaccatgccaattacaaatgcaacccctttatgacagcttcctgccccacctccacagggaactcacctctcttccgccctgcagtgctctgagcttctcccatggactttccgtctcctgcccctgagccagttgtttgtgaggcaagcccagcaggtagtgtccatgcctgctggttgccttctccttccctcccactttctttgctattttttttttgagatggagtctcactctgtcgcccaggctggagtgcagtggtatgatctcagctcactgcagtctctgcttcctgggttcaagatattctcctgcctcagcctcctgagtagctgggattataggcacacaccactacgcccagctaatttttgtatttttagtagagacagggttttactatgttggccaggctgatcttgaactcctgacctcaagtgatccacccgcctcggcctcccaaagtgctgggattacaggcgtgagccactgtgcccagcctctcttgctatttttgatttgccctaaactccatcacccttcttaaatgcatggtacactttttacagcataaatatttggtgatagccctgaggctaaagtgcaagatcacagcacgcatcggggcccatttggtgcaggctcccatcccacggccccctgcccatgcgccatgctgtagcatgtgtaattcctatcaactttctgaaaatagcaggctccaggcctcgtgttgcatactacctggaacaccttccctcttccttctcaactggctgcatctgactgatcactaaagatgccattcaggtgcctcctccaagaagctagctgggtcatatgcacctccactggtgggacggggagagtggacagaacrcctatganaacatgtgccagwctgtatgtttctggtgctgatctccttgactaaacagacttttattattactgagataggatcttattctgtcacccaggctggaatgcagtagcacagtcacggctcactgcagcctcaaccccttggacttaagagatcctcccacctaagccccccaagtggctgggatgacaggcacatgcaactatgccgggtaatttttaattttttatttttaggagagataggatctcgctatattgccgagggtctcgaactcctgggctcaagcaatcctcctgcctcagcctcccaaagtgctgggattacaggtgtgagccactgagcctgacctggacttttttttttttytaattttagattcagggggtacatgtacaggtttgtgacatggatattctgtgcaatggtgtagctcgggcttctgtaaacgaacttctgtaaaggtggaactggatccctgacctctagcagtgccacccaacagaaaggtatttagaaagtggctggcttggcggggcatggtggtgtgtgcctgcggtcccagctgctcaggaggctgaggtaggagaatctctagagcttgggcagacgaggctgcagtgagccgtgatcagcgccactgcactccagccagggcaacagagtgggacccccatctcaaaaaaaaaaaaaaggaaaagaaaaaagaaaaaaaagtggctggctttctaatcattcatcttcagactttccaatctgtactcaatgcttttggttttaggtttttgtttttctaataacatatttgatgaagaagtcccatctgatgcagaggagacttgcatgtggaaaggagttstcactatttcttaaattgtggcttcactggcttcattacctgcaccttctcttctcacaaatatatgtcatttttatttaccatgacatttgagaatttagtaaaagttagtggagcaagttagtccccttagttgcctacaagcagctctaaacccaggtgtttttttgttttgtttgtttgtttgtttgtgacggagtctctctctgttgcccaggctggattgcagtggcacaatctctgctcactgcagcctctgcctttcaggttcaagtgattctcctgcctcagccacccaagtagctgggattacaggcgtgcgccaccaygccaggctaattttgcatttttagtagagatggggtttcaccatattggccaggctggtctcgaactcctgacctctgttgatccacctacctcagcttcccaaagtactgggattacaggcatgagccactgtgcctggccacccaggtgtttttaattttatacacaggctgctacaagcaaaccaatgctgggagatggtcatgcagctcaggtcaactcagggtaccctcaacctaaaatgtgagaggagagctgcagaagcaatggacgagaagggagcaggggttttaatatcccccacacatcttccagcttctactctgctcactaatttcattttggacaaaagcttgttgattcttcttactcaggctagttacctgcattatactgaacagaattcctccagggaacagcctcttggctaaatcaacatacacctgccattcacagatgcagggtttctagcaagattctagagcagggtccccaacccctgggccatggatcagtactggtttgtggcctgtttggaacctgcacagcaggaggtgagcggcaggtgaacgagtgaaacttcatctgtatttgcagttgctccccattgcttgcatttccccctgagttccgcctcctgtcggatcagcagtagcattagattccataggagcatgaaccctattgtgaactgcgcatttgagggagctaggttgcatgctccttatgagaatctaatgcctgatgatctgtcactatctctcatcacccttagatgggactatctagttgcaggaaaacaagctcagggcttccactgattctacattatggtgagttgtataattatttcttatatattacaatgtaataataataaattgcacaataaatgtaatgcacttgaatcatcctgaaaccatccccctcaacccctggttcatggaaaaattgtcttccacaaaactggtccccagtgccaaaaaggctggggattgctgttctagagcctttgtctttcagataaggtagaccctggcttcacttctaaaaggaagataaatgactttctagtgatatttgcccattttagacaaatgtttctgcaccttagactgagggcaggtaggcaggatcattgctggggtggcttcctgcttgaacattgtagtttctttgagttgaaggtagaacattaagatgtgatcactgaaggaggagcatcaagcacaaatgagctcctgatgtagtttacacagcacttgggtggaaagggccatccctttccctctttccttatggaattgggaatccgacagtaagtggccaatgaaaatgtatcctcgctggtcacagtggctcgtgcctgtaatcctagcactttgggaggctgaggatggaggatcgcttgaacccaggggttgagagaagcctaggcaatatagtgagacctgtttctataaaaaaataaaaattagctgagcatagtgctgcacagctatagtcccagctacttaggaggctgaggcaggaggattacgtgggctccattgcatggagtccaggagtttgaagctgcagagagctatgattgtgccactgcactccagcctgggcaagagtgagaccctgtcattctgacccaggtgttaytccgagcagcactgacagcattcagggctaggtcatgcttggttctcttggcagaattttttctttggtttggggatatcgcctgtacatgacaagacaaaggggcaggaggaatggaagccttccagcatcgttcacattgcatgcttggaaacactacttgggggtggaaagtgaatgcatctttgtggcatctgagttcccagcaaagggtgtctgctgagctgaaggcaaaaagggaagggggagaattttatagaataggacatctggggcactcacatggagggagatttaatactatttagtccctggcattatttctctttccttaagtttacactttttaaatttgaaattgagaaatgatcacatttaaatagcaatgattaaacatgtagttgatccagttactttgtcatcctttatttagaaatgtccgtaagtaagtgatctctagtctaggaggcagatgggttctgatgacctgggaagaactctgttgttaccaaggctaaatctccacaggwgtttccaagacccaagggtcacagctgtgtgccagtaggaaaagaggggtggaaaatcgactccaaacggccaaatgggcgttacatcctaggcaaatgccaacctaaatgtagccctttgtgtggtcaaggctgttgtcaaaagcagaaaaagctagctctaatttctccaaaccaatgtccagctcagtgttccaactgccagctgctccggccccttaaggtgataactcagggcccagagtgacctctcttgctccattggagccagccaaacccttgtggatttttttgtacttacctttgacaagaggaaatctctgcaaacctctgtgtgcagttccagaaacatgttttactttatcatcatgctcaaanactgctttgtaagctctctgcattgggggtaagctggttagcatttacctagtatttgtgtttattaagttagtctttgctctcaaagagtttatattgtgcgtgtgcgcacacacacacacacactcttttttttccacttaaaaacagaagaatgaatgagtgtgtatrtgtttaggtgacactgagaggtaatgttaccaaaacaccagtggttcggtcttgatcctgctgctgttcaccacacagaaagccaatcactgagataatcagtactgccagggaagaaggctttattcaggtgctgcaggtgaggagatgggagatcagtctcaaatccatctctctgactgactaaaattaggggtttatatagcagggaagaaatgtaaccatgcatgggaaacaggaattagagagaggtaaggatgaggaattggtcaacaggaagcagggggtcagtagttatcatgatgggtgaggggtctggtgttttattgcccagatgcagtaatctggtaagtttcagctctgtgatactatctcagaggactgatggttggtttcctgagaaaggagctcagataagacaaatgtaactttcttatgtttcaagactgggaagggtcaatttctatgtttattcaaaagaaaccataaacatcagttctatgggcaattggactgatcagtcatgtagcaataagatacccatgaatacatctttactatcatgaacaagtctttgtgtaacacttgggcgaagactggaggaaacggtatggtttttctattgggagggtggataagggggaaaaaatcattagttttattcttagaacagatgagggtgaagatgtaacacggtttgatggacaggaaatggaaacttgctacagtgggactggtggaagagcagaggtgtgctttgtgaggttctgggggtctgtgtgggtgggagtaacatcctagcctggagagggctggtttcttcttgttctttttgttttgttttgttttagagacaattgcagtgcagtggcacaattgtagctcactgtaacctttaattcctgggctcaaatgatcctccagcctcagtctcctgagwagctaggaccacaggcatgcaccaccatgtccagctaattggttaactttttctttgcagaaatggggtcttactgtgttgcctaagctgatctcaaactcctaacctcaagtgatcctcccaccttggccctgcaaaattctgggattacaaacatgagccattgtgcccagctgagggctggtttctagaaatggtggtatgccaggcttcatactggggtcatgcatgtggactgggctcattggcctgattgctctagcaatatgtggggtaggaagaatcatgccccctctctcctcctcttcgaaaaatgtccacatcccaatccctggaagctgtgaatatgttcagttatatggcagttgggaattaaggttgcgagtcagctgtccttgagatggggagattatcctggactatccaggtgggacytttgtaatcgcaaaggtcctcggaagtgaagaaggaagtcaggagagtcagtgtcagagtgatgccgtgggacacagtcttcagggctgttgctgccttgaagatgcaggaaggggccgtgagccaaggaatgcaggtggcctctagaagctggaaaaggcaagaaaatggattctccttgagagcctccagcagaaatgaggccctgccaacaccttgacttgtagcccagtgagacccaaacatctaacatctaaaactataaataagaatttgtgttgttttaagtcaccacgtacatagtcatttgttacagcaagctatagcaaacaatccaaatggagacctgtctctggtttggaaatgcgagacattcttatttatttgtggaatataatataatggaaaatttatggaatataagtaactccaagaagattcttgtcaacattaattctgagatttttctaagctaatttattttactacagtaaggccaggaactttattgctttgctgttgtctcctcactgcctcgatcagtgcctaattcattcctttttgaatgaatgaatcttttctaaccaaactcatgaaaaaccctaagaaacaccccccactttttttgagacagaatctcattttgtcacccaggctggagtgcagtggatcacagctcactgcagcctcaacctcccaagttcaagtgatcctccccacttggcttcccaagtagctgggaccacaggtgcacaccaccacgtctggctaattttttaattttttttttgtagaaatcaggtcttgctatgttgcctagactggtctcaaactcctgggctcaagtgaacctcccgccttggccttccaaaatgctctcattacaggtgtgatccactgtgcttggccccaccttttcaaaaaaaaatttatgctaaattgtaaatgttaaattgaggctcttgttatagacaaggcatatcatacttcgcattatcattcaaagatgagaggcttaattagagaattttctacagttgggttttaacaagagccattcttaacttccttggggtctaagaacttcttggtacctacacatggttgaaatgttaaccctgtactttgctgcttagcaagactgctgtaatgctgatatggtttggctctgtgcccccacccaaatctcatctcgaaattgtaatccccacacatcgagggagggacctgatgggagatgattggatcatggaggcggtttcccccatgctgttctcgtgatagtgagttctcgcgatagtgagttctcgcaagatctgatggtttaaaagtgtttggcagttcccccctagctctctctctctctctctctctcycccccctaatgccatgtaagacgtgccttgcttcccctttgccttccgccatgattttaagtttcctggggcctcccacactatgcagaactgtgagtcaattaaccctcttttctgtataaattactcagtctcaggtagttctttatagcaatgtaaaaatggactaatacaaatacatagcaagttaggaccttaagtcagtgattaaaaaaaaaaagtattcattatttgtgaaactcagcttggaatatctgatattatttactaacatataattaataatcattgcatggcatcttttagaataagaatatttctagtgtagatttatttctttactcattctctaaagaaatctttgctaaggcaggtcacagtagctcacgcctgtaatccccgcactttgagaggccaaggtgggtgaatcacctgaggtcaggaattcaagacaagcctggccaacatggtgaaaccccatctctactgaaaatacaaaaattagctgggtgtggcggtgggtgcctgtaatcccagctactcgggaggctgaggcaggagaattgctttaacctgggaggctgcagttgcaatgagccaatatcacaccactgcactccagcctgggcaacagagtgagactctgtctcaaaacaacaacaacaacaaaacaaaacaaaaactttgctaagatcctgctgtgtgccaggcactggagaaacaaagataaataamcaagatatggaattttttccagaggaagccacattctagatgcaaagaaagataagtgagtagctcaagagaacatggaatagcagtgctaaaataatttagggtgccaagaggaaggaacttcccactctgcaggaagagtgcagcagagaggaggagatatttgaacctagtactgaagcacaaggaggagcatagcaaatgaaagaaataaacattattaattgcctactgaataccaggcaccatgctgggcacttatgtgcgtaattttattatttaatttttaccctaaggaaaattggatttagttaagtaactttgcaaagccacccagagtggcatttctatttttttcttttttctttttttagagacaggatcttgctctgtcgcccaggctgaagcacagcggtgtgatcacggctcactgcagcctcaacctcctatgcttaggtgatccaggatggcatttctggttattgtcttagaaatcattggttttaacactctagaggagagactggcagacttttctgtaaagggccatattataaatgtttcaggttttgtggaccatacagtctttgctctaattattcaacattgccactggaacatgaaaacagccatagataatacagaaatgaataagcatggctgtgttcgaataaaaytttattggcaaaaattggcagtgatgtggcccacaggttacagtttgctgacccctggtctagaagagcaattacaggtaccattttgtttggagatatttctggagagggagcctataggtttcattagcttcttaagtgggtcagcgactactgggatttctggtcagtgacagtttcagaatgtattatagaacctcacagagaaatgatagcaggctggattaataatagagattcagactgacccaattttctagcattttacatcataaggattaatattttacagacctctgagaatccagatataatacatctttaggtcattagagaggagtccaaagagaaaaccacactagttcagtgttggcagaggatttgacattgtgtggccatgtgtatattttaacttggagatttaaaaaaataggaatagagatgatatgtctggagccattggaaagaaataaggtaaatatctgaatggatgacctaggagaagcctagagtatacagcctcaatcctgctgtcttctggaaagacgcagaaacagctggttagtgtagcaaggaaggggatatgtgatcggaagtcccagcttcagtttggaaaagcagaatgcatccttgacatcttaaaacaataagccagaaaaatctgtcttgaatagttgatactgtgggaaaagtcactaagttcagagattcgagtaaggaatactttagagcaacacagcgaattttcttttaagaacggatctttccaaagcatatcctaagagatgtagtgtggtgggaaaacacctgggaaaaccaataaaggacttccaaaatgttattgaaaggaaacattgggaagctgttgaaggcatctatcccggggctacgtgactaagaggagatttttctcttggctgataatggaagggtggataagtaaggttactttggggagctaatttcttttgagtaaaacttctcaaaaatgaaaagcagatgaagttttaaaggtgggttcaaggtttggacggttccagctggattgaaacattttctctccaacagaggaaatagatgaaaagtgaagtcggtgcctgcagtctctggggtctctgcgcctggtgttccaaggaggattttgatctggtccctcatcagactctgttgttgctcttagggttggatgggaggaaagaggaggaaaagatggaaaatagaggagttgttggactcctggaagaagcacatgttagccagccacagttactccaatcaaaacaatttaaactttcccttccattttgaatcctgggcacgattcctgtcttggmtgaaacagatgtgattttgggacatgtacaaaatcttataatatggaggctgagccttgctggctttcctgccactgcacttcactctaacttgcagggatcaattccataccgttttacattctcttgttgtttctggcctctttctagatgaaatgcagcttcataaaaactcagagtttcctgaacctataaatcttagagcagctgaagaaaataatctataaagccgataaatgctttgatatggattatgtcaaacaaacgatgtttacacaaaagactttaacatgtagaccaattaaagattcttgtaatttgacttctctttcccatcagactaagcctttgtatcacagaaatgtgacagaaaatacccacactctgcaacctggctgacatacttttgttttagcaagggttaaataaaggggctcttcaaagcattgttgatctattttataaagctttgaagcttttattagctttgctggaaatctttgtttcctggaaagttctctaatggaatatatcgcttctcacagaaatccatttcttaggtgtatatagtcagtggcctagttggtggagatgctattacaagattaaattaatatctaaactggtcctgagtcaactatttccattctaaaatgtttaaagtcttaaggtttaaaactattggggtcaaattaaccttttctttatcttttttttttttgagatggagtctcaccctgtctcccaggctggagtgcagtggtgcaatcatggctcactgcaaccttgaccttttgggctcaagtgatcctccctgctcagcctcccaggtggctgggactacaggtgcacaccaccatgcccagctaatttttaaatttttttgtagagataaggtctccctgagttgcctaggctggtcttgaactcttggactaaagtgatcctctcatctcagcctcccaaactgctgagattataggcgttgccaccacagccggcaactttcctttatcttaaatcatgtcactaactcccagacagcaatatcaatacattttccagcaattcaggtggctgctaacctgcttcgtcccaacatctcgatctccatctccatcaacggcaccttcgttcactcagcggcccagtctggccacttctcagtgcctccactgtgacctcccagcccagggccatcatctctgtcaggatggctgtgggggcctcctatagagctccatgcttcttctcatccacctccctgtctacccattccccaaagtctgttttcctcagagcaactacagtgagtctttaaaactaaattgagatcatgtcactctcttgtttttatccaactggggcttctagaaactctcagaataaactccaaagtcctggcccagagcctgtgtggccagcactcagncatcactgaacagcacttcctgctggttatccgggctctcttcctttcactcactgcacgccagccaaactggccactttgcaagtttcgtgcacagaccagtcatactcccatctcaagagatgggagttgatgcttgttctttcctccagcaaaactctccctgcagatgtgccccagccttcttccccaattcttctggggctctgctcaaatkgtanctcctcagagacacagaccactttatctaaaacagaatcccccatcctcttaatctacttccccttccctgctcttatcagctgacattcagtctcttagggatcaatacatgtatttgtccattcatttatttatttgtcagttactcccaaaagaatgtgagctccatagagacagggacattggtttatcattgtacctatagtgcctagaacagtactcagcacacatgggcaaccaggagtattgactctagaaaaaaactggaatccttcacattgtttttggtctgggtgtgtaggctgaatcatagtgcagttatgttttttcaatagtacagtaatttgaaaaaatctttctgctccactaaaggtttgccatttgacggtcaagatttatcttagatttggctgggcgcrgtgactcacacctgtaatcccaaccctcagggaggccaaggtgggtggatcacctgaggtcaggagttcaagaccagcctggccaacatggtgaaactccgtctctactaaaaatacaaaaattagccgggtgtggtagcacgtgcctgtagtcccagctacttgggaggctgagacaggagaattgcttgaacccagaagacagtggttgcagtgagctgagatggcgccattgcactccagcctgggcaacagagtgagacttcatctcaaagaaaaaaaaattatcttagattttacttcttgcctgaagattttagcagtaaccttggcttactttcaacataattaaacatttggattgcagtagctgagtatttcagtgagttagtggttttgtaggcctcatctgtgtagacagacagctastggatcctttctgccttctttccttggtgatgagcaggtgcatacttagcatgaggagaaaaagccccatattcctctgttttttctttttttgagacagggtctcactctggtgcccaggctacagtacagtgctcctctatttttaatacaagagagttcccattattatctaaacactcagaggtagctttaagaaattttatatggctaagggagctttattctctaaaaataagctattaatagtcgtcctgtaaatatagggtgagaataaattggacctgggagttagtaaaggaagttagacacatggtttgtagaaccttgtagaagatgacaatagccctattccatgagataattttattggcatcatttctctgagctgcttttagaaagtcagatttattggtatataactcatatataataacgttgcctctttttagtgtacagcttatttttttttttttgagagacagggtcttgctgtgtcacccaagctacagtacagtggcacaggcatggttccctgcatctttaaagtcctgggctcaagcagtcctcctgcctcagcctcctgagtagctaggacagtaggcgcacactgcaccaccacacctggcttatttttattctttgtagagacatggtcttgctatgtttcccaggcttgtcttgaactcctgatctcaaatgatccttccctctcaacctcccaaagtgttgagattacaggtgtgagccactacacctggcccaggtgtgttttgagaagaccataccattgtgtagccaccgacataatcaagatgtaaatatccatcatcctgaaaaagttccttgttgccccgtgtcatcagttcccacactcagcccccaaattctggcaacgactgctgttttctatccctacagttttgccttttccagaatgttatgcaaatggagtcacacaggatgtcttttgagtctggcttctcttaagctgatccacattgttgtgtgtcaatagcagttcctttttgttgctgagtygtgttctattgtattgttgtagagtttgcttattcactcaccaaaggactttgagattgtttccatattttagtgattatgaataaaacaccagttccatttatgagcagatttttatggaaacataagttttcactttttcttgagtaaatacatagggtgtggagttgctgkttcataagrtaagtttaacttgatgaaaaaaagaagaaacacctgctaggctgtttcccaaagtacctgtgccacttttttgcattccaaccagcaaaatgtgagcgctcctacctccttcagagccttcaagcactaacaccctgtattagtcttttctcatgctgctaataaagacatacccaaaactgggtaatttataaaggaaagaagtttaatggactctatgggagctacaattcaagatgaggtttgggtggagacacagccaaaccatattatgcccagtgtgattttcctccttgaagagaaacctcggaayatgactttcccttttcttcccctcaattttgtgttccaatcccttctacttagaactttaaattacttttatttaraagtccttctagcttcactattgccggagtttcttttttccttctctgcacataacacagtgtgttgtactcaggagatgctaagtgcacatctgtttctcttgggtgtagtaaactaagtaaaactgagctcaagggtaatacccacccttagtgagaccttggygtaagtgtaccaggctcacgggtcgtctgtacgaggcagtggactcctatcccaagatctagggagagatccctatcacgtctttccaggcaaaaaggtatccttaggtgtgggatataaaactatgttgggacttttgcagtgacaaagatcctttttgccccaggcagagaagtcagatgcaaatctctatggttattaaaaggcatatagatttatcttggagatactacttaggatgtcgtgaaatcttgtgaaaacctttttacctctctcaaagctgttgtattatttttttaaagagtggaacatcagagcataatggttaggagtaggccaggtacacggtggctcacgcttgtaatcctagcactttgaaaggctgaggcaggaggatcacttgaggccaggagtttgagaccagcctgggccacatagtgaaaccctgtctttataaaaaatwaaaaaattagccaggcatgatggcatgtgcctacagggctagctactgttgagacgctaaggagggaggatcccttggtaacatgcatccagaaggcatcacttaaaccttgagaaaggaggtgaaagtcatccaggatcaatcaggacccatccccttttttcccccgttatgggggttgataggcagagagtatgaagagtgaactggagcccttagtgtatgtttgtcttaccaaacatagtttgcatagcagtagggttttttgtttgtttgtttgtttgtttgtttgtttttgagatggagtctcactctgttgtccaggctggagtgcagtggcgcaatcttggctcactgcaagctccgccccctgggttcacaccattgtcctgcctcagcctcctgagtagctgggactacaggcgtccgccaccatgcctggctaatttttgtatttttagtagagatggggtttcattttgttagccaggatggtctcgatctcctgacctcgtgatccaccagcctcggcctcccaaagtgctgggattacagacgtgagccactgtgcctggccagcagtaggtttttaagtctggtattagttgtccacctagacaaaaaagagcaaggcctagcataataatttattttcatgaaaatgtgcacctatgaagtcagtagagagcaacagaaaatatttgccttcgccaggtgctgaattgcatggattgcaactgtatgggattcaggagtccagagagggatcaacatatcttgagacaccacgattgctttgactctactgcaagctcctgggaagaccatcgtttgcctccctttttttttttttttttttttttttgagacaagatcttgctctgtcacccaggctggagtgcagtggtggcaatcacagctcactgcagcctcgaactcctgagctcaagtgatcctcccatctcagcctcctgagtagctggcactacaggcttacttaaaaaaattttgtagagatatacatagggtctcactatgttgctccagctggtcttgaactcctggcctcaagcaattctcccacctcaaccttctaaagtgctgggattacaggcataagcccttgcctctttcttagttctctttttattgaggtgcctacatgaatagtgtctcctggacctttctgtaaaaatacacttatatgattgtatgatttgcaaacttcttcaggtttgaggacagttggaggaaatcatggtgttctttgaggcacactgaaatgttgaaatgttgcattctgtttttctgttttacgacttagctcattatatgctttatcatcatatatacaaatgtatgcatccatatatgtatgtgtgcatgtgtgtgtgtgtgtgtgtatatatatatatataaaattacgaaatataaaattgactcttctctaatgggtagatggttttgttgatttgacattttatttatttactttttacaaatgttcaaataacaacagttattattattrttattcctgtggctaaaccaaccctggatggctgagaattaattagctgtaattgttatttataatcaagatcaggcatttggcatgaattaaggagacagggagaggtcgctgagcttgaatccaggcagccagaggtctcctgctatagacaatattacatcatattcacacatgcatgtatctgtcacacaccaacctgagtttttcttcaatgtttgctacttatttattcattttgtgtttgctattaagcaagtggtaggagccatcaaaaaaaacatacatttaaaaaaaattatgaatatacattttgaaaaagtgtatgagagattcttaaagttgagaattctgcccattaactcaatttttccacttgtgattttggttaataccatatccttgaatcagaacatctcccagggttttgcaggagtgtactaaaaaatgtatgaggacctgatgtgtccttttaagaacctgtgctgtcatgggatacacgggaaggtcatccaatggcagcataaagaccatcaaatggggaacgtgtcccgtaggaagatatccccaaggacagaggggtagtggagtttctggatctcaccagggaggattgtggttcttattttagctccctctccttgatgtgcccttggcgtcagttgctattttgactgtgagcatcttcttgcagttgccgatgtgctgattgccagcagcactcaccgggagaaccagcggctgctctgcccactgcctccctgtcagtctttccgcatctctttgttgagcatggggctcatgcccatgaaacactgaaaacatacagtgcaggagaagagtcccgctgataaaaaatgagtctgattttagagggaaaagtccatatggaatataggcgtctctcaaccagggcatggtggctcacgcctgtaatcccagcactttgggaggccaagcagggcagatcacttgaggtcaggagttcaagaccagcctggccaacatggtgaaaccccgtctctactaaaatacaaaaattagctgggcattgtggtgcacacctgtaattccatggacctgggaggcggaggttgcagtgagctgagattgtgccactgcactccagcctgggcaacagagggagactgtgtctcaaaagaaaaaaacaaaaaaaagaaatataagtatctgttgattgagaggtaaagtacagaaaagttgtcaccatcaaatctaatatgttcttcatagtggaaactaccgatgtttacttactgaaaaatccagtatttggaacaatattcaccattctatagatactgtcttactgtgtaaaaatattacaagtctaggatcacaaagtcttctatagttttcttgacaaataaaatgggccattggttagtgctcttaaaatggtctattcttttattattactattatttaagagacagagtcttattctgttgcccaggctggagtgcagtggtgtgatcatagctcactgcagcctcaaatccctggcctcaagcaatcctccagcctcagccttccaagtagctagggctacaggtgcatgccaccacacccagttaattttctttacttttttgtagagatggggtcttgctttgctgcccaggtgggtctcaaacttctggcctcaagtgatcctcccgccttgggctcccagagtgctgggattacaggcatgagccactgcacctggcctattatttgtccttcgtccaagtgttccgtgtgtgtgtgtgtgtgtgtgtacgcgcgcacatacatccctgctgccctgtcttctaatgccagcttcccactttaattgttgctcattgcttctaacttgcctcacacatgtgacagtccagtcacttactagtggctttcccatccatgtgtttgcttctggaattattgctgtcagaatggcaagccttgggcactaatgtggtaggcagctatctgaggggtgatggatgcctggaactactccagacacartgatgtctgcaggtcactgtgcagttccaatcaatggggaccttctctaatggggagatggtcttgttgatttggcattttatttatttactttttacaaatgttcaaataacaataatgattattatgcttattggtattattattcctgtggctaatccaacccttgatggttgagaattagccatattgttatttataatcagcatcaggtgtttggcatgaattcaggagacagggaggtctctgaggatggatgaaggcagtcagagaagctctcctggaaactgggggcatccaggctgaatcctgaaagatttgtatgagaccggggaggaagtgcctaaggctctgtgaaaatgtctggaagaaccaggtttccttgctaaaggcatctagggaaaaaggttggagaaagaagccagaataaaagttgggtctcatggcagcatcatccctgaggtctgcagtgggggttgttggctgcttggtgaagagggataagttgctgctcaatgccccagaactagaggcacttgctactctagtagtttggtagtatgtgaataaaactcactggggccgggcatggtggctcactcctgtaacctcagccctttgggaggccaaagacggaaggatcactttaagccaggagtttaagaccagcctgagcaacataatgagactccatctcaaaaaaaaagaaagaaagtttatttgattttcagttctagaatttggaaaatgaaaataaaaactcaccagaaacatccattcactgtgagcacctccatgggcaccatctgtcaaagcacaggcttgaaacattaacctaaaaggatgcctttgtctggcatatctctcttccagatgcaattggtctagatttagtcccagagtctagtcagagtttttgcacagggggttggtaacctggtgaaagtcagtaacagtttgttttgtccggaaagaaatgccttggaaaggtcaagagagccccggagwgaagagacaagccctcctggtctggctccagcttagctagcatctcctcctgctgcattaatcatgctcattctcctttctccggtgccctgttttcctctggaattcttttctgcttttattccrgtttgactcgtttctcgaacttcaacctgtccctaaatttggaccttttcctgtttgtattcttgcttttttatttttcctaaatgatcctgactgcatgaaagctggttgatggtggggttttcctgtcaatatattctgaagttttactctctagtgactgaggttttccctttgtctttaagcaaaccagatttctaggactcaagtgtttcaggcacaggcttttttttttttttcttgtgagacggtgtcttgctctgtygccaagctagagtgcagtggcgcaatctcggctcactgcaacctccgactccctggttcaagcgattctcctgcctcagccttccgaatagctgggactacaggcatgtgccaccacacctggctaatttttgtatttttagtagagacggggtttcaccatgttggccaggatggtcttgatctcttgacctcatgatcctcccatctcagcctcgcagagtgctgggattacaggcgtgaggcaccacacccggcccaggcacaggctttttaaactccttctttgtccctgagctcatgatttcactgcagattttcttctatctggactcacagttgtagagccccaaggcgattgctgtgcacactatgagtttgagagcccatgctccagaggtcaggaggggaatgagccaggggaagacgtgagcgtctgggcagagattagcactctctttaagaagagggagggatgagaatgtttctattctgccctttcttcttggcttcttgtgattctcttggcccgttccccccaccagaattttgctctgtggcctaggctggagtgcagtggtgagaccatggctcactgcagcctccacctcccaggctcaagcgatcctcccacctcagcctccctagtagctgggaggtgtgcaacaccatgcctggctaattttttatattttttgtaaacacagggtcttgctatgttgcccaggctggtctcaaattcctgggctcaattgatcctctcactttggcctcctaaagtgctggaacaataggtatgagccaccccaccctgcctttttaattttttttttgagtcaagcaaggtgttgctttgttgcccgagctggagcgcagtggtacaatcgtagctcactgtaacctgcaactcctgggcccaaacaatctttcttcctcagcctgttgggtagctgggaccataggcaggcccagctaatttttaatttttttgyagagacaaggtctcactgtattgcccagcttagtcttgaactcctggcctcaagccatcctcctgcctcagcctcccaaagtgctgggattacagacatgagccactgtgcccagcccctgttttctttttgagtagttttctttttctttcttttgtggctggttcaataagagggtctccttttcctaagcaggcaaaggattttttaaaccagtttggagccctaaggaggagtcccaggggaaaaagagaggcttacattgwtctagcccagttctcaaggcatcaaagctttttagtaataaagagatttgtggaggaaagggaaaatgattttttttattgttggaacaaaaaacggtctgcttaaacccaataatttgtctgtgtttaccgcaaccatctctgtggcttacaagaatgagttcatgactgtctgaattccaccaggcagtggtgacaataatttattttttaaccttgtgggaacttcacatgggctgactcccctttgaccccgcacccatcacaagatgattttttcctagaagttgcctctggggctgggcttctggagatgaaccccattctctctatgcyggataaaccaggcttctgacatcctkcctgtggaatatttataaaaatgagcgccaaggaattcagctgtggtttcttgcaatgcctggtgtggtgccagctgttgcccagttcagagccctctgtgcttgagtgaattcttttctgactttttccggcggtaagaatacaaggaagtgctgagtagacaacagagaggagatgagaagatggaactcaatagcctaagacaaaagacttcccaaagccacgcttgttaaccactaaccagctgataaacgaggggctttcctctgtagtctgggattgcagggctggagccttctgtgttggggacctctcccaggctgagtcattaagaaccacacagagtgtcaaccctcgagtctaaagaatgactctgtaaccttgtgagtcatctttcatacaaattgcacctcgtcaggcaaaccacaaggggaaatgcatgtttgccttaattctactctggtacattctagcataggtggggtttcccctcactctttgaggaaaataaatgcagagattgtctctgcctggaatgcttgacatagaccaagtcatagccaaatcactcaccctgatgccttcggtgagttattccagtctcctaactctccacccagcatgtctttttctgtggaattgggtctttgttagttccatccaacttcgtgatgaatttcaacccatttcttattttctyagttgtccctttgtggcaaggctgctgttcccaagcctccatatttgttcttttgtttttaatttttttaaagacagggtcttccttgttgcccaggctgaagtacagtgatccaaacatggctcactgcagccttaacctcctggactcaagtgatcctcctgccttggcctcccatgtagctgggagcacaggagcacacctccacgctcagctaatttgttcaattttttgtatagacagggtttcactttgttgcagactggtcttgaactcctggcctcaagcagtcctcccacttcaaccttccaaagtgccaggattacaggtgggagccaccatgcctggccatccctatatttggatctgattttaaatttgaatttagaaagtactcatatttaccaaaaatgattcttgcttatagaccaaataatacaattttagtcctcccagaaaaataagagctttggagaaccattgcatagaaatgactttattcactgagtttacgatgaatgggaaaaatgcattcttttattgagcactttttataagaggtttaaaaagatactttaaccactgcctgtaatctgtagttgctgatgttgatgagtatttgaaagggaaaaagctctttggaggcagcagattaatcacagcagagtatccagtttcattcgtacgtgtggttgtcttgtattgtttgctattttctttctcagatttttcagtagagactttgtcctttttcagagagagttcaagtggatggccttgaggacttgaaaagctgagatatgatgattttgaagtcatttcacatcgaagccatgatttaaatatcggcgttaaggtaagtattgaggaaagaaatatgacacttttgtggttaacacattattggctttgcttgcactgttagaagagattaaagcacattgtgaagggtgattttgtttgaatcatgttcaacaaaccagagctcgaagaagattaaagcggcctctgtgatgcggtgtggaaccatagacatacaggagagctgagccactgtgatggttggaaatgtcttcatttttcctcgatggtcatgtgtcccagtgtgccctttatgaacttcaggaaagaacaggaaagcttacagctgtggttttctttctgagctgagccgtggctattagggagctttcggggagtgtgaattagataggacctttacataggagcagagccagccaaaggagtgagaacaggagcacccttctggaaactgtgctatttgacctgcctctctggagcaggagttctcaaagtgtgttccctggaacacagctccctacaccactaatacagtggggacctgggtcagaggatgggtctatgcctaagtgcgtttggaaagcattggattaaagttaaatgaccttcttcaaaactaatgagctttgtgartcttgatgggtgtgagtagtgggcagtgctcaccagagttccatggaactattttcttgtgaggcatcttaagaccagtgttccatttgttcattaaatattgattgcgcaccagccatggatggtgttagatgctagggatgcagcaaaaactgaggttgacagtgctcatgtttagataataaatacrttaacaattaaggaaaggtaatcattgagagacacaatagcaaatgtttaagagcctggtatctgcagctcagtggcttgggttttaatcctgggtttgacacttaataaactgcatgatcttggaaaagacatgtaacctctctttcaatttccttatgtgtaagatgcttataatagtattcactttgtagatactattattgcaaggactaaaattatgaatatgtgctggcaaataccaaactttatattaatacaagtgtcatcagaatatgtacatatattaatagtaattgttaccaaaacaccaggggttcaatctgggtcctgctgctcactgcacagaaagccaatgcctgagacaacaagtgttgccaaggaagaaggctttaattgggtgctgcagccgaggagatgggagctcagtctcaaatccatctctctgacwgaccaaaactggctatatagcagggaagaaatgtaatcatgtgtgggaaaacaggaactcagaaggggcttggaagcaatcatgttgaatcagcgtccacattttattgtctggatgtgatctggtgagtttcatttctttgatactttttttgagaggcctgaaggtcatttcctgaggaaggatctcagataaaacaaatataagtttcaaatgttaagaccagaaagttcaatttctatgtttatttattcttttttttaaaaaaaaaagctatatgggactgttgggttggtttcataatggctgagtactttgaaggttctgtggttgcatgaatggagaagatagagtgatgggtggggactttaaaataggatgatccaggaatgccctgaagtagagacttgtaagaatgagaaatagcaagttatgcgggtggcatagaaaaagcttccagattgaaaagcaaaggcaaagaggatgtcttgtgcagagaaagcatttgacaaaatcgaatgcctcttcatgtttttwaaaaaaaaaaaaacactcacactcggccaggcacggtggctcacacctgtaataccagcactttgggaggccgaggcaggcagatcatgaggtcaggagatcgagatcrtcctggccaacatggtgaaaccccatctctactaaaaatacaaaaattagctgggcgtggtgccacatacctgtagtcccagctactcgggaggctgaggcaggagaagcacctgaacagaagtctaaggttgcagtgagccaagatcatgccactgcactccagtgacagagcaaaactccaaaagaaacagaaaaaaaaaaaaaaaacccacacatacacactcaacagactaggaatagaagggaacttcttcaacctgaaaaagacatctatgaagaacccacagctaacatgacactgaatggtgaagggctgaaagcttttctcctaagctcagagacaagacaaggatatccattctcaccacttctgttcagtatttgtgaacagtaaattttaggtgctgtgatggttaatattaggtgtcaacttgattggactaagggaggcttagatgcctggtaaagtattttttctgggtgtgtctctgaggggcttgccagaggagattgacatttgagttggtggagtgggagaggaagacccacccttgctgtgggtgggcaccatccagtcagctgcccagcatggcaagagcgaagcagtagaagaaggtgggataagcagcttgctgggtcttctggctctgtttcctcttcctgtgctggatgcttccttctactcctcctgcccttggacatcaaattccaggttcttcggcctttagactctgggacttgcaccagtggcttgccggggggtctagggcctttggccacagactgaaggctgcactattgacttccccagttttgaggctttaggacttggactgaccactaccagcttctctcttccccagcttgcagacagcctatcatgggacttaccttgtaattgtgtgaggcagttctccctaataaattccctttcacatgtatatgtatcctgttggttctgcccctctggagaaccctaatacatttgtcaacctggctggattaaaaaacacctagatagctaataacacattatttctgcgtgtgtctgtgagggtgtttctggacgagattggtgtatgagtggtagactaagtgaggaagatccaccctccatgtgggtgatcactgtccaattgactccgggcctggatagaaaaaaagacaggggaaaggtctttgctggagytgcaacacttcttctactgcccttggacatcagagctccaggtcctctgtcctttggactctggcatgtgcaccagtggccccaggattctcagatcttgggccttagattgatagagtgatgccattggctaccctgattctgaggcctttggacttagatggagacaggctgccagtcttcctggttgtccaacttgaggacaaccggttgtgggacttctcagcccccattatcctgtgagccaattcctctaatacatttcctgcctacttctatatatctatcctattcattctgtctctctggagaaccctgactaatacagtattgtgctggaggttctagccagagcagttatacaagaaaatgaaataagaggcttccagattggaaaagaaaaggtaaaactatctttacttgcagatggcgtgatcttgtttatagaaaatttttaggaactcaccatactattaaaactaataagttcagcaagattgcaggacataagattaatatacaaaatcaattttgttatatatacttgtaatgaataatatgaaataaaatagaaacaataattygttttctaatagcatgaaaaagataaaaaacttaggaataagtttaacaaaagaagtgtaaaacatataccttaaaactataaaacatcattgaaagaaactaaagaagacctaaataactggaaaaacattccatgtgcatggatcagaaaacaatattttaaaaatgacagtactcttcaaattgatctacagatttaatgcaatctctgtcaaaaatctcaaatgaatttttttaattgacaagtagatactaaaactaatatggaaattcaagggacccagaatagccatgacaatcctgaaacagaagcacaaaataggagactcagcttcaaaacgtattacaaaactacagtaattaagatagtgtggtactggtattctattctattctatagaatagaattgagtctagaaataaactcatacattatttgtggtcaattaattttcagtaaatcagtggaaacaatacaaaacaatgccaaaacaattcaatggggaaaaataatctcttcaacaaattgtactggggaaactgtatatccatctgccaaagaaaagctggactcctacctcatatcataaacaaaaattaactcaaaattaataagaggcttaaaggtaagccttaaaactctcagaaaaagcatagatacaaatttaatggccttggattggatttttttaagatatgataccaaaaggacaagtgacaaaataaaaatagataaatgtatcaaaattagaaaactttgtgcagcaaaggacaatatcaagaaagtgaaaagggctatgcattagtccattctcgcattgctataaagaactacctgagactgggtaattcataaagaaaataggcttaattggctgatggatcttcaggtcatataggaagcatggttgcagaggcctcaggaaacttacaatcatggcagaaggtgaatgggaagcagacacagcctgcatggctgaagcaggaggaagagagagaagggggaggtgctacacacttttaaacaaccagatctcatgagaactcaccatcacaagaacagcaagggggaagtttgcccccacgatccaatcacttcccaccaggcctgtcctccaacattgggggttataattcaacatgagattggggcaagaacacaaatccaaaccatatcaggctgggcacagggactcatgcctgtaatcctrgcactttgggaggccaaagcrgaggattgtttgagtccaggagtttgagaccagcttggtcaacatagcgagaacgactcagaaaaaaaaaaaaaaggaaaaggaaaaaggcgattcacagaatgggagaaaatagttgcaaattatatatgtcataaaggacagtatctagaatacataaagaactgttaagactcaataataaaaagataatttgattaaaaaagggcaaaggattggaatggatagtcctccaaagaagatatgctaataactattaagcacatgagaaggtttttactatcattagccattagggaaatgcaaattataaccacaataaaaaacacttcatacccacaaagacggataatgacagttgtttgtgaggatgtgaagaaattggaatgcccgtgtttccaaagcaactgttttggaaaacagtccagcagttcttcaaacaattaaacacagatttaccttttataacccaatatatccactcctaggcatatccccaagagaaataggatacatacctatacatatacctatacctgtagtcccagctgtacaaaaataataatatttctagcagcattattcataatacctaaagaatggaaacaacccaaatgtttgtcaactgaagaagagacaaataaaatgtggtatatccatacagtaaaacactattcagctttaaaaaggattgtagkgctgacatatgctaaaacatggatgaaccctgaaaacatgctaagtgaaagaagccagacaccaaagaacacaaactgtataattccttttatgtgaaatttctagaacaggcaaatccatagacacaaagtagattaatggttgcctacgacagggggtgtatggtggcaaattacgagtgactgctatgggtctgtggtttcttccgggaatgatgaaagtgactagaattgagtttctaatggtcstacaattccgtgaatatattaaaaaccattgaatgatacattttacattagtgaattgtatggtatgtgaattttatatcagtaagcctggtgtgtgtgtgtgtgtgtgtttgtgtgtgtgtcttacatatattggacggttaactgtcagcacttcatgatagatgagacttagggagtgaggacaagtgaggaattaagaatgacctctaaattttggtcttgagcaatttctcagaaggagatgaaagactgagattaggagggtttctttttgctttgttttgtttttgttttatggagagggccagctttgagaatcaagagttctattgtggacatattaagtttgaggtgtctattaaatatccaaacaaatcttaggcagacagttgaacgtgtgtctagaactccgaggagtaatctagactggagataacatttagatgataggtgaatctgcaggaaaggatgaaaacaggagagagagagagagagagagagagagagagaatgcatgtggcacaggatgaggtagaataggagaggggagttacaaagcaaactgagaaggaatggccagccagggaggaaggagaaktaagagagtgagcacaaggtcactgaactcaggcacaaagtaagtcctaccgagaggtagtcataggaggacagaaggatctattggaattgccaagatggatgttgcccatgaccatgataagagaagttcagattggaaactccagatccgaatggtttgaagagggaatgtgaagtgctacagtggagacaatttggcacctgttttcagaagtgttgctgtcaccagattctgatgaaaaattgctcttggatctttacctgctctgctgaaatgcccaamaaggtgctggttgggtttggaggtcgtgtcttcctgggagccagcccttctgggtatgaatgttgcatctgtgtagggagttgctaacttgtaggcagggttggggcgcgagggtggtgtgaggctggggttcggagaagagtgccattctttgccttgttctctgatggttttgattttgtttagttattttgattgggagaaaatgtaaagaaggggtttactaatgtgctttttcaaagtctaggtcaaattgataaaaagaaatctctgtttgaaatcagaataaagagaaaagacattccatgctcttgttttggagacagggtctcctgttgctgcccagactagagtgaagtagcacaaactactggcctcaagtgatcatcatgcctcagcctcccatgtggctgggattacaggcgtgtgccaccatggccaacttatgatttttatttttgtagagacaaagtcttgctatgttgcccagttgttctccaactcctgacctcaatgatcctcccagcttgggcctcccaatgtgttgacattactggtatgagcctgtgcacaaacttcattccaggcttttttttgtagtgaaagtctttatgaaacacagtcctaactgttcatatataatttattatatatgcatttattaatacatcacttggttgtattaaatacaaccatatttatggtaataaatgtggtaataaatacatattatatatgcatttattaatacatcagccttgcatttattaatacatcagttggttggggtttggaccctgagactgtagcagttcctggagtgaactgaaaggcaaagtggtaactttctcaaaatgcacacacacagatgcttttcagaaacctcaaaagtgcattgcccacggctcttaccatttgcatcagtacattctttccccacgcttctttactaatttagattatgtgaaaacaactttttaagacagatgttccttcaagtaacaacccactctttctcttctcttgagaaaatattagttggaaatggactgttacttaggctagaaagtccatttgaaatgttttgagcaaacatcattgtctaagtccacttcgtgctgccataacagaataccacagactgggtagtttagaaacaataaaagtttatttggctcatggttctgatggctgagaagtccatgatccaggggctgcatctggtgagggccttcatgctgtgtcatcccctggcagaaggcatcacatggtgagagcaagcaacagagaaatgtacgcacttttatagcaaatccactctcgtgataaagaacccacttctgtgataatgatattaatccattcacaaggacagagcactcatgacttaatcacctctcaagggtcctacctctcaacagtgtagcatttgggattaagttcccagcacatgaactctgggggacgcattcaaaccatagcaatcatattttgagcacatgactagggactgctcatcttggatgaatccaagctgtgtttgtttttcttttaccagatgtgtgtgtgtgtgtgtacgcccatgcacttgcatattttggtaagtcaattgtttgaagttatatttgagcttcaatttttttgaagctaaaatttttttcttatatggaatacagatggcctaccataacacaatatttttaaaatgtagtgttttctagctggcttggcatgaaattagagaatgcccttatttctctaaccttaggtaaagtcttcttgtagcaattttcttatgtgtgtggtttaaaaaacaaaactttgtggttgtaattgcttggttgtgttttattgtatatgwaagaggcatgccgtgggggttcagaagaaagaattgttcagtattactttcataaaacattgaaagaagcatcttcatttgttctagagtgcagattcacaggatttttaaatttattattctgagaagatgatattagtagtgtgtcctatgtgattagaaggtagaatatcacccatgaaaaaatttctggcttaaaagaaaccctgcttttatttatttatttagacagggcctcgctctgtcacccagcctggagtgcagtggtgtaatcacagctcactgcagccttgacctcttgggcttaarggatcctcctacctcagccacccaagtagctgggaccatgggtgtgagtcacaatgcctggctaatttttaatgtgttttttgttttttgttttttttgtgtgtagacgggtgccttagtgtgttgtccaggctggtctcaaactcctgggctgaagcaatcctccccacttggcctcctaaagtgcttggaatataggcatgagcctctatgcccagcccaagaaacaaaccctgcttttagaatctttttttttttttcccagctgtcctgtgtcctaggtttataactttgactaacttctagcaacttccaatcatgggagaattagagtggttatctgggatgaattgtttgaacttcaacctgttatcttggctgcagggctttcttggccacagggccgtgctaaagggcactttgatttcttgattttaaaagagcaagagaaagtgattgccaagaggagaggtttggttggcttttcttagaactaactgcctctccagagaagcctgcattggctgctcatcatgatgagggtcgggcaaggtcagtttccactgtcttctaattgttttcagagaattggacggtacaaagcaggtgccactgacaacatttcccatcattttatggaagagtactgattccgtcttttctgctcagagtggatctgtgcaaataacttttgtttctcaaaaatttctggtttgtcttgggatgcagccaggcctctaatgtggtggtgtgtgctgtgtcacaaacctcggccccaaaagcctgagcttggctttgtcagatctgatgagtgtgcatgagcaggaagccacccttcgggagaattcaggggcaaacgtacaagtaacgtttgtgaacctgtgcagacaaaggctttgggtagatgcctgtgagatgtggggatccaggtgacatgaagggagaagaacagaagacaggtaagggacttgtgggttttcttaactccatgtggctgcattgagaaaactagttaacatttcatgggctggtgggagcgtcatcttatcattctctcttttttttttttttctggtaatgattttttttgtttttttttttttgatattgacaaaagyttaatcatttcaattaaaaatgccactaatttgactttttaagtaaaaaatgtagggggttttaaaactactttcctactaccaaaaaatcagaaagtatctagctttctaaattgggaaagcaagcaatgttataaaaacactgaaggaatctctttcttcgtgaccttttgttaaactcggtttaagctgtagaccttatttaaaataaaatttaccacagaacaggaaatagaagctgtggaagactcgaaatacacctttgtacttctctgttcttcacctgctctctcrctgtctctacacacacacacacacaaacacacacacacctatatttgcattaaaaatgggtagtaaaagcagtgaagggcaaacagaaggtacaatacaatcaagtaagaggttgaatataaactggaacaagtcttaattttttatttcactttcattcggatacgtttactaattttctttgctagctttaagacttttaaaacattctttggccctgggagggagttgtataaccataaaacttgagaatcctggcmctagaataaatgttccttttaaaaccccaaggacagaaaattgaatacagctgtgcaaaaaagaaaaaaaagaaaaagaaagcaagaaaagaaaaaaaagccaagtgatggtttaggcttgcaggcaccctgaccaactttcccagtgcacttgggctgtggtttcctggagatgggagatcgggagctttggtgtacttcttgaaggtttcagaaaaaggccaagacttcttcagaactgtatgttcctgggatatggttaagagcgcattctttttggcatggttatctatcatcttgcttgtcctaagcatgtcctcttgttttcccctgcagaggattggggtttctaggtcattctctgtgatgmcgtgattctgcaaaccttatagttcctacctaaaagtaagcttcagagtttaagcagtttccaccagtcagaaggtggaacggatgagtttttaagacgcaatcttgctcttctccctcagtcactgaatttgcctcagtatggccagttttcagacatggtcctgagaatacggcattgctactccctgcttctcctctccctggatggagaccaggatgttgcttctctgatgtttgcctcgtgggttcccatgttaggtttgtgacccacggggagctgtcactggggaccctactgcagcctggcattaatcactttgctctttgtcaggcagtgtcatgatgattcatacttcttcctctacaagattagattactgtaattttcatatcctggactgcccacgagggatttgaattaatacttgttggtatagaaagcaggatcatgtttctggggagaaaggactgaacttgcccacttggccatcatcagaaaacattaggcagggcctggctgaaaaataatcctgccttcagggcttaccacatcaattagcttaccatacgggccagtaagccgtgtctttgtgaacacatggtccctgggcagcggatttgtgaaagtgatgccaagcccaggagatcagaatgcacggaagattttgcaagggagtcctatattgaaatcagacactgcttaatgaggaaaatctttcccaaagaggtatttgagaaggaggtaaaccaattcaggcatgtggaacagcctgcacaaagccagcagaaattacgatcacagattgcagggcaggggggtgtctrtgagggataaagttgcctttggaaaagaactcattgccttgtcattttccctggagcatacgcattatttgccttattcgttcaagaaatatttatcgagcacttaatatatcctaggcactgaagatgaacagcagttcacaaaccagacaaaagtctctgtcctcacacaagtcacattttagggggcccatgtcactaggggtacaagcktaagctgaagggagctgtagcaaggagttaggagtacctggaagaactcctgaataactatagttgtttgaaaacgtatttgcttatttattttctctcttccctttgatgcaacttgcacccactatcccactaacgagattaccagccatctttcgataaatccttgggagggaattacttgtacttgctaatgaataatccactttagtagtccaacagataataacttcagggtcttcaaagggttatctgatctgctttggcctgagtctctatgggagggaagttgaggcatgatcaaaggattttatctttgcttgctctcctactgtctaataattttttatttcagaatgctttgctttaacatattttatctcgcttggagcgctttattccttccttatttatttattttttgagacggagtttcactctatcgcccaggctggagttcagtggcacaatcccggctcactgcaaactccacctcccgggttcaagcaaccctcctgcctcagcctcccgagtagtttggactacaagagcccgccaccacacctgactaatttttgtatttttagtagagacatggtttcaccatgttggccaggctggtcttgaactcctgacctcaagtgatcctctcgcctcggcctcccaaaatgctggacttacaggcatgacccaccacacctggccccttccttctttttttccccctcattgttgaggcttttctttggagaaggtgagatggtgctatgcctcagaattgtagaatttcaagtttttagaatttgatggcactgtaggaatcttaatccagaccagcgattttcagtccccagactaaaaccaagcccttacctgagggcagtgcgatgagaaacctaagaaaatgaagtgaatgttgtattaaatataaagctaaatttattcagttgatttctgcatcattctgttattttcttttcttgaatttttcaggtttttttttttagtgtcctccacctaccccagaaatcagtcttcctgatctcagcctcccacctcccaccattctgtccccacaggctgactcctgtcagaccccatcctcccacgccccagttttcagatgggaccctcctcctcagtcttgtagcccctgccctcaatacagaagtcactggctaaaccttagggtaggaagttcccactcrtgctgtcaaggagacatggcccaggatccacagttggagccaaagatacattgtaagatacaacacatagtgtttctggtttctttctttccctctttctttctttctttctttcaggtggaatcttgctctgccgcccaggctggagtgcagtggcatgatctcggctcactgcaagctccgcctcctgggttcaagtggttccgttttatagaattattgggactgtggttccactctattacaagcttatcgggcttctgtgggttggccgagtgcatagccattacgtagagctctgtttctggaggaagatgagaatggaaccttcactgggctacagagtgcttggcccaggggatgtggggtttctcggtccttggggctgggagaacatgctcagagaaggctcctcgctcctgtgtgtctctaaggtatagatgatgctccctgaggagcacagtctcctggagtttttctttcaggaataagaatgatccattccctcttggtatttggaatcagccaaacaaaccacatgtggtgctgagctttgtgatgtcaacaacagcagggaagggaagagcctcccaggtcctcactccactggtcacatcaccgtcagctcatgtccccatttgagcagcagcctccatggttctgttcgtgcagtgagctgctgcttgacagcagacagaaatcccatatttttagatatctagtggcccaaacggagcatgtcacactttgtacatctctgattactctcaagactctgagcctggtgtccaggaaygcgatgttgctccagccgtgtgagaggctgggtctctggagccaggactcataaaccacggtccaggctcacccctrgcaagttcacatctcattttgaccacgaggccagcagttctctttgtgttgagctctgctacacacccattgctctgaagctacagcccgggagagaaaagttggctggctcatcagtggttcaagccagtgacttacagatgaccttggagctcaaagattttcagctaaagccagtaaagttctccaaaagctttgagaaaaagcgagaccagacagacagaaagacagactcaattgattgaattattgattgattcagatttccggcaggggtggggggttgttggttgaaaaatattaactgaaaataatatcccctttttgtctttaaaaagaaatttatgcacaaacaaaatgacttgcccatggtacagaaggcyacaagctcgattcatacaggtgtatcggtgtacatatcagtagactacagcatgtctctgtcttctcccatagaggtcaaaatcctaagctttttgggaaaaggaaatgattccaagtctggttccatcgtggcagaaaatagggcaaaatacaggtcctggttgcctagccttttcatctcctggaaatgagctgcttaaaaaatacctccagtgattgatcaagttcattgccctgtggaaagcagaacttttcagaaggcagaagcaaggagacagagagtgttgttgtcttactttcctgcactgacagtcctggccaatgctctgacatcatcttgagtccagaaataggagtgagaaatggacagtgaggccactacacagaaacatttgagctggtgatgcatgttttcttttctgcctgtgagctgaggatccaacttgtgactgtttctccagctctggagggatattgcaaattgattaatccaccctgacaaaagggagaatgttgtagctgcattaaaatgagaagagagcggccgggtgcagtggctcacgcctgtaatcccagcattttgagaggctgaggtgggcggatcatttgaggtcaggagttcaagaccagcctggccaacatggtgaaacccagtctctactaaaaatacgaaaacattattcaggcatggtggtatgtgcctgaggtcccagctacttgggaggctgaggcaggagaatggcttgaacccagcaggtggaggctgcagtgagctgagatcatgtcattgcactccagcctgggcgacagagtgagactctgtctccaaaaaaaagagagagagaagagatctaactgcagactattttgatattttcagtccacatcacaaacatttattaaatttactgagtggcacatgttgctaggtcctggtaatatgaaaatgtcatggagtctctgctaacagcctagagattgggaatcagagaccatgtctaggagagatttgtaggggaaatattctcaactaaggcttgaagtatgattaggggtcggtctttctttctttctttctttctttctttctttctttctttctcactctctctctttctttctktttttgaggcagagtctcactctgttgtctaggctggagtgcagtggcacaatctcagctcactgcaacctctgcctcccaggttcaagcgcttctcagcctcgggagtagctgggattacaggctcgagccaccatacctgactaatttttgtatttttagtagagacagagtttcactgtgttggccaggctggtcttgaactcctgacctcaggtgagccatctgcctcagcctcccaaagtcctgggattataggcatgagccaccgcacctggccagattaggggttttctaagtgagaagggtggaaaggcattctgagcagagagaacaaactagacaggaataggaaggatggccagggtggctggtgtctcatggttgggcacaggtcacctgctggtgggagggaggataggaggttccagctcagagaagtgggactttggaatgtacccaacaggctggacatccttgagttttttgttttcttttgttttctgttttccaccaacacaagtaatcgcatccctcctgggtttatctaaatgtggtgctggtaatgaagctaaggcatcacagtccttgtaagcctcacagcttgtaggaatacacctgcacaagtaagtcactgcaggtcttagtctgtatgagataacctaagggttaagtgtcatttccaaactatttatttgtaactggataccttttttctcctactgatgagtatctaaatgcaagagagtgacaatgattctaagtatagtcttacatttgtcctttaacaaatttatttttattttttattttttatttatttattttgagatggagtttcgttcttgtcacccaggcaggagtgcagtggcgcratctcggctcattgaaacctctgcttcctgggttcaagcgattctcttgcctcggcctctgcagtagctgggattacaggctcgcaccaccatgccgctaatttttgtattttcagtagagatgggtttcaccatgttggccaggctggtcacaaactcctgacctcaggtgatcctcccacctccgccttccaaagtgctgggattacaggcgagacctaccacgcccagcctattgttttaaactttattttttattatattcattttactatttttttaaagagatggggtctcactatgttgcccaggctggtctcaaactccttgcttcggtccttccacctcgacctcccaaagtgctaggattacaggcatgagccactgcasccagccccctttaacaaatttaattttataagtttgccatatgggccaggatctgggacgatttgctagattaaaaaataaaaacataaaatataaaaaagacaaaaagtttgccatgtgggcttccatgggtaagaagcaagcgctatccacctgtctgttggaggcagcacctgccaggcctatgcttgagaactgctgggggactctccaggagggtttttattgggagtgagcaggcagggtggggccgtttaaaggccattctggaagtggcggagaggatgggtttagagaggtggaagtgaagtttggaggctccaggcataagcctgactcaggcccatgagaacatcaatggggtggaaggagagaggaaggttaaaggcaggaaccgaggcttagtgactgctgagatctgaatgatcactcaagtgaggcagggccctgatttctggtttgggtggccaagttgccgatggggaggttgcggtcaggtaggaaaccaggtacaagtttcctgatgggagatgggagatgacgggtgtagcttgatttctcttgagttccatgttcccgtgagatgctcctggtttgctgaacttcagggaatcaatcaccagtcttctgacttctgctttaggtgtggcagacggagctcactctgggagaaggtaggatgataccagcaggctcggagtcctgggaaacatatggacatttgagggaggcagaggtggacactcagtgaaacaactgaggagtgatcagaaaggcatgggagagctgaggaaaggagtgttggagacattttacgaagaggacattccatggaggcggaagtggtcagaaagtgccagataccatacaggccacatctagatgaagcctcaggagagtgtgttgttgggagagcagtttctgggttgtaggggagccagaatccaatgacaaaacttgctgggaagcacatggggctgggggagaggagacagtggttctggaacattcagggtgataaaaagaagagaaggtaggcaagagcttgaagacagaggtggggcccaagggactttgggggcagaagatgagtcgctggagcatattctgggcttgtgctgcctcgtcaacgaactgaaaagaagcctcatctcttctgtgcatgacctggcattccccaaagcgccagaaaagtccagcataagttagactggcctccaaagtgggaattcagggagtttggatctaggttttatgttatggaaactgagaagataaagggccctgaaacctccatctgcccattccacttctgggaaggctgaactgttatatcatctatttattttcaagaataaagagttcagctgggtgtggtggctcacgcctgtaatctcagcactttgggaggccaaggygggcagatcacgcgaggttagaagttcgagaccagcttggccaacatggtgaaaccctgtctactaaaaatacaaaaattagccagatgtggtggcatctgcctgtgatcccagctacttgggaggctgaggtaggagaatcgcttgaacttgggaggtgaaggttgcagtgagccgagatcgtgcattacactccagcctaggcagcaagagtgaaactccatctcaaaaaaaaaaaaaaaagggccaggcgcagtggctcatgcctgtaatctcatcactttgggaggctgaggtgagcagatcacgaaatcragagatcgagaccatcctggccaacatggtgaaaccccgtcgtactaaaaatacaaaacttagctgagtgtgctagcgcacacctgtagtcccagctactccggaggctgaggcaggagaatcacttgaactcgggaggaggaaattgcagtgagccaagatcgcgccactgcactccagcctggtgacagagtgagattctgtctcaagaaaaagaaaaacaaaaaagaaaggggaagagttctagagaacagatttcaaaaacttgttttctattatatttatagcagtattcacattggaagaccagtgcagtgacacactttcgttatcccagctactcaggtggctgaggcaggaggatcacataagcccaagagttcaagaccagcctgagccaaatagtgagaacctgtctctaaaaatgaaatataatcaaaaattgagatgacccgatctcctccctttccaaaaagttgttttcttgctatttctccagagttggtcaggttttaaaaattaataatctggggcagtagatgaaatttctgaaaattatgtgcaggtttccttttttatttttggatgggccctaggtattagaggtgctctttttaagtatctacacagcctgctaaataaacacattcaattggaaagcaatgctttccatttcttattctgtatcaaatattttactttcggattaactttcattcttatagggaaaaataaatatttccagtttgaaattcgtaagatggcattgataataagtaaatctctatagatttatgtgaagtacagttacagtaagtcacccatttacaaatggattatatttgaaagtttcatttgaagtaggtttgttttttggggttgggatgctttttccttggaaaaaatacttaattaaactttttttttttttgagacagagtttcacccttgtcacccaggctggagtgcaatggcatgatctcagctcactgcaacctccgcctcccgggttcaagcaattctcctgcctcagcctcccgagaagctgggattacaggcacatgccagccaccatgcctggctaatttttgtatttttagtagagacagggtttcaccacgttggctaggatgttctcaatctcctgacctcaggtaatccatccgccacagcctcccaaagttctgggattacaggtgtgagccaccccgccctgcttaaacttttaattttgagataattatagattcagatgtagttgtaagaaatagtacaaagtgatcatgagggctttttacccagtttctccagtgataacatcttgcaaagctatacaatagtatcacaaccaggatattgacactgatgtggtcaatccaatagaagagttccagaacaggggtctctcatgtggccctgttaaaccacctcatccccatccctaacctctaacaactcccatctcttctccatttctataatgttgtcatctgggaaatgctatgtaagtgtactcgtatagtatctaacattttgggattggctttctgtcactcagcataatttaattccctggattcttatccaggtcgtggaacgtactaataatttgttcctttttattgttgagtagtattccatggtatggatgtaccacaatgaggattgggtagaagctcattgcttttgcctaggggtgtctaattgctctagcactgtttgttgaatggcacagaaatcagtttggcatattcatgtgggcctgtctctgggttctccagtctgttccactgatctatgttatgtgtctctctttttgccaatgctgtgttgtcttgattactgtagttatccagtaggccttaatatgggatagattcattgctctaacttttttcttcttttgagacggagtctcactctgtggcccaggctggagtgcagtggcatgatcttggctcactgcaacctctgcctcccaggattgggttcaagcgatgctcctgccttagcctccctagtaactgggattacaggtgtgcaccaccacgcctggctaatttttctgtatttttgatagagacagtgtttcaccatgttcattaggctggtctcgaactcctgacctcaggtgatccacccgcctcggcctaccaaagtgctgggattacaggcatgagccaccacgcccagactaacttttttcttctttttcaagatggtttttagctattctagggcctgtacctttactataaattttagaatatctgccaaaaatcactgtgaggccaggcagggtggctcacacctgtaatcctagcacttaagaaggccgaagtgggaggacagctggagcccaggagttcaagacaagcctggccaacctaatgagactccatctctacaaaaactaagaaattaaaaaattagcccagtgtggtggtgcacatctgtagccccagatattcaggaggctgaggcaggaggactgcctcctggggaggttgaggctgcagtgagccatgattgcacacctctactccagcctggacaacagagcaagaccatgtctcaaaaaaacaaaacaaaacaaaacaaaacaaaaaaaccttgcaagattttgataggaattttgttaatctgtagatcagtttggggacaattgacatcttttgtgtgttgatttttcttccaattcatgattatcatcattggaaagaagtgagtatgatgagtcttctaagccaggcagatagcaaaaaaattaggaaagtaaatggattgcacaggaagaattaactgggatttaaataatcaaagacagaaaggatatataaaagaagtgacgaaggagatttaccctattagactccagtgtattaatctaggacagtttggttgctatggggaagcagtgtgcaaaaacttaagaggcacacaaaagactgatgtttattttgtgggagtgaatctttttttaggaaggaaatagcactattgtggtaacagtgattcattttctcctcctatcttctctttacagagaagacccaaatagtgaactgtttcatgtaagtttttatttatttttgccctacttttctctagggaggggcttaccacagcttataaaaatacgtaaaacaagatcaaataaactttaaaatgaggaaaaagccaatatggtccaagggaaaagaagatcagggtcaggactgagattaggatgcaaaagccatgctatgaaattttgtttgtttgttatcttgagatgggtaaaaaaaaaaaaaaacagttgactgggacaaatacccctagcacaaaacagtcatgaagccaatgtttaattattatacctgtcatcttttcacctggcctcaggactgtcctcttagggagaggcattgttctgtagggttaattagtaacaggaatttagatcctgctttgagaggcctcctgtgctggccgaagcagctggtggtctgagaaccctgacacccagaggcataccactgggaggccccgcgcagcacacagcttttgctgtactccagcccaagtcttatggggtttgtggtttatactgaagttggtgcagacaattaagactctctgttcttggtaccgacagggacagagacctacaattgtaagtattttgtaaacagggttgtgatatttgtttgagtgtattcaacatgtcagtggccttttaatgtttaaaaaaatgcatatggccatttaagaagtggttgtgcttcatagttaatatttttttcattaggttaggttcatctggtttttcagtgaggtgagctacctgagagccataggaagatagatcttgccagttcagaggactgactttggctttaagagaaaatatttgtgtcattttcgagaaagtacttccagcacaatgctttcttctgatgattcattttctacagttattggaagtgggaagaaatccacagaggttacagaatttgtaaacttgtagagacatgtgccattatatcatgctgtttcatagatgtgtatgtctgttagttacttttcgggcattcattgtatatatgtctgttacttacttttggggtgttcagtgtctgagctttgtcaacgattgtgtgctctttttttagcctaaaaaaactaagttagagaaatgtttgctcatccaaatctgtattgttgtagcttattcagtagactgctgttgtatttttaatttctctatacaacaagctgaaagacagtgtggacaacctaattgcatttgaagtagctgctggccaggcctgctgcaacagctgatgggctcctctgaatttccagggctatttctggtagatgagctggtatcaaggctctcgagttcaggccataaaaggcccgtcccatgtgaagttgcttcactgctctgactgcgtcctccccaggctgaagtgtcctcaggtttcatgtggatttgcccagtaatggatggctccaccgaggccaggttggggaagttcagcctcgaggacactaggggacgaaaaacttcaaaaagaagactctttttattaatattttggcgttctttttggagaggaacttttgggatgtagcctttacctgtttcctgaatttgacatccaaaaagccttttggaaaacaccattctaaatttatcctgttctgaatcatcatcgcttctgatagatgcagttgcttgctgacatcgtgatctttgattttgtacaacgctatttgggctaacttttgggattttactttgtgcttagaatttgaaagtagtattcattggaaagagactccaagaaaatactcgaagacatcaaaagctggattcgagggtataacgtgttttgttttgttttttaaattagaaaaataaggaattgcagtgtgattttctttccccctttaacttagaggaacgaggattatacagaaatttgaagtaagtgaaaaatcttcctataaatctaaatgcagtaggtttttttttgttgtttttgtttttgcttttttttaagtgccatctgtctgagcatgtttcctgaggatttgttgacttcagtcattggaaaattcctgccagcgtttgccagttactgcagccattcctgtagatacccttgggcatatttcttgggttgagaaggattggacttttttttttttttaaaggatttactttatggtagagaaaggtttaatactaamaatttgattaatataacttagtacattctgtctaaatgttagcacttaaagtcttggaattaaagtatattcacaatgcaacgtactttaataatcgtagcacaagtatgggggtggagttcagaagggcaagttttatttcactgccattataattcatgtaaaaatagaaaatcaccagtgatccttttgcataatctttgttctgagggttctttgccttggtactctcattcttcagggcttgatttctagaacttgcgatgttccagaatttatgagaaaaacctcactgtaggttctagagtttgaactgcattttatttttaaattctccaagaaaaaatactgcatcagccttttaaagccctggagattgctatggtctctttgtaatttagctcagtgatttgtttctgctgaaaaacagcagtgaactctagaacatagaaggcttatttgacgtgttgcttctttgaaaaaaaaaaagattatttctttataccacatcagatggacaagtacgggcagtcattatttttaccaggtaggaaaacagagtatttatagagaagaacttcatcggtgaatactgcgagggttcttcaccggagatagtgtggcaaccctagggggcgtttgaaaatgcatgggggtgtttcaggttttctcaatgactcactggcatttgggaggatgtggttaagaattgtraatgcccaatttacatggtgtaggggacagtcccatacagcattaccctggccaaactgctggtggtatcccctgttgagtaaaactgcaggatataaattgtaccctctgtctccaaagaagagcagcccagtgccaggcagatgtgtgctgtctcttctcaccaaaaccagtgatgtctttttttttttttttttttttgagatggartctcgtgctgtcacccaggctggagtgcagtggcacgatctcggctcactgcaacctccacctcccaggttcaagtgactctccttgcctcaacctcccaagtaactgggattacaggcacctggcaccayatccagctaatttttttttgtatttttagtagagacggggtttcactatgttggccaggctgatcttgaactcctgacctcgtgatccgcccaccttgggctcccaaagtgctgggattataggcgtgagcccctgcacccggcacccggtgatgtcttgaggatccagggcatcaagtgtgcactagtgtcagagaatttgtcttacaatggaaactttggagtctatactctgtgtgtgtgtgtgtgtgttaaagataatttatttggtcaccttgatcactggatgaggctgatgttatacaagctattgtagtacattaggtgccttcctgcctacctttatttagtactattggtgcatttaattttgccacatgcatagtcttccaagtgaaatttggttaatgcgctcagcttgcagtggacatcagtcagccattcaacaaacagttctttatctttgcttctactttggagacagactgttttgtgataaacagacttctggaagactttggagttcaattcagagtgaacatctttggcaacacctggggttatatagtattctttttttcttttttcttttttttttttttgagatggagtcttgctctgttgcccaggctggagtgcaatgacacaatctcagctcactgcaacctccacctyttgggctgaagtgattctcctgcctcagcctccctactagctgggattacaggcatatgccactgcgcccagctaatttttgtatttttagtagagacagggtttcatcatgttgcccaggttggtcttgaactcctgacctcaggtgatctaccagcgctcggcctcccaaagttctgggattacaggcatgagccaccacacccggcgagttatttaatattctacagttgaggaattgcatccaaaggaaagggcccttgggatttttataaggatgtctggtgagctccagcatgcagggctctcgggctacatggagcgttatggagagtaagctgctaggagccttgtgattgttagggtacaaaggcagccttggaatcatctcctgaatctgcagctgcctgggattttaggacactcattgcaattttatgttaaagcgctgatctcagggtgccttgctgtgactgggagtatccgtaggtctagaactttccagcagttctgggcttcattgatttgtgactcaactaggaatcttctggtcacccttgactcctctccctttaggtccccgaggcctctgccccaccacctcctcttaagcctcgccatcttttttattttttatttttttgagatggagtctcactctgtcagccaagctggagtgcaatggcacaatctcggctcactgcaatccctgcctcccgggttcaagggattctcctgccacagcctcctgagtagctgggattacaggtgtccgccaccacgcccggctaattcttgtatatttagtaaagatggggtttcaccatgttggtcaggctggtctcgaaatcctgacctcatgatctgcccacctcggcctcccaaagtgctgggattacaggtgtccgccaccacgcccggctaattcttgtatatttagtaaagatggggtttcaccatgttggtcaggctggtctcgaaatcctgacctcatcatgatctgcccacctcggcctcccaaagtgctgggattacaggcatgagccaccgcgcctggcctcgcctcgccatctcttacctgggctactgctttgcccttaatggatcccttggccctcggtttctcctccgtctggtctagccacagaatgaccttcctaaacaaagatctcatcttgcactcggccagggccaaaccctcatcgttcctcactgcttacatgcaaaagcctgggctctgtagcctccccttcagggtctttcatgcccctggagttctgttggcaagtctccccaaaatgttgtcttctcttgcctgccagggaagcaatatcaaaggagatgtgccagaagcttcctctgacatgcctctggcctcctgggcctcgactccagcctgtactctagggctgcagtcactaggtcctggtggccctttccttggcagcagggtacccagtgaggtgcttgggtctcacttctcttaccacccccagggtctagcccagtgggcaatccagaaatgtgagttgtttgaacggattgaattgtaacgacttgtgggttcttcatatcgaaatttggctgtgatccatccagtacttttgccctcatcctatattactcacagtagaagctggtgttctgtgttataagttctccttttttttccttcatctatgacaatgcaagcagaaacgttcgtgttgcggtaacaagtccgatggggtttctgtatatggggtttctgtacacgtgcttttgccaaccgggaaattaaggtgtgccgcatgaagtcagtcacttcattattggaactttgcctaaaatgaagaaactcatctagtggtgcaatttgacctaagtgttttacccatacagtcaacttcaacttgggtcacacatctcaggagcagtttgcactgttgatctcaggggctctttagtattggttcagagagatctctgtccctcttagagacactccctattgtaggaggttttgaaagaggcattctttttcctcctaatgtgcttgtccccttctgaaagttgatcctttaatcccaaacaagtttataacctatgtctaactggtttttgtgtaaatatagtaaaagaaatagtttycatatttgctttgggatcattggtctgcccatgtcacagccctgggtacattcatttcagtccatatttttggggcactttccctgtgcagagctccgggtgggtcctgtgggatgcagaagcctatagcgtattccctctcattggcagcctctttcccagagtgtctcggacagggayrtaatggagctattttaccagtcagagtagaagggatgaacaataataacatgccatccattattactgtgtgccagacttaatgccacactctttacctctacaatatatcacttaattatttttattttttgagacagtcttgcctggtcacccaggttggaatgcaatggyatgaccatggttcactgcagcctcgaactcctgggctcaagcattcctccttcctcagcctcccgagtagctgggactataggcaatcactactatgcccagctaattaaaaaaaaaaattctagaggcaggggtctcactatgttgctcaggctggtcttgagctcctggcctcaagctatcctcccattaaggcctctcaaggcactgggattacaggtgtgagccaccacgcccggactctaatttttacagtagcccccaagaaatattagtgcaattgtcttcattctactgaggaaaaaactgagggttagaaatgcttgcccaagcttgggcacataccatgtgcccaaatccagctggatttgaacccagatctagttgacttcagtgcctgtattcataaccgctgctttagccagtgcagcccaaactttaataggaatcacctgcagtcttgttactgcagcgtctgattcagtaggtctgcactggacttagagattcaacaaacaggatccaggtgatgctaattcctgtctgaggacctgctttgagccgccttaggttaattctttgccacgtgcctgagatggaagcaaccagctggggtgcgggactcgaagggggcttccgaggaggagaaggagtctttcaaggctcctctgttcctctaggcttttcatgccaccccttcccgctctctacctacaccattctctcccgtttgtcttattttccactctgctcttctcctggcttctccttgtgttgaaaacatcctcaggtttcatccattctaaataaagctccccttgacctcaagcgatcacttctttctttcctgcccactcactcctcagcactgatcaggagctcttctgtcttctcctcttggacacctttcaagacctcctggttactttgatgtccccgcagcctccctgggatggaacccctctccgtgagaatcccatctcaggtctagtgagggtgatggggctctgacctccatactcagcatccacaccctgctgtgatcttgaggtctcctggcggccttattttaaaaatcattttctgtctctttgcttgctcagctttccttcttaaggtccatttaagattttttaaaaaatcctggtgttcctctttataaggtgaattgttcaacatgtccatttcaggtggaatgcattcatttggcttttagaactgattttctgtttgtaagtagaaattaactcccaattagctgtgtgagaatttgtatcctctgtatctgctatcaatagaaaagaacaattcggttctgggcgaagacccaaagggctttttattaataatgcacctacgattygtgaactgtgtttaggttcatcagaggcctctcgtttctttctggactttcaattacgttctgagcatggaaagttgkcaaataacttaggcttggatggatagatacagtcattgaatagaaaaaccatattgatatttttaggtttttaagatctcacatactttaaatatttcaaaattttaagtaaatactctttcatacattctgaaacattatatctaatttatctcagccaaaaatttaagacatatacatgttgcagttgcacacctgttactccaaaacaaacaaaccgctccagccaaaacccaaatgggaaagcacttgattttcagtagcttaaaatatgttgaattaagaggtaggttatgaaagtgaaaatgacatctgaatgttttagtggttttggatataaattttcttaggaattttttgtttgagttaagctgatagtttagtttactgtgtgctatgttggttgcaaaattcagctacatttgtttattttgcaattaattcaatttgtttgcaaatattgcatcagacatctaaaccagctaataactctataggtttgagccaggttagaaaaaaaggcttggctgtaccgttaagaagcagctagctctctaaattgtgctgatagtcttaatttcccccggatgttcattttagccacacacacataaccatttggatttatgatttcatacattttttattggaagtgctgaatattttaaaattctgtgattagataaaattggtcattgtgcttcagaatagggtgactcagcttcatgggatgtactttacccaacacaggattctcccatttgagatggaatttattaatttggatttgtatcaggtcttcactccagaggcatcagagagctttcaggcagccaactattcttaaatatttcaaaaggaagttgcagtgggcacgtggcgtggagaacacagcagagcaaagtgatgtaggggccataacagccaacatgctttgtttccttcattcattcacctacctccccaaaagtccaaagaagtgttttccctgctctcggtgcaggaggaagattttatctggaaattgaaggtgtcaatggccagagaaagaaggaggaacattgattttcatgaataaccagctgtgtgaccttgggtaaattcttaacctctctgagcctcagtggcctcattcattcaaacaagggttggactagaggatttttaagaccccttttacgtattgggattctgtaatccaaaggtttcagagatcgagaataatctgtcttccttggaaaggcaacaccttgtatctagttcaaggtgggagagcaggaacaaattagaaatgtgttgagaaagaagatcttttttaaaaagtcctctcactgtccttgcttgtttctgttgaaatacacagactgtttctcccttctctgatggcttcataatcattctttgtctttgattcttattatttattttattttattttattttattttcattttatttttttgagatggagtctcgctcrgtctcccaggctggagctcagtggcgcaatctcggctcactgcaagctccgcctcccgggttcacaccattctcctgcctcagcctcctgactagctggaactacaggcgcccgccaccacgcccagctaactttttgtatttttagtagagacggggtttcaccgtattagccaggatggtcttgatctcctgacctcgtgatccacccgcctccgcttcccaacgtgctgggattacaggcctgagccaccgcgcccagcctgattctttattttggaaagtttctgacacctctttaaattaagctctcatagtttcttttgtgttcatttaagtatgtctattttcttttctctaacctaatttatttttatcttcttttggacatttgttttttctcctgatgtgaaaccccaaagtggtcacagcagactcgctcagggatgcctgagaccgtcagaatcttcgtgttcacaacaagatgggatgtgcttggctttcgtttccctttgagtttattagttcactgccaggtattcatttattctcaacagttgttttctgagcacttactgtgtgtcagggactggtataggtgttggggaaagagcggtgggaaacaaaattcctgccctcgtagcgtttaagttccaatrgaatggtactaaagtaccctgagygattctcttgatcttcagccctacatctgttgttcaagtgcttaggttaataacaaaatgtaaaatacctaccatggtttcacatagttatgtgtgtctgatgtaggggccataaccgtgtgtgtgtgccttgagaaaacttaagatctacttcttggcaaattttaaatatataatacattgttagcaaytatagtcaccatgctataccttaggtttccagaacttactcgtaactacaagtttgcatcctttgaccaatgtctttccaatttctcctacctccagcccctggttaccacctttccattttgtttctgtgagttcagcttttatatcaaaacatcatgctgcacaccttgagtatatacaatttgcatttgtgaattatacctcaaagctgaaaaaagaccccaaaaaacccggcatggttcctaaccaaaggagacacttgtaaggctttgtatcctcctacagtttgcattttgtatcttctgaaattctctcttcccctagaattcatactgataaagcttatacgcatttcaaaatatatgtttgaggctgggcgtggtggctcatgcctgtagtcccagcactttgggaggccraggcgggtggatcacgagatcaggagatcgagaccatcctggataacatggtgaaacctcgtctctactaaaaatacaaaaaattatcgggcatggtggtgggcacctgtagtcccagctactcgggaggctgaggcaggagaatggcgtgaacccaggaggcagagcttgcagtgagcagagatcgcgccgctgcactccagcctgggcaacagagtgagactccgtctcaaaaaaaaggaaaaaaaatatatatatatgtatacttgaggcaagtacaagtcaagtacccatctctctctatttttaaaattcatgctttctctgctatcataacattcggtctataaaacgttgatttcattaccaaggcaaaggttgatgttgatatcaagcaggatgttacagaaataaatcattggatccactttacttctttcttactttcagactttgtctcagaactttattaaacttagcaaaagttaaaaagaaaggtagtcttaactgaagactttgagatgattttagaaggagtttagtaacattggatgaactattgtgtgtcactaatcatgtcagagaatgtaacttacaactgaaactttggagtctgtaatctttctgtgtgttttttttttctttttaagacgattcacctggtcacttctatcactgggtgaagctgattgtatataagctagatctgccttctgcctacctttatgttagtactatttttacgtttaattttgcccaagttgaaagagattgcttggttcatggggccttaaacatttcaacatttgtccttcacaagataattatttcattaaaagtaaattacaatttattcagtagctctccacatgaaaataataatcagatggtaaatggatgccctaagatatgtggagaacaaattaccgtggtattttaaaggagagagttttctaagctaacttttatgcatgcagcatctccctggctaacatgagcattgatgataatttctaccattaatgagctcatttttttttttaatgagactttgtttttacttttaaaaaacagtaacctaaggcaggtgaagtcaaattgttattgctgggaagttgtgtttcaaatgagcactgtaaatgattttgttgagcaggcgttttttgttttgttttgtttttgagacgaagtctcactctgtcgcccaggctgacatgatcgatctcagctcactgcaacctctgcctcccacattcaggtgattcttctgcctcagcctcctgagtagctgggattacaggtgtgtgccaccacacccggctaatttttgtatttttagtagagatggggtttcgccatgttggccaggctggtcttgaactcctgacctcaggtgatccacccacctcggcctcccagagggttgggattacatgtgtgagccaagcagatggtttttaaactggggtccaagaacaagctttagaatgttagaatatctccccaaaaccatatggaaaatgctaggggtttttttttttttttttgaaagctcatttaataaaggagagcatccattgttttcattactcttcttaaaggggctgtgactcccaaaaagtgaagaacaaatgcatgtgaggaaaagtcacattctgattagtcatatgttgcttaacaacaggagtacctgctgagaaatatgtccttgggtgatttcgtcattctgcaaccatcatggagtgcatttccacaaacctagatggtacagcccactacatactacggttgatggtgtagccattgtaatcttaagggaccaccatggcaaatgactgtgtttcttttgttgttgttgtttttgagatggagtcttgctctgtggcccgggctggagtgcagtggtgtgatctcggctcactgcaacctccccctcctgggttcaagccattctcctgcctcagcctcccgagtagctggactacaggcgcgtgccaccatgcctggctaattttttttgtatttttagtagagatggggtttccccgtgttagccaggatggtctcaatctcctgacctcatgatccacccgccttggcctcctaaagtgctgggattacaggcgtgagcctccgcgcctgcctggcaaatgactgtgtttctatagaaatgaagagcttagacgtgcctggatggctccagataacacccagctgagccttacggctcctaatgggtcccatcctccactgaaatgagatcagaacaacccatggggcctgacttagtactggccagtagaactggacaatctgttgatgggtgtattctcaaactggtactgttctgttgggtagcccctagccactggtagcaagtgccactgaggaattagaccttaaccttgacttcatgttaattagtcagaattgcagtggccccttttgttggacagcacaggaccagaggaagtggatttgcactttgcatctgctgataggaactgaaaaactgccatgcattgcctattgacctatccatgtaatttgtcatacttggatagcagaggaaaaatctaaaatactgtgtttttcaaaagaaatggaagcttattgtattaggggaaaatttcctggggattccttatttctttcacatatacacacacccagtgcaagcatgcacacacacacactcgcacacacactggatacagttttgtaggttctttgtgtcccgaaaacataaaatgttcatttctgyattttgaattatggatttgaagatccatgctgtgcaatctcagcatcactaataacgcttgagttgaatgctccaagctcacttcacaaggcagctctcgcttagggagcggtttgcatggaggtgctttgaattccgggacagagtggtttggggaactagggggattgcagtctctgttgacaacgtgtcctttggctgcttggttgttctttcctacgtttgtgtttcggtttaaggtcatggtgttgttctgggagacattagcttaaatagcgttttgtttgtttttgctttcgacgtgtttaaaygtatggatggaaactaaagttgtcctctgggaaccagggctgtgatrtgcatgattagatctttctgtgttgatggcttgtgtgagatcttgtgattacccagcgaactgtgccaaagtttcattatttattcattccttccaatgattttggagtacctgctgtggctactaaggatatcatgtattttcctcccaaatgtctgcaactcataaacctctgacagtttagaatgtgtgtggagccgggcgggatgatcataagaagagatggtgcgcttgtcacctgtacaagccacttagattcccaggcagttttctcacctgaaaaacgagagattgaccttcagtgtttccaaggttcttttttttttttttttttttttttttgagacggagtctcactctgtcgcccaggctggagtgcagtggcgcgatctcggctcactgcaagctccgcctcccgggttcacgccattctcctgcctcagcctcccgagtagctgggactacaggcgcccgccaccacgcccggctaattttttgtatttttagtagagacggggtttcaccgtgttagccaggatggtctcgatctcctgacctcgtgatccgcccgcctcggcctcccaaagtgctgggattacaggcgtgagccaccgcgcccggccagtgtttccaaggttctttgctgctcccaagtcactgatgtttgtgtatgtctacgtgtatgtgtgcttgtgtgtgtgtttctgtatgtatgcatatttgtgtctgtgattgtgtgtgtttgtatgtgtgtgtgcgtgcgcatatatttagcttttcctcataaatctttattattaaaatgagctcacaacagaagaggatgagaactcttgggctatgtaggaaatgcagggccagagggtgtattaggatcaagaagaggccagacccccaggtcgtggacctcctcctgccatgggcccacagcccatgtggttttgtgaggtmgcttgaaaacctggttaacctggaatgtaatttttaaacatgattgtactttgaggaaagaggctgttatttcttgttagagggatctggtcatcttttctgctctgttgtctttgtttatgctctcttgagagtcatggttccctctgcaccttgggcttggcccgctgcggggtagcccctgtttcccaagcatggtgggacccctgctgtgcctccacatctgtgttctccatctgctctggaatgccctccctgccaacgcacagagctctccagcctcggggaacttgctgctttggttgggaaattccccttgggattaagcgttcctgccttcccgcagcactttcctagctcagagcaggctcacagaccgtgtgagtgtccttgggtacagaataccacaggcaagtgagatcattctccattgcatttcttttcaactacaatttgagtgatttttcagaagtacaagatttacctgattcttacatggaggtagtgatgtattattaaatacacagaatacaaaggcaaggatgggtggggcgtgcacctgtaatcccagcactttgggaggccaaggtgggagaattgcttgaggccaagagttcgagaccagcctgggaaatatagtgagacgccatatctacaaaaaaaaaaaaaaaattttaagaataaaaaatcaaatttaaaaagtttatttaaaaagtcagggatagcccgggcgtggtggctcacacctgtaatcccagcactttgggaggctgaggtgggtggatcacgaggtcaggagtttgagaccggcctggccaacatggtgaaaccccatctctgctaaaaatacaaaaaatagcttggtgtggtagtgggcgcctgtagtcccagctactcaggaggctgaggcaggagaatcatttgaacccgggaggtggagtttgcagtgagctgagatcgtgccattgtactccagcctgggtgagactccgtctcaaaaaaataaaaataaaargcagggataatacctcacttcccctgcttaaccctagcatcaagagtagatgaatacacaagttgaattggattaggtgactatatatcaaaaacaattcagctcagctgttgcactgaatgaacgtttttaaaataaccgcacagttgactatccgagttgccacctgcccttatttggtttgtcagagggtgggtgaatatttagggacactataaggggagtcctctcctttctctcccacctctttccttttgctctctctccccctttcccttcctctcttttcccttcttttctttcttttcttttccttccttttccttctcttttcctctcctctttcctcttcatctcttcctatattctcttttctcttattctctttctgtttctcccctttcatcttcaagacataacaacatggctatggatatctgtaagtttgactgattttaatgtgtgcaatgataatttttaaaacatgcatagtatatacataatatgtctccatttacacggttctgatggctttcttaatattgctaatactaaaaaaactttaaaaattattataatttgaaacatgaattctgatttctaggcttcatgataccttgtggaaagaagctgttatttcttcttaggattggtcattttttcttctctgttatctttgtgtatgtatgtattatacatgtatgtgtacctatgtatgcgtaacatccaaaaaaatccacatttaaaaaaaatgtagtttgcaataatctttttaaaaatgtagtttgtcataatattttttaaaatgtagtttgtaatgaggagaaaatgagtacatgacaatcgagtttgattttagtagagcaaaaattaaaatcaaccctcagcttatgctttggtgtttgttaactcaaatttaaaattagaaatgtggtaattatttggcagttgtggctttctcagggaaaccatatcatattgtatgtgtgtgtgctggcctttaaaaatagatattgccacgaagctcatcatctgaattcatggccgactcctggaagtggtgggctttggaaagcagggctgtgagtttggctcttacacttccagggagctctccattccagctttggttcccttcagtccatctgtggtcaaagctcttttgttttcaaagctaactgctgaagagtaaacactcttgaccctgactgtaaatatgtgtcatacgtctggttagttttagttttaactgaacaaaatcattttggcagaagagtcattaaagtttgcacaaaatcctgaccttcacatccctggttttcctcacatacgcatccgcagggagtcayaatccatttgaaaatatttcttctctgggactgaaaatctcctaaaacgtgtattcttcagcaaacaaagtatctcataraatgtaaacgtggatgactgggggaatacaattttttttgcgcataatgacttctgtcagtcctctaagaaattcaaagaattttcacggcttccagtttaaattctagcgcctctggccatggccatggtttgttctgtgtttgattatctttccgttcaggggttcgattgttactgggctactttagacaaagctacctggatcttgagttgccacttttagcccaaaatccccttcctacctgtttaaggggcagtggagcacttggtggccacactggctctctgtgttaaggtgtttgctgaaaattagctgtctacggtggcctatgcccgtagtcccagctactcaggaggctgagggggcgggaattccctgagtccaggagtttgaggctacagtgagctctgattgcgccaccgcactccagcctggatgacaaagcgacaccttgtctcaaaaaaaaaaaaaaatctgctgcaagagcttatttgtaacctggaaggaaaggagtagtccagggtttggggcagagcctattgcctctgaaaagacccagtaaattctctggggactgcttgtatccttgtaactagatagtcgtcacacatgagtgaaaagaaggcatttgggctttgaaggtggtcaagagcgtccaggctgggccaggcatggtgggtctgtgtgagaagcagagcttaggaaggctggggtctgaacatgctttgacttttgctttgtgcaaccagtaatccagaaaaatcctacctgaagccccagaggctgtgcttcttcagcagggtgtcatattgtcagggagctgcaaacagcctgttgtagtcagaaaagacggtgttttcctttccacagctttatggacataaaataaaacttgaatttgacaaacaatacaataaatcctcctttcccaaaaattacgagttgaggtcatggttcctaatcggaactgtgtgcagctgttggatttttggcgctttctagagctttcactaaaatcaaatgcatttaaacaccctccctcctcaagaggacaggattagcccgcctccccaggagaacagtgctctsctgcctgcgtcagcaagctccttacacagtggtctcctgcctgtgtcagcgagctccttacaacagtctctgtgcacgtcccatcactttatcatggattagaggctgcaggatgttttcatatggcccatgataatgtaatgatggctggtactttaggacttgaaaacctcttaacgtcttggccagactgtggactgttctttcaggcatctgtcttttaaatcagttatctccatttgctgtcaaatttggcctgcattggccggctttattatttctattgttccatagagagccacactgaaactaatttgagaaaagtgtaatctctattgaaaacttggagtccaccagcaagtagactgtatattttggagtgtccaccaaaagctcatagtcactgtcacctcgtaaggatscttccaatgaatctccaaaaagtagtttacatctgcatccttggtggagattttcttaagtagacagaatttctctttttttwtctttctttcttttttttttttagattagttttcctttttcgcccaggctggagtgcagtggcacgatctcggctcaccgcaacctctgccttccgggttcaagcgattctcctgcctcagcctcccaagtagctgggactacaggtgcgcaccaccacgcctggctaattttttgtatttttagtacaaaatacaaaatagagaaatacattagaaatacaagtacgatgctcttgtcagggaagaaaaactctttctttatcctctcttgtgcaatgaccaggggcctgcaaatgtaactgacaaaagtcaggttcacagcagaaaagaatacaaatgttattaataatttatatgtatgggagttcacagaaaagaagtaacactcaacagatcagacttgggagcttatatacctttcttcataaaggaaaagagctttgggcttcaagggatgaacaattgtgcggaagcaactgggaaatacacgggggaaactaggggaagataagcgttattttagtgaggtttgtttgtgcagactcatctccatctctggtgttaagagttgcacttcagccaggtgcggtgtctcatgcctgtaatcccagcactttgggaggctgaggtgggtggttcacctgaggttgggagttcaagactagcttggccaacatggcgaaaccctgtctctactaaaaatataaaaattagccatgcttcgtggcgtgggcctatagtcccagctacccaagaggctgaggcaggagaactacttgaacttgggaggcagaggttgcagtgagcagagatcacgccactgcactccagcatgggtgtgacagagccagactccatctcaaacaaaataaaaaagagttgcacttccccttcctggtacaggagtgggagacacctgaacaaagggaagtttatgcctggcttttaggcagaaaaagtgggcgcagagatcctccgttgccttcaactcagaataatccttatgccagagtggcatattttgaaatggtatattccagaccctgcttcatgctttacataaaaaatatcagtgcagtacaataaatcctaatatcagattacygtgttttcagtgtgacattttgtttattggaatctgtcttgtatgtcagtttattgtatattttayttgattttggactaacttgcatgtattatatatcacaattgcccgaacctcagaacgagtttacacgcttttgtcttaaaaatggaaatacaggctgggtgcgatggcttatgcctgtgatcctaacactttgggaggccgaagtgggtggattgcctgagttcaggagtttaagaccagcccgtgcaacatggtgaaaccctgcctctactaaaatacaaaaattagctgggcaaggtggcacacacctgtagtcccagctacttgggatgctgaggcacgagaatcgcttgaacccaggaggaaaataaaaaggaaatgcaatttctcaaatagtaaaggtttaataagccacccacctatgtgctgaaataaccttgaattgataaagatttaaacaaaaactaaatttggtcatctgtataagcatattatttagatatggggtatcatgccatgtcattgcaaattgtgtaggaaaagcatcaacttctgtttaaatttgcttggctgaaataaatgtgaggaagtcagtgtgggagtttatggcaaactctgaattattctgaaaatagtatatttcaaagaggcagrtatctctaaacaaatctgaacaggatttggaaaacatttttgtacttaaatttgatattatgcctgatatttaggacttctaaccattactgcccaatgcttgatatatagcaataaatatttgtgaaatgaagaaattaatgaatggaacacacatacttgaatgagcagaaagactgaaagtacacagagctgaaagcctgtttgatttcttcatctgtcaagctccctagtgaaaatttgctttgtgacacttctgattcattcaaaccttctccagaaggaaagtaattaagtgtttttgttttagatagttccatttttatactgcaggtgacaagcgaggaataaccagctttagcttttaacacaatgagtaattaaacacagaagttactgccaacaaaattgaaatcaaatctgtcatttgatccagtgctgtgttgcatttgctttgtgaattggtggggaaaatatggtaaataataatacaccattgtatgttaagaaacagctgggagaagtakgatcattttaaaaggctaagaaacaaggtggcaaacatctagaaaattctttaattaaagctaaagcaaatgagataagatcaatccttcgattgtgatatgatagttttttaaaaaatagcaattgtttggtctgtttcttaaatagatgctgtcatttaccttaaaagctttgctaacctcaagtctgactgtgggccttctctgtggccgctgaagctactagtgttggttcaaattccaacactttttgttatgatttgtattagcatggggggataacttaacttctgcctcaatttcctcatctgtaaaatgggaatgatagtagtacatatcacatagagttgttatgaggatcagataggtttatgcctgtagaacaccaaaagcgccacttgcagcatgggcatgtttattgaatgatgatgattaatcttcattaggacccaaatgattcgtggatttcattttaaccataagctgcaaggattttttttatactttaagttctgggatacatgtgcagaacatgcaggtttgttacataggtatacatgtgccatgttggtttgctgaacccattaactcatcatttacattaggtatttctcctaatgctgtccctcccctatgcccccatcctctgacaggccccggtgtatgatgtttccctccctgtgtccatgtgttctcattgttcagctcccactttggagtgagaacatgtggtgtttggttttctgttcctgtgttagtttgctgagaatgatggtttccagcttcatccatgtccctgcaaaggacatgaactcatccttttttagggctgcatagtattccatggtgtatatgtgccatattttctttatccagtctatcattgatgggcatttgggttggttccaagtctttgctattgtgaacagtgctgcagtaatcatatgtgtgcatgtgtctttatagtagaatgatttataatcctttgtgtatatatccagtaatgggattgcygggtcaaatggtatttctggtcctagatcatgctgcaattatattttttttaactaaaatgttattgtaattctttttgtaacttcagtgataaaagtaaatgatttgagcctatgatttccacaaaatctagggaaatgatttaatatcctttaatttttwaaaaaaaatggctttaaaaggttctgttgtggtatagttagtgataatagaaagctcctatttctggtgcctcagtggccattccagagccagtttcctgaggaggctgagctcagtgcctaagacttagccaggattctgcagctgattcaccgaggaaaccttgaccacagtggtctcatacattccataaggggaaaggaaaactttcttactgatgagttcgttgggcttttggaattcatatgtaaggtgaytatctggattttagtacccttaggtcaatcctttaaaaaatacgtaaaagaagagaatattcttccggttgcaatgtcaaattataggtgagtatctgcatatttattcatccagggaaaattctggattcactgaaataaaatatttcaactagaaccatatcaccatgggtttggaacagatcatcattcatcaaggttattgttttccaaattggatgatcattagaactccttgataaatggccaggccccacgcctgtaatcccagcactttgagaggcctacgcaggaggatcacttgagcccaggagttcaagacaagccctggcaacatagtgagacctccatctttacaaaaaaaaatttttttaagtggctgggcatggtaatatgcacttgtaatcccagcactttgcaaggctgaggcagaagcattgcttgagcccaggagttcgaggttgcagtgagccttgattgcgccactgcactccggcctgagcaacagagcaacaccccactctaaataaataaataaataaaatacttgataaagatcttgaaaaatatggctttctggtccccacccagacctatttactcaaaaccagagggtaggkattatcaacctctccactgcaccagagcatcactcattcggcccgcatccctcctccttcttctttttttttttttttttttgagatggagtctctctgtcaccaggctggagggcaatggcacaatctcagctcactgcaacttctgcctcctgggttcaagcaattccccttctcagcctcccgagtagctggtactacaggcacgtgccaccacacccagctagttttttgtatttttagtagagaccaggtttcaccatgttggccgggatggtctcaatctcttgaccttgtgatccgcccacctcarcctcccaaagcgctgggattacaagcgtgaaccaccacgcccagcctcatccctccttctatagcatcttggcccagtgccatccagccatcagcttgagtgaacccaccagcatggggctttgtgaacattgtcctaattgtcctgtacagattggacgtttgtgactaggaaaagcacatttactaaggatctacgttttttaaactttttgaaatcttttttcctttgctatgttttttcttttcttaactgcataacataaatctcttagaaaatcacatttaacatccaagagaactcatgatgtcctcttcttgtgttttctgggtgcagagctccagagctgtttctttgaaatacaagttatctgttgaacttaagcatatttggcagagcamcctgggaggacagcactgcccccaaactctgagtctcacaaggagggaggtcctttatcagcgtgcaagtgattcccctataattccacccaacccaccaaaaagcctcacttccaactccatccctgataccatggatgatgtaaagaatggtcagtcatttcactgcctgatgtcactaccaatacacaagaagctagaaaggagataaacagagagcagggaactctaaaatattttccctgagaatcactggaacaaggggtctgattacttctctgttggctgttgaggatccatagtcaaccgactgtccatgctcctcctattccctgggacccttgctcgaatgacctcaccacctggctggcacatgctaccctggggtggaarcacattctcttatgacttgcaatgggaaaaagggctgaggatcgattttttttttcctgagatagctgaggaggtgagtcctgccaacatctgagctacccsctagggcaggcagaatatttcyggagaaaaacgagccagcatattgctaacagattccatggcattccaaaccccaccctcccactgggccatttggtatctcctggagcgtaaagtccatggaatgagagattctccccctggttctggcgtggccccattttctaataatacccatctgcagtcttaagcctttaagctgtcccaagggtagggggtctcagggaaccagttggctccagtcaccttgaaggattcactctgagttctgactggttgagaccagaagttctcgtaagtagcagcttcgyttctgagatgctcctttgcctcacctgcacrattctgcagagctggggtcctgcctaccttttaaccacatctgacaataactatccttaccttttgctaccccttaaattcagacttctttacctttggcattggtttgctcctgattcctctccaaaatattctagaatgctaaaaaatgtcaaatgctctttatcttaaacaagggccagtgtttgaaccatcatatgtcatagtgacacgcctgtcagagctaaaatgagacttattacatgccgtcctgcttgggagtagttggggatgagtaaccacttgacacgttccagcagtccccccacctcggtccctattctagacaggctagagctgtggccataccagcatccagtccttatgtttaaaacagatcaagcctctaaaatgagggactttyaagtgctttttttgaaagtgtgaaggagcagtrtactgaagataatgaacaagcttccttctcactaaacaagagttaaccaagaattgcattcacagggatataggcaaggcaggaatagacggcgggactgtagatcatgctccagtgaggatacttgactgaggaaggagggggcgacattcctctcaggcacttagtgagttgggtataagtgttacttattggtatccaaaaaggcaactagaaatcaaggtgattcatgtggaaagagcagaagagtrtccatggtaattatgaagtagctgatggctctgggcacaaaagtgagctgaacacagttacggggccagtgtgctttgggtagcgaagagcctccttcagcagctcagaaatgcatgagcgagagtgcacctaaagaatcacaagtgatgcactgcacaggarttacaggaaatgaggagccaggggctgagggagtctgggaaggtttcataggcccaaagggtgggtgggatttttgattcatgaaaagatggaggttggtgggcaggaggaaaggacacatgaaggtagaatgggcagggtgcagtggctcacgcctgtaatcccaacactttgggaggttgaggcaggaggatcatttgaggccaagagtttgagatcagcctgggcaacatggtgaaacctcgtctctactaaaaatacaaaagttagccaggcatagtggagcatgcctggagaactgcttaaacccaggaagtggaggttgcagtgagctgaggaccatgctactgcactccagcctgggtgacagagcgagaccctgtctcaaaaaaaaaaaaaaatgcagagtgaatggagcttgtttgggcaggggagagccttgattgacaaaacaagtggtgtgtgtttatggacaatggcaaaccttgggagtctggaaggaacagatgctgtggccctatggaggatggagaggaggaggagacaccaccagaggtaattcagaggctgttgtgattgtacaagtctcagattctgcaatgatggcagcgaggagggaaaggaagggacgagggtggggcgtgagggaagaattgcccaggttgaggaactgattggagatagagatctgcaagaactcagagataaaattgggacaaactacccagattggcagggagcccgccacagtgtggaaatgagaaaagggtgaggggttgctctgacttcacggtgatgagcctgtccagtccttaccagtctctcagggggagggaggtcacagtgtcacaggatccttagggtgtcgctttaccagctggaaacctctgttgctggtggcacctctgcctgagttttgctcatgcctgytggacttgttcygtccactcagcccagyaagatgtgctcagcttgtgctaccagcctggatcccatgcctgccaagggcaagccaggcatggagcagcaagtgggtatgtgagtgagtgaacacagggtctggccactgcacagccaggcacgctggctgctgtggcagggtgggaagctccatatgccagctccctttgaggctgyggctggaccagatgtgccacaagtggcttccactgtgggcaccagcgtctggatrargggaatgtggtggtgcccraaagctcagagacaccaggaactgcagagtccccaaataggtrttacagcatgtcacagccatggctcagggagcaccaaggtctgggcttccagaagggctgcagctcttctctacttcttgttayctacagtrtggtgagtggggggacatgtttcagcccatttgtgttacagctctttcagtcccaccaccttgctctggcccgtggctcatgggctggaccagccccactgctgyttcccatcatgtggggtggccactcagcaccagcagagggtgggagggctatagtrttaacagcagctccagctctgaggtctgggcccccagaagggttgccatcctttactcccatagccyaggagcatgtcaccacccacagctcagcgagctggtcaagaacatgttacagctcctttcacttccgccrttcagcaggtcctgagttcttgtccygtgtctaggaagaatgaggttatgcagacaactgggtgaacaaggcaggcaggagctttattgagtgacagaacagctgtcaggagacccaaagtgggtagctcctttctacaggtggtccagacaagtgtcttaggctggctgagtctggggtttttawgggctcagaagggaggaagkgcatgctgattggtccataggtggtcataggcaggcctggaaaaagcaccrtctgattggccaaaaggcatcagtgaagttctcactccaggttgcggactccacctggaacggacagctgagcccccaggcttcaggccatccctggcttaaaggtagggtttcactagagacccaccccttcctgcctaggaacctgtctgcctcccactgccatcaacatgccatccatggcacscaggctatctgcactgaggggcacccacatgcccacgctcagctgccctcaatgcccccagcctccctcccacactcatcactgcccgaagtccagaaagggctgaggcagcagggtgctgggtctgccacaactttgcttcgcactggagcgggcacttggagagaggagaggccagagagtgggaacaggcacctctgcctgaaggaataggrggcttcccaggccctggagagtgcagggatgcccaggtccayrgctgggcagctgcaactgcctgggagaacaggctcccatcctgccagcttggtagggygcagggctcctgctgggatcacctattcctggcccctgccagctccacagagtgcacaatcccagccatggcttccccactgcagctggcgtcctcacagcagccaccccagatgggccactgctgcygtcaacagttggcaggaaggcaggctaagcctggtgtctcaaccagaggactttgcagcagagrtaattgccaaccccacttccactgccttgacgtccctcttgcagcagagaagctaatcctgcccagcctggccatgagtgagggcacctgaaggggtgaggaggcrggggtaatgttgtgtaggtgggagggggcagtagagagtcccatactcaaagtgactgccaaatccagggctgtgcatagagtgactgctgacagcstttgataagctttgctgtgagtccaaaagaatgatcggatagatgcctgtcttgcagcgcatctacattaatctcatarcaaattattcgtctcatattagagaaagtttagctttcttagaagcttgatgggaaagagcctcccagctcttagagtttgattttcgcaactcagttcacatcttcttcttactccaggttcccagctccttgagccttgcccgtgaaggggttggagtcaggatgggaagccttgagctgccttgacctgctccatctctgactcagggatgtgccctgcttgtcacagcatgggtgtgctgggccttggggcatcttttcaggcagagagcaagacgttggcattgtggaaagctgtacctccaaacagcagcccattcacagactacagaggaagaaaagaccacacttgctacagtaacaatgcaattcagtaccagggaataacttaacatgaaacatgtcaaatctatgtaaacaactggaaggcactcctaaaaaatacaaaaaagaatttgaaaaaaaaaatcatgttctaaattagggaagtttgaggttctaaatatatcaattcttcctaagttaatttattacattttacacwttctcaatttataaaataccaaccattaagaaaaaaaataaactaggcaaggagattccgaagttcacatggacaaataagcaagagctgccagttattgaatgcattayacagcctcagtaattaaaataatgtggtactggcaagtgaataaacaagacagcagaacatattagaaagccagaagtagtcccagatatatatgagaatacataaattttgaaacgtgtcatttaaagtcaacgaagaaaactagattgcccaataaacataatggcaactgggtaaccataaggaagaatgaataaatcatgccccacaccaggataaatttctaatggatcaaatatttaaatagttcaatgtgtaggccaggcatagtggctcatgcctgtaatttcagcactttgggaggtcraagtggatggatcacctgaggtcaggagtttgaggccagcctggccagcgtggtgaaacctcgtctctactaaaaatacaaaaattakccgggtgtggtggcacgtggctgtaatcccagctgcttgggaggctgaggcaggagaactgcttgaacacaggaggcrgaggttgccatgagctgagatcctgccactgcactccagcctgggcgacagaacaagactctgactcaaataaacaaataaaaaaatagttaaatgtttttaaaaatgaaaccacaaatgcattattatttggaaaaaccaaccgtaaaaatacatttttgaggcaactggagaaaatcaattatagatcaagtattagatgataccaaataatattgktaattttgttacatataatagcattatagttatacaaggaaatattcataattttaaaatgcatattgaagtatatagaggtaaaatgagttgatattttgggtgtactttaaaataattttgttgagagacagagtcagagagagagaagagatagaagaaagaagtataacaaaaccttgatagcagttgaatttaggtgggggtatatgccagtttattatagcattgtctctactttgtacaggcttaaattttttcaaaatcaaaaatattggctggttgcagtggccagtgtctgtaatcccagcactttgggaggctgaggcgggaggactgcttgagaccaggagtttaagacaagcctgggcaaaacagcaagactccatctctacagaaatttttaaaaataggccgggagctgtggcgcacgcctgtaatcccagcacttaggggccaaggcaggtggatcacttgagttcaggagtttgagaccagcctggccaacgtgacagaagcccatctctaccaaaaatacaaaaattaactgcgcgtggtggcagatgcctgtaatcccagctactcgggaggctgaggcaggagaactgcttgaacccaggaggcggaggttgcagtgagctgagatggcactactgcactccagcctgggcgacagagcaagactccatctcaaaataaataaaaataaaaactaataagyactagaagaaaacaggagaatttcttcatagctgtggatttggcaaacctttccaactgatttaaaattaagaaaccatgaaagaaaagattgataaaaatcaactatctctctctacacaaacacacacatatacatttatttatayaaaatatatattatgtaaataatatatatatatatttgaatatatattttttaaagccacttttccactaaggggaaaaaacccactaaagagaaaaaaaaaactaggaaaactatttgccrctcacatcacaaacaaatggctaatatattaatatagacatttctggaaatccttttaaaaagttaaaactatcaaaatagacaaaagatctraacagacagctcacaaaaaarggaaaaggaatttaaggagtctaaaacatatggaaagatgctcagcctcatttttagtaagaggaaagaaatgtaccatatctgggaaacctcagagcagcaaaactctagagctgctcttgcactctgctgaggctggggggagacgggaaccgtggctgatgggaatgtaaactggtgcgatttgacagtttttgtcagagttctttcagatacacttagattcaaggtgatgtagctttgtttgaaaacagcaaaagaatagaaaccttaaggcccatccgtagaggactaagtaaatcacagaccctgcgtacagtaaaatactatgcacctgtaagaaaatgaggctaatgcctgtgtgcctatatgggaagatctccaaagcacattgctaagagtactttgcacacttctgcttatatatgaaagggaaactaagtrtctatttgtatttgcttgcataaagaaactccataaggacaaacaagaaacaaataacagtattccckcccttatcctgggggatgcatttgaagaccctcagtggattcctgaaatcgcagatagaacctaatcctgtatatactgttttttccccatactgtacacacataaacctatgataatgtttaatttataaattaggccaggtgcagtggctcggggctataaccccagcattttgggaggcccaggtgggaggatcgtttaatctcaggggttcaagaccagcctgggcaacacagcaagaccctatctttacaaaaatttttttaaaagattagctgggcatagtgacatgcacctgtagacctagctacttcagatgtcaaggcgggaggatcacttgagagcaggagatcgaggctgcagtgacgtatgattgtgccactgcactccagcctgggcaacagagcaggaccctatcaatccatcartgagtaagtaagtaaataaataaataaaggcacaatgaaagatcaacaatatggccaggcgcaatggctcacgcctgtaatcccaacactttgggaaggccgaggtgggcaggtcacttgagtccaggagtttgagaccagcctggccaacgtggcaaaaccctgtctcttactaaaaatmccaaaaaaaaaaaaaaaaaaaaaaaaaaaagccagacatggtggcacatgcctgtaatcccagctacttaggtgtctgaggcatgagaattgcttgaacccgggaggtggaggttgcagtgagccaagatkgcaccactgcactccagcctgggtgacagagcaaaactctgtctcaaaaaaaaaaaaaaagaggaacaataataaataataaaatacaattctagtaagatactgtaataaaaggtatgtgaatgtggtgcctctctttctctcaaaatatcttattgtactgcaccatggataactgcaaccttgaaaaaggaagcgatggacatggggcgactactgtaactggcacctcagaaatggggaagggggcggaaatatttcactgtgaaatattcttctgccactttttaactttattcaatcacatgagtcaaaaaattacaaatgtaaattggatttttaaagactgtactgtgggcttattacatagtcacctttgcggatcaagtcctgactttatgtatgacatctattagcagcctaattttatatgaattgaatgcaattccaaaaataacagttaggtcatttgaaaacatatgccttaggtgcccattaaatgctcttttcaatatctgttttgttcagaatgtagtctggccggccctgggtgagtagttccatgaagtaagatactgtgatcactttgagagggcagggtccctttgctcattcctatatcatttcatcaccttcctcatgatccagccagctgctctattaaatwtgaaaaccaagtatgctttcaacctacaggtgaagaaattagatgaactgtctggccataaattataattcttgggagccagagctgtttcactgtggttgagaccaaatttcaagcatctgctcactgaatgcttttccatttttgctttaaaagcttcatatgagtacatacagcattttatttgcttcacagcatgccccacagaactctttcttggaaatacagrgattcctatttttagtctttcaggaaacaaaattactaacttctccccctgcttctctttttcttctttataaagaagaaagggttggaaatcttatttgcattttcattctctgtgatacgaggatgaggggggagggcagggtttgtgggggatctttcacatcgtttctcccagctgggactaaataccatgcatggccacagccttgtcctgttctgcacttgcttttatttatttacctccaaagcaaaacacatccagcaaggggaaggagtgctcgagtttcagtcrtcaggatggtaagaagtccttcattatcatcttcctgggcatgaaacgattttaaaacaactgatatacctctccctttctttttttgagatggagtttctctcttgttgcccaggctggaatgcaatggtgtgatcatggctcactgaaacctctgcctcccaggttcaagcaattctcctgcctcagcctcccaagtagctggaattacaggtgcctgccaccacgcctggctgatttttgtatttttagtagagacagggtttcaccatgttgaccaggctggtctcaaactcctgacctcaggtgatccaactgcctcggcccccygaagtgctgggattacaggcgtgagccacagcgcccggcctctccctttcttttttaaaaaaattatatttagtcttctttcaggcttgaccatttgcatctttaaacattatattgcaaagccacttgaaagctgcagtttacaaatgtacatgattgataggtctayagattttcatagaaggcctgacttcataagaatttatamtcatsaataaaaacatttgcattctctttcttcccccaaatcattctggcagtgaacacttcacctgcccaggccttttatggaagagtgtatgtaatacctctgagcctttggggcctgggatccaggttgtcccacagcagrgaagggagggtgagacaaggcaggttaagcaggtacggcatgttggaaggtgtaccatgtgcccttaaaggtgaacccagtgcaccttcatgaaccgtggtacacctttaagaacttggtatgccttcatgaacacttaaagtaccagggggcacttcaygaaacatcattaagtttctcctaagtcattgcaaaatgatcagaactcttttgtcgtggacagcatttcttttgtaggtgtttagagttgccaatagctccataaattgttaaaagcaaaatattgaaatataacctaataatccagggccccatgttttgaaagatcactgccaaatctttcacgtagataccaaatactgtgtcaacatttagctaaatcgaactggtggtgatcccaacaagcaatgaactggtacaaagagaaacaattaggagaataaaggactcagccatcaacaaactgaataatgatcaaatggacaaaagtacagataatgaggaagagaagaaagagagagggagaggaaagaggtaaccggtgctgagcaggagatgatgccacctggtagcagaatcagaagcctgcatggtgcggagtgcactattacaaatgtgaatgtcatcaatccttagaacaaccttaaagtcattgtcattagaagaggagataattagcctgagtcacatggctaaaaagcactagagctgggctttgaactcatgtctgatgagcccaggctcttactctccaggctgttctttgcatttatggtaggccrtcagtcacctgtttctctctgcatcagagctgaaagccacaggttcaatcctgaaatgcgcctatggcaagaacctcattctatatagtagttgcaaattgtgcctcaggcttaaacctctcctagaactggggacaaaagtggctagatgctatggtgaaagaatatggatagttcagtttaaacacatttctacttttaaagaaagaatrcattaatgcattattctccctaataacgatttagaagcatcttgttgatagatacagagkagcacattttaagctttataattttcagtttcagctctggaattgggtaaaactgatgtgtacattggttttaggttaaaaygtggcatgtagcattttggaaagcaaagtgaataaataaaaatccagggggaaattttttttcaatgcttttgctctaggaacttatttatgctggtatcattagctgtttttcttggatgaccaatgtctataattgtagtcacatatttctgagataggatgaaaaccacaacaaaatacaaacctttcaagtcagcacataagttatgtatattaatgacagggagaaatggagccaggaaaagtggttttaaaaccgcgcggacaccagggagtgtctatgtatgtggttttattaaatctgacttctagaagcgagttgttcaccactgagtgtgagaaagaacccggaacttcataatcatatgtattgactatacttcagatcagataagtggtcccatagcacgggtcccttgaagagagatgccattgtggggttttagttagaacagtctttcggtccttctcctggttcacrggatttgtttgratgttgttctcatcacaattctaccccttcgtttttgcatagggtccttttgtgccccaatatttcatgttctgggactaagaaaatgttaattgcctattctctaataatatgtgtataaaatgcatccccaagtgacaaactttactatgtaaatgatgctgctgtttataaaagaaaatggtgagttcttacagtcctgattttgccactgacagcaccttagccaacctgtgtgtttctccatcygatgtggaggtgcaacaggcctgggctgcacgctgattcacctggggaactttaaaaaaattcccatgcctgggtcccacccagagattctggtgccgtatgtctgggtgtggtgaggggcatgggaaggttaagactccttaggagggtctaacaatgctcagctccagttggcaatgactaaaccagagsacttctaaagacacctccaacctkcccctttgtgatttctagtctgtgtcatacataactaatggccaaaattcagagtaaaaatttttcagtgattcatgtaacgagctcatccagccagacatggtggctcatacctgtagcccaagctattgggaggttgaagtggggaaattggttgagcccaggagtttgaagctgcagtgagtcatgactgcaccattgtactccagcctgggcaacagagtgagaccctatctcttaagaaaaaaaaagaatcaaaaaaatctcatccagcccaaagcactcaatagtagagtacctcttttgccacatgtagtggattttattggttcttttgtgggatgcatttaccagattaccctactcctacctctaactcttccattaggatagcaaaccaaacagaagagggctgtcattaataacgttctacttaataggcacttgatgaacatcttccacatttggtgtaaattcyattcaccctgcgagccacccatatcctgtctatctgaccgttgggaaattgattttgttatttttgcttctccctggaggactgcacaaagttttaagacaggcttggcatggtggctcatgcctgtaatcccagcacttggggaggccaaggtgggcggatcatctgaggtcaggagttcgagaccagcctggctaacatggcgaaaccccgtctctactaaaaatacaaaagattagctggctgtggtggcacatacccgtagtcccagctactcaggaggctgaggcacaagaaccacttgaacccgggaagcagaggttgcagtgagctgagatcatgcctctgcactccagcctgggcgagagagcgagactctgtctcaaaaaaaaaagttttaaaacaaaaaggcaagactgaacaaaaaaaaatggagggcaaataaaagaaagaaaacaacattctcacgatgttgaatgtgttctaaattttccaggcaagagaaaagaacagctgtgattctgcgagtttgcctgagtgtcaaggtcagacttaggagttgagtgttgtcctgcgtgtcaggctgaggttcctcgctctcatctcttacttgcccagactcgtgattgcagggatgagatagtcctgctataggaaacatttttttttctttgccagatcagcatgatcaaatgtttctaaagctaaaccaaatgacatattggcttgcaaggattacccacacccttgcatcagtaaaaaaagaaacaaactgaactgcctggagggagtggagagaggctattttgtgctctgaaagatgcccaaggcagctgtagatagcattgttttcatgaaacgttggctgggctggcctgtgcattagctcatgttccaaatctgtcaccagaagaatgtagtgagaatcttgtttcaatcttcttttctttctcgcttcactctttcctcaaccagagtccagcatctacacagccgctgtggccaaggtttgaaaacagcagttttgaataaaacctaacaggcttttcacattattctaaaaaggaatggaggccctttgatgcccatttccaggccttatttccccactcaccccagagacagttgctgctgagttttcaaacatatggattatcctttctctgaggaatctccactgaaactagagatggcagagggaaaactgggggcagccgtaactgcatgctggcatttgcagctcaggttggtcatttctgtccacaggggcacaggcagcaatccagggattttgtacaaccttcagggaccaaacaaccttttggtcctcagtcccacacccacaggttcagaacccacctgttaacccttcatgttttcctctcactagccctatggggctttttccctcaaattttttttattgtggtaaaatacacacaccataaaatgtactatcttaaccatttgaagtgtacagtttggtggtattaaatatcagtatatccacattgtcgtgcaaccatccccatccatctcccaaattcttctcatcttggaaaactgaaactctatacgtattaaacttcccattcccccagcccctgacaatcaccattctaccttctagctctgtgaatgtcacaagtacatcattatgtgggatcatacagtatttttttgtgactggcttattatacttagcatgatctacgttgtagcaggtgtcagaatttcsttcctttgaaaggctgaataatattccactgggtttagatacaccacgttttgttgacccattcacccatcaagggacccaagttgcttccacattttagctacagtgaataatgctactagaaacataagggcacaaagctgggtctgtgacaccctgcttttaattcttttgtcacaagccctgttgttttaaccttgctgtgtgagcggtggcagagatgtgagttaccctgagttaccggctgtgaatctgtaagggtccacagcaacttcagtccttgcctcctaaaaagaaataattcaactgaggggcatcaagcagaaagagactaaggcaaggttcagagcaggagtggaagtgtattttaaaaggttttaggcctggcgtggtggttcacgcctgtaatcccagcactttgggaggccgcggctggtggatcacttgaggtcaggagttcgagaccagcctggccaacatggcaaaaacccgtctctactaaaaatacaaaaattagccaggcgtggtggtgggcacctgtaatcccagctactcgtgaggctgaacccaggaggtggaggttgcagtgagccaagattgccactgctctccagcctgtgcaacagagcaagactccctctcaaaaataaaaataaaaggatttagaacaggaaagaactcttagaagagatccaggtgggcgcctgaaggcccaagagaaaaaaaaaggaggcatttacccttgatcctgggactttataggctgccctctctcccatgattcttccctcagggcgggctttctgcatgctcagtgccctctttcccctttggaagtgagcagtgcagcccgtttaaggagttatgcacatgcccacaatatcatacttcgccattttgtctcttaacgcgtatgcccaagaggttgcttctccctggggtctgcattcagttaacacttttaatgttaacaggtgtgcaacctcaggagccggtctctccctggctgccgaattaccgtttttagagaggcaatgcgatagttgctggaccatcaccagacattcctggtaggggggcgggagagccctctcctgccctgcccatgtctaactacctgtagcagctggagatcagtctcctcatcgtagcaatggagacagcatacacttaacttcatgctagcgggatcacacgaagctgccttgattaaagccctttgtgaattctcaaacactttaccattgtccatttatgcggtgtgaagatgaaacgagatatggaaagcattctgcatgcagtgaaatgctgtacaaatggacagtatagtgtgactcatttatgctaccatgggatgggttctgtacttggcccttggtgggaacttggtttccatacatgagaaagtaacaaaagggaggtgcaggaggggatgggggtcctccctctagcccaatgcccagtggccctgaaactccctgagttgtggcatcatcccccacccccacattttccaaacctcttaattcctctattgctggatggcttactgaaatgctcttcccatgatctctgtgggcaaaggcaaataatttttttttcttttacagacagggcctcgctctgttgcccaagctggagtgcagtagcacaatcacagctcactgcagccttgaactcctgggcttaagtgatcttcctgccacagcctcctaagtagctgggactgtaggtgcatgccaccatgcccagctcatttgtttttagtctttatagagacggggtctcactatcttgcttacactggtctcaaactcctggcctcaagcaatcctcccacctcggcctcccaaagggctgggaatacaggcaagagccactgcgcccatccaggaagggaatttttaaaggacaaattatggtggtgcatagctacagagcccactagacacagctctccctgaagaaggaatcctcgtgaaggagaaggggtgtgtggtgcttctgtgctctcatatgtgacacctgctcacatgcacacaggctggcctcatcatgcatgactstaaagacattttgggtcacactgcagaaaagaaagtgttgggactggtctctaagctcgccctgcagaaacagcgagctgtcctagctgtcctgggaatgatggggccacagactacatggccaagagcaggcagagcagctactgtttccctagggccacgtgtggaatgagtcacttcatcagctcaccacaactgstggcctggcacctgggtcctacggagagggcaatggcaggtaaagtgccatcacagaaccaccaggcaccgaagaccgcgttgcctgcttggacgatatgggcctggctcactgcagaagagaggcactgatgctagagactttcccctgggccatatgtatttttgtcttgaaagaggagtcgtaagggtttgcctacccaaaagctattttgtttcatatttacatttttagttctttctccattaagaaaacgattagtgaaatgaatggaattcgccttctttgctgctattgcttatgtgttcctatttcaccatcttttgtaaataacagtgttgttgctgtcagggcacttctccctcactgggcacgtgcctttctgtgctgtggccagcccaccatcgcctgtcctcacctgccatccataccctagcagagccgtgctgctctgagggtgccgggtggggctccattcttaccctagcaaactcaccagaacaaagcccacctgcccaaccctgtccttgtctcatttctcagcttcccgaggctcccttccatacccacagaggcaggactgctagagccccactcatgagaatcacagtcatttcccagcttcctggggcttccttccatgcccgcagaacagagkcgggactgctagagccccactcatgagaatcacagtttccacagagaagaccagtctagcttggactgtgggttcctggttttgcagatgtagagtggtgaaggcctaaccgaggagaggaaacaggagtgtaacagagtctccattccaggaccagcatctcttccctccccttcaggggtttaccttcctgaacttctcagtgtatgaaacacagcaggggctggggaactatacaacccagaggtgtgtttgtttcaagtattttttagagcagtttcaggttcaaaattgagcagaggctgggcgcagtggcttacgcctgtaatcccaatgctttggaaggctgaggcaggctgactgcytgagcccaggagttcaagactggcctaggcaatatggcgaaaccctgtctctactaaaaatacaaaaattatctgggtgtggtggcacacacctgtagtcccagctactcgggaggctgaggtgggagggtcacctgagcccaggaggcaaagattgcgatgagcccagactgcaccactggacttcagcctgggtgacagagtgagaccatgtttcaaaaaaaaaaaaaaagaaaaaaaattaagaaggtacagagatttcccataaactcctcgcctcccacttgcacagcctcccctactatcaacatcccccactagagtggtacatacgctacaattgatgagcctacactgacacatcattatcacccagagtccacagtttaattagggtttactcttggtgtatagcctgtgggtttgaacaaatatataatgataatatgtattattcttagaatttttttttattttggaatatttgcatgtacataatgagatatcttggggacaggactgatgtctaaacaccaaattcttttatgtttcatgtataccttatatacatggccttaagtttattttacataacattttaaatagttttgtgtatgaaacagagtttgtgtccattgaacaatcagaaatcaaaagtgtcattgtctcatgtcraagctcaaaaaccttgtgattttggagctgaaccaattttggattttctgattagggatgctcaacctgtagtacactacggggtattttcaccgccttgaaaactccactgtgctccacctatgtattcctccctcccctcccaaccccagagaaccactgatctgcttactgtctccatagttttgccaagtttcttagaactgggtataaattaagaataaaagggcatttctcagtctctaaggataagggcttgggcgcagtccatttaatgacattattttccttatgaaaaattataggattgatttattgactatttcttaacatgtgtatggtgttaaatattcttaataagttttggcacattgtccaaaatattacattgtaaatttgggaagttccatagttcttttacttagaaggtttgaattagaggtgaattgccckagatttgagaaggaggccgggaggcagagagtggaaggcatttgatgtatctgggttttgataaccaccctgttcatgttttagtgaagaccatctttggcttctaaggacttgagtctgacagataggcaactggggggcccatgtgtggatttcccttggtctggaatcttcctgatgggcagatggggagtgagaaatgctctcgagtccacagttgaaatatttggggatctttagtgacaccagcctatatcctttatgtgaaggtccaggagtgagtttcaggcacttaacagttaacatccaactgtccgctactgtcagagcctgcagaggactgtgggacaggctgtgtcttgtgtgtacttttataatagtgtamaatgttaatgaagtattgcgttataatatgattttactataaaatgacagaatatctctttttttttcaacaagtattctctaactctacaaatatcaatgtggctgctatcaaaaaattttaaacatagcgcagattagggccacagtcttcaaggtaatatttaaacctggatcaccatatttgatagctttcaatgtgaccttgaatatccaaagtcctgcttctgtttaaaacttccctacaacaatttaataaattagaattttagagactttttttcctttaaatttagaaagtgagttgaaattcaacctatttccaccacccttttgctagccctaaagaatgagatagaacattagtcattagaatgaactttaatctaggccttgatcatgaaggaaatatttagatgaatgatttgaattttgtttagactcagtgtaattttagtcacacagattttgcttgaaaatcagctaggcttcttttaccccaagrgaagatttttacctaacgaagttcaccttgcatgttttaacattgattttttatgcttactttactgttaatttggatcaaatattgggtctggaaaatgctcctccccttcctacgtaactgtcagagtccatgcaacgatggacaccttgacattgaarcctccattacggaggtctcactgttaactggaagaatcgcagctgcaagaaactgaacagcacctggcgacttaggtagaatttgaaacagaaatgagaaaccaacatgtattcagcttttgtgaaattgtgtgcttctagaagcttcttcttgccccttgccttgtgaaatatcgaagaggctttattttcttattcggaaataggtaacatgttggaaaatagaatatgcaaatattacacttagatgcttaaaagcagtgacattgtttcagagaaatccccttttttctttctttctatttttgagaaagagtctcactctgttgcccaggctggagtgcagtggcaccatcttgcctcactgcaacctccgcctcccaggttcaagcaattctcccacctcagcctcccaagcagctgggattataggcatataccaccattcctggctaattgtttgtattcttagtagagatgtggttttcctatgttggccaggctggtctcgaactcctgacctcaagtgatccatctgcctcagcctcccaaagtgctgggattacaggcatgagccacagcacccagcccagagaaacctctttatgtcccatgagcattagagcagtacccagaaccatgtaaggtactagcagtggtaaatgcctggcaggctctttgctcatcttcctcctaagccaggaacaggcatcagccctcacccagagcacttggatctccccacgtgtgctaagatcccttcgcagcatggagcttcatgcagcaaggccgatgacataagctggcatgagttctgtctgctgccctggtatatcctatagcacctaatgtgctggaaggactcacgtatttaggaacatgatagttctcaggctgtcagttttttaaaaaggtgcagggtgcaggggaggagaatctggaagttactattgctttgtcagaggtgagattctgagtaaaatgttcgcacagtagcaatgcttatgtacaaaatttttactatggcacaggattgcatcaggttttatagagagagctattacttttttataagactgcctcacttttataactgtcagtatattagcttataatacagacaattgaaaatagcaaaagcacttttatatagctgacaataaagcctcttagtttggattccctgggtttcaatgccatggcccacagtcattttactcaacaggttcttcttgagggcatggggtagaaagttctggacctgcctgggaggtcaaggtgagaatgacagccaaggagctgaagagagaaaccagcaatgcagaagcacaggtgttcccagagtatttgagatttcatgcatgtaaacacatttcacttcacatatattaaaaaagaaggccaataagtgtgtgaaacattaatctttatttggttattactagaacataagtttgtgtgggcagggagtttgtctcactgtatccacagccccagaaccgggcttggcctcttgggtgctccataaatatttgttcagtggatgaatgaaataatttgctaacatttaatttcttgcatgtcttggagatattaaaactactttaaacaaagatgtccttgcttcagggtttctatttggagtgttttgtaaaattggctttgggagatgcattgattcttttctgccaccagggggaggtatagtgcagttcaggaatcaagtttttaagttttttcaaagaggggttagtacttcaactgatactcttagatgtggataactgtgactaagttaaatcagcactgcaggatgaggtttaaaggtatttcagcatatttcaagcttaacacaagcatgtgtccgggttaaaaataatatccataaatacagcctgataatgtgcttaaatataaaacatataaataggttgcaaaagatgactgaatctttcatcattttatgatcactttctgccacccaaccagatggcatatgtgatctactagccagaaggtgtaaagtacatgttaaagtgaacaaatactctttttttcttcagaacaggaaaagatctgataaaaatctatcattctgtccatgcggttggcaccgttttaatgtcgggggaaaatgcagtggttctagttctgcttcgtagacagtgactaaatatataccgtcaaggctgagtgtcaggggctggctcagtacaatcaagcatgtgaatagctcttttgtgctgggaacctgttgggcagccttacttaattggggagccacgggacaggaggtctggtaatatctttattattaaggagagagtcccaggggctggaagggaggaattttcctttacaactttttttttttttttttttttttttttttgagacggagtcttgctctgttgccaaggctggagagcagtggcgcaatcttggctcactgcaacctccgcctcccaggttcaagcaattctctgcctcagcctcctgagtagctgggattacaggcacatgccaccacacctggctaattttttgcatttttagtagagacggggtttcaccatcttggccaggctggtcttcactcctgacctcgtgatccacccacctcagcctcccaaagtgctgggattacaggcgtgagccaccacgcctggccaacaacattatttttagtgagaacaaacttaattttagttcagtagacattgcctattatgtgggaaattaatgtattcttttattactatcttcagtttgcagttcctgaggtcttgaggtttggccatataagaacatccaggtagatcaaggtctctcggcaactccagaccccctgttccagragtcttgattgacagagcttgctgcaagtcagtagccagcagctaaattgtctcacctcgttttcttttcttgcctggtctctgggtggaagttccaattagggctcaaacagcccccaaagccggcagctgaagaggaaagggggaatacggtggtgcttcagtgccatctaatttggccttaaacagtaggaaattagctgcttgtcattaaaataaacaaatgccagcctgttccgtgctgcatgctgcaggggacttgcaaggggactggtgaagtccccacagtttctggggtttacagggggcccagagccgctctcctcccctccagattcccaccacactgttggccagctgtggatcctctcctcctttgcctaagttagaggagacaaaggtgagtgtgagctgagtgcttcagtgtcgaggccgtgcgggcgatgatgtgatagggcggcatggggttggtgttacttaaaactccgtttcccaacgctgctttccacagagctggaggacaggcttttggtgtcgagtgtctcacatccttgttttttttccctttggcatgaatatctagacaggaatttctgataaactcctgtgaaccgaaaagtcaccgaggcatctcaatccacttaaaggtttattttgccaacattcaggatgctcctggggaaaaagggacacaagtcccagtgggatgaatgtcctgtgctttttccaaactgggtttgggtttgaggacttcagtattttaaggacaaggaataaaagggggggtgggggaggtaggaagtgaggcaagtggtcacattcttgtgaggctctgatgagcattctgtgaatctacattttacatgtgaaaacaaaggagggggaagtcagttacgcatttatctcttgcacagtaaatctacattttacataaggtaccctaagcctgtgaggtcacagctatctttctggggacaaaaggcaggcagcttttgtgtgactcggttcctaagcttcactttccgtttggcatagtgagtttggggttcccaaggttctattttcctttcacgctctgtcagagaatttcctagggactattttggtttggtaaatgctgaattagtgtaaattaaaaatcaatcgctatttacatccccaacataatggcccttaataggcaaccatttttcatgagtcttgtttcagacatcccagactccatttcccagagaagcrgagaatgaatgggtgctgtatgttcactgctgggtgtccaagaaactgcacaggaagtgtcttaacgtgaagagagtccgcactggacaccggcacaaagggcagagtgaagggacgaagtgtcagatgcgtctctgccaccrgcacacgtttcagcggtgctagatttgactaggcacaggactctaaactggtggtttgctgactattaacctccacggtattgctatctcatgctccttgaccccttcctaattttgctgtggttcggcagctccagtccactgttgaaatgctggtagatttcaaaactccgttgggacatattraattctggtgagccagtgggtgggatgccttctgaatgacaaaggggccccgtggctaaaagctgaaggaaattcatgcaatgatgaatgtgctgcaattaatcaccagagatctgttcttttccttgtatgcgtagtacagtgcaggggccagggtgggggagagtctctgagtccagatcttcatagaattaaaaataatgaatatttgtaatcaggcatcgcttgaccaacaactccgcctccttagctggaaatacagacgtccacttttcgctggtgtgtaatyattttctggaatgctaagaattgttcccctgacctatggcttctttttaagcatccgggatatgcagtcaatttgcaggttgctgttttgaagtcagggagtctcggagattgaatatatgccacctaagttcctgcaaratggactttctgggagtcctctgatgaggttgggagaaggcaaagaggagacgtttccatgtaaaggctgagcaagctccaggccactgcagaagttcagctttcttcagctctgtaagctggaccctgtggctggagtctggccaactgcagggacaagtttctattattatgtaaatggagtcccagtgcggccttggaagagtttttggcacagggtaaccctttgtctgccaaaaggtagcctctccctttgcttcaagcccagagcgtgcattgtgcagtggtgacctgtaagccacccgtcaacctgcagattgccttattaggcagactgcggaggctggtggctggggactggctggcagaggcggtggcagtgagcttgtgtcctgtacgaagccggagaacccgagccccggagacgtggcctagtactgttctattaatgatagtgctctgtgatgacaggaatatgcactctccttggcaggcatactttatgggttggttggagaacaggaggtttgcagggggaggtgactgtccgaaggacagaatggtacgaggctttcttcactgcgtagcttgtgtgttcagttctgtatcagggcttattctacrgagtatggactttatcgggaaaatttgtttttaacttttaagttcaagagtacatgtgcagatttgttatataggtaaacatgtgttatgggggtttgttgtagagattatttcatcacccaggtactaagcttagtacccattagttatttttcataatcttctccctcctcccaccctccaccctgcgaaaggccccagtgtgtgttgttcccttctatgtgtccatgtgttctcatcatttagcttccacttataagtgagaacaagtagtatttggtttttctgttcctacgttagttttccaaggatggtagcctcctgcttcatccatgtccctgcagaggacatagtttcrttcttttttatggctgcgtagtattccatattaggaaatgtggaatgttttccttttaatgcaagatgttttgtggactctcagaatcttgtttatgttttatagtaaacttttttgaatggtgaggtcatgtgtatagtagggaggaaatataactagayagtcaggtggtacaatggaaatggcagagttttaggagccaagggacctgcgttccacggctgccacaagtgagctaagtggaataagtcacttgcattagggaggtgatttccccaaggacagaatggtatagctcatgtatctagggcttagtgggcaatcactagtgatcactagtgaatctgtgatcactatacattatacatatccaaacatcactccgtaccccataaatatgtacatttattatttgtcaattaaaaactaaaataaaaatgtagagtagactgaatgcactcaataacctctccatcgtacatttctctcctcaaattgcattaaccagcctcccctctcctttttgttctcttcagtaaagctgtttaatgagtgtgtgtggttaatagccacagccragcatccacggggaccgttttcccaacggaacctgtaaggctgaatccatcttttctcgtttgagtttcttccaaacttgctgcagtagctgaaagttagtgaagacggcactttcctgcactgaaatgctcgttcagatgcctcaggttctatgggttatggctcakggaccaaagctgcacatgaggcaaacgaacacctggaggagcctgcgttcaggatggggcagtgaccgcgctcagagcgctctggctcacatcccttgtctaagcggcttctcattcattgagctgaggcgtcggacacctgccgggaagacagacgcgaaccgcggctcactctgactcctgactgctccggacyccggcttcagttctcccctccctccagagatcttggggcaccagggctcataagctgctgcatgagaacagggacgctcttactgctggagtcagattcagaktgtgtgtgtgtgtgtatttttagcacagttgggagatgacatctkagatgctgctggctcagctctgctggtgtctcttttgagcatggagcrgtgtcctcgktgtcttcttttcattgcttatatctgctgcttgctgttcagggaaagcacaaattcactttctcctcttgttaaaaaaatagtttggcgggcgtggtggctcatgcctataatcccagcatgttaggagaatgaggtggaaggattcttgaggccaggarttcaaggccagcctgggcaacatagtgaggccactgtctctataaggaataggctgggcatggtgacacactcctgtaatatctgcactttgyggggccaaggcaggtagatcacttgagcccaggaattcaagaccaacctgggcaacatggcaaaactctgtctctacaaaaattagccaggtgtggtggcacacacctgtggtcccagctgaggtgggagggtcactggagctcrggagatcaaagttgcaatgtgccatgatcatgccattgcactccagcctggccaacagagggagamcctgtctcaaaaaaaaaaaaaargaagaagaataaaaatattagctgagcatggtgatgtgcacctatagtcccagctacttgggaggctgaggtgggagaggactgctcaaacccgaagtcgaggcttcagtgagctgtgattgcagcactgcactctctagcctgggtgatggagcaagaccctgtctatttctttaatgtattttctcaccacctgaagaccaagcagcatgatgtatcccagcttgatgtctgggtgtgacaagtatctgaattttctttttccacttgggctacagggatggctctgatgcttcttcacgggctgtccacggcctcccttcccacctcagaatgccctggctgggcccacagcacgttccgtctgaatgtgggtggctgtcttgccgaacccgtgtcgactccatgggaaggccgcaggttaaagaggccgaagaggagacccagagccagtgaacgaggcacggggttctgttgtgggcttgcatacaggggagagagtccagtggcagcgggctgagtgggagaaccacarccgctttcaaaaggcatgcagtttatatagcaatagcatgtccacttggcacctccccgacaatctccacctggcagccttcacataccccaaaacaaacagtccagaccccctgtgcatgcagtggtggcagcagggcrgggaagctgctcagatgttcctcatagataaggaacgaatctccagttggcctctcctggattccttagcttggaaccctgaaccccatgcaggtgccgctgccatacagggccattctcagggtgtgcctaagtgattgctgtcaggcgcatttaccatgcagagggatgggaccatttaagcccacgccccggttaggcctcttcccagttccagctcccacactgtccgctcttcttcctggcacggaggtgagggcccatggcctcccygttcacctattgccatcatctcctccacaagtaagctctccagtctcgtcctccaggaagccttccttcgtcacactcaccccatctgattatgctgtttccctgtttcttcccaggctttatatcatcggtggcttgtattcatggttttctaattctgtgggcgtatcctaatcacctgtggtgggrggactttcattttaaacaaataccgcaagtggtctgagggccacccaagtttgatatcctttgcttaatcagatgttacacccacgcataaacrtgtcttgagtcatttcaacagacagtgtggaatgtgcctttgatttattttgtgtcatgacctccccaaggcacctgcactgtgagcacgggatctgctttcctggtgcaataatatgaccatgaagaaagccaatcatgaaagtgtgaaatatcacaaacacgccctcccctaccccgcatcaatcagcaaggggctggggacctgttctgaaagactggtaggtcttgggtaccagttaatacaacccatggaggccgggtgcagtggttcacacctgtaattccagcactctaggaggccgaggtgggaggattgcttgagcccaggagtttgagacctgcctgggcaacatgttgagatcccatctctacaacaaatacaaaagttagctaggcgtggtsgtgggcccctgtagtcccagctactcaggaggcagaggtgggaggaattggcttgagcttaggaggtcgaggctgcagtgagctgtgattgtgccactgcactgcagcttgggcaacagagccagaccctgtctcaaaaaataaaaaataacccatggaaaacaagggtgacactggagatcacaggttgatgagcttttcttgcattttcatactgattattattgctgagattgtcattgttgttactttattaagatgcccttctgagaacaaggagagccagaaattactttatttgaaactttccttcaaattattggagtctagctctagaacagctatgatctatctggtaccaacagacattttatatatgtgcttgtctgctatctggacttttagactcacaggaaattctcctctgtgaygactcagtgtttccctgctttctgttcatgtgaaaaccatcaagtagtgagcactgaatgactggatttggcagagccttctccgctctccctggacgattgtaatcaagtcagccccttcccctctgcatgaggtcttcttctcacgagaggagaggcatgggcccccgcagctctgaaggtgtggcatgctgcaccttatgtcctgggatgcagccacagaccccatacagtgaacacctaggtttactattattattattattattattattattattattattagagacagggtctcaytctgtcacccaggctggagtgtagtagcatgatcaaagctcaccacagcctcaaatttctgggcttaagtaatcctcacttstcagccttctgagtggctggaactacaccatcattcctggctaattttaaaatgtttttggtaaagatgggggtctcactatgttgcccaggctggtctctaactcctggtctcaagcagtcctcctgcctcagcctcccaaagtgctgggattacaggtgtgagccaccgttcctgggaacagctagttttatgtttattcgtcacatcattgtttaagagccctttgtgggttggggctttgaacaggtcagaatcgtccttggcgtctcctggcctctggcaagtggtgggccggccatgtgcccctcacaagagctgttctccaggtgctcagcatgtgcctgcattgtatgtcagctgtgatttgccctcagtgtacattttattgtagattgcactgaaatatacacaccatgacatttaccatttcaaccacgtttaagtgaacagttcggtggcatttaggtgcattcgctcacagtgtgcagccatcaccaccatccctctccagaactttttcatcattccaaatggaaactctacctattcaacaactccccaattttccctctgcccagcccctgataaactcccttctactatctgtctctgaatgtgactgttctagaaacctcatataagtgggattgtacagtatttgtcctttggtgactggcttatttcacttagcataatgtcttcaaggttcctctacattgtagcaagcatcagaatttccttcctttttaaggccgaataatattccatcatatgtatattcagtgtgtaatttaaacacagaactgacctatgtctttcttttctgacaatcagctgaccattctctcttcctctgagrtacctgaatttttctytccaagagtcattagccatagatttggaatgaaccagaaactaaaacgattggagataatttcattacaaatgttaacattactcttttgaacattaactttaaagacactaataagtcttttaggtgattgcaataagccttttctttaaaaaagaattctgaagtttagaaaggctggcatggttttctttcaacacatcsrataaagaaaaaatagctgtgacttgcaacatttcttattgaacgtactttgccttttcatctccacctatgtggtctgtttcaaattaccttatgcagtgatgtaaygcaacattttatttgcacgcttgtccaaaatattaccactaaccaaaattcacagagcatctcacagtgcacgcaggaggagaattagactaaaatgaggaatctggaaagtctgactgaccagtgagatgtgatcaaggggaaatgaaagggcctaagtgggctttccctaggggcaattttctcaggtcaggcagttctgcctcagattaaggatctgcacacataaagaaaatccaccaaagaaaatgagaataccatttatggctgttgctagcatacaaaatgctcctttactgggctatgaaaatatgttcttcactttggaatttcactccagccatcatcatyagtagcttatagtagatttcattaaaatcatttccatagcacttcttgattttggaaatgtattgataagtcatgtcagtatgtattcagacaactgctagtcataatatcacactcccctatactgtacatttaaattccagctcatggttggtttgatggctcacgcctgtaatcccagcacttcgggaggccaaggtggaagaatcacttcaggccaggagtttgagaccagcctgggcacatggcaagatcccatgtctacaaatttcaaaaaatagccrggcgtggtcccagctactcgtgaggctgaggtagaaggatggcttaagcccaggaggttgaggctgcaatgagccgtgtttgtaccactgcactccagcctgggcaacagagccagaccctgtctcaaataaatacatacatacatacatacattaattagttaattcattcattccagctcattttcctgtagactgggagtgctttcattgatgttcactgagcacaacaaggtgacatgaggtgacatcgtacggacctctggaggagcatgtagtgcacctgaatcccttttcaatacggagttccttgtgtggattaaataatgcagtccatttttggagtgcttctatacgtgttctctcattttatcctgacctcaccatcctatttccctctttgattttrttgtggctggccagggaatggctgttttgcctttattaaaacaatwtttttagagacagggtttaatctgttgcccacactggatgagtgcagtggcgtgatcatagctcactgcagccttggcctccagggttcaaacgctcctcccacttcagcctcacaagcagctgattacaagtagggattgcaggcatgtgccaccatgcccagctaaattttttttttttaaattttttgtagagacagagtctaactttgttgcccaggctgctctcgaactcctggcttcaagcaatcctcctgacttggcctctcaaagtgctgggattacaggcataagccaccaccaggccctgttttgccttcagagatgtattttaagttgttggtctacgcttgatgtatctatcctaggtcaggcactatcctggttttctcatctgcatatgaggataagtcaccgagaagactaaaggaattaaatactccaggaccctcagccttgcatccgccccccagtgatgagccaggggaggtcacaggcaccatcctgttcggccctggtgggaaatggctggctgcagtggaagtgctggctacttccctttcccttggctttgccctcgttttctcccccaggatgatggcccccaaaggagagttgcctcaaaggacagcgttgcaggggtgcttgtgtgtcatcagccagaacaagtgacagcrtctgactccccaaatagcctccctgtaagtctgagctgcckctgtgacctgcgctacacagtccctgaaggtttaataccgtgactgtcatctaacgccttagcttttgaccttgtcaatttgggaggtgacacgtctcacctggactcatactgagacattgtcaatagttggactgcaggaatcattgtccccgtttttgttttttgttttttgttttgtttgtttgttttgtttttttgagacggagtcttgctctrtcacccaggctggagtgcagtgacgcaatctctgctcactgcaacctccacctctggggttcatgccattctcctgtctcagcctcccgagtagctgggactacaggcgcccgccaccacacccagctaatttttttgtatttttagtagagagggggtttcaccgygttagccaggatagtctcgatctcctgacctcatgatccgcccgcctcggcctcccaaagtgctgggattacaggcgtgagccactgtgcctggcccattgtccccgtttttacctttgcctagctcagaaatcctgttagatgcccaggaactcagatgaacacattgttctgaagaaaactaggaatacacatagtaacgaagtaggtgaaatagagcataataagatacttccagtttccccagcgaatctttagcatgttcttcctgattctccctacatgcaaatatttctgtttcacatcatggcttcagattttaggaaagacaagaagactttaagtaatagtctcargctgaggaaagagaagtaatacttttcctctctgcaaactattcaagaaatgtggttggctaagaatgggagaaatttaaggatagaagtgatttcagtgcttgcctgcccatttgattgattgayccattcaagcagtattgatagtttacttgttctgagccaggctctgtgctagaaatgcacmcggaagtgtgcatcacgtgctgtctctccagtttttataatcctttagctaggagacaataaaggcttttgagcaggaaaggtgtgattggtaataaagaagaacatttaggaaggggatttaacaggtgaattcaatgttggtaggcagggcaaggttcttctgtgcgcacctggtgtcaaggttaagcaacactggtgcctgttatcaaggatcttggtgaccatctagaccaactcctcaatttacagccaagaaaatgcatctgctggaagaagtgagcaggctgattttgagccmtaggygccattcattcatgccaggattttctcctggatttttagcctatgtctaagctttggggatttaagaggtcttattgccttcatcttcatttgtatttaattgttttgcaattacagaaggaaatcgtgcatatggtggatactttggaaaatagagaagttactttggaaaacacatgaacagagttatctctgagttgtgagagaattaatgtcttggtttatttcctgtcattctgattaggtgtgtgtgcatctctaatataatatttaaaatttttcaaatcagtaatggagtttcaaccctggtttgctcgtgtaattgatttacccagtcttctatatgcaccccaggtagactaattcccattttatacatttataaatgtatacacaaatacacatttataaatgtatacgcaactgggtccattaactttaacaatattaattattccaattcacggacccatttatttgagtcatctataatttctttcatcgatgttttatagttttcagtatacagatctttcatctaattggttaaatttacaactattttattttttgatacaattatgaatgggattgatttcttaatttctttattatatagtttgttgttggtgtaaagaaatgttattggcattccttaaggaaccaaaagtagaactaccatttaatccagcaatcccactactgggtatctacccaaaggaaaagaagtcattatataaaaaagacacatgcacccgcatatttatagcagcacaattcacaattgcaaagacatggaaccaacctaagtgcccayagaccaacaagtggataaagaaaatgtggtatatatacactgtggaatacttctcagccgtaaaaaaagaatgagataatgtctgttgcaagaacctggatggagctggagaccattattctaagtgaagtaactcaggaatggaaaaccaaatatcatatgttttcatgtataagtgggagctaagctatgaggactcaaaggcgtaagagttgtataatagactttggggactctaaggggaaggttgggagaggagtgagggataaaagactacatattaggtacactgtacactgctcaggtaagggtgcactaaaatctcagaaatcaccactgaaraacttatctgtttaatccaaaaccacctgtacccaaaaaactattaaaatttaaaaaatcatttgcagtcaggtgcggtggctcacacctgtaatcccagcactttgggaaaccgaggcaggtggatcatgaggtcaggagatcgagaccctcctggtcaacatggtgaaaacccgtytctactaaaaatacaaaaattaactgggcatggtggagyrtgcctataatcccagctactcgggaggctgaggcaggggaatcgcttgaatccaggaggcagaggttgcagtgagcctagctcgcgccactgcattccagcctggtgacagagcaagacttcgtctaaaaaaacaaaaaaaaatcatttgcattgttaaaaagaataaaagaaatactactagcagggagcggtggctcatgcctgtaatcctagcattttgtgaagccaaggcaggaggattacttgaggccaggagctggagatcagcctgggaaacatagtaagacccaatctctaccaaaaaattcaaaaattaaccaggcatgttggcacatgcctgtagttctggagactcaggaggatgaggtgggagaatttcttgagcccaggagttcaaggcaacagtgaactatggtcacaccactgcacttcagcctgggtgacagaaaaagatatactactcataattttatttaatttaataaatgatggggtatgtatatatcagaattagaacatgtcgccataatgccatagtctttatgttctgagtcatcatcaataaaccacaaacattgtaaaaacatagcaacctgacatataaattagaagttaataggttaacttctatatgtagaccaaatgaatatcacctcttagagatgatmccaataatcacaagccttgtcaacattatatcaatgcaattttagtaaaaagtaaattttccctsttgcagatcccatcaagtatgctagtcactcattgagaagaagagtgcacaagggtaatcatgttgcctgaaggaaaggccctgattgtcattcttatgagtgtccataaaggtcttatttaccattggcatcgttcacagcrtacactttcatcataacgaaaatgaagccaaacgtattcgggagagaaaagtcaggtaccagattgctcatcaatttatccaatttcaagtttcatgggaaaacacatattattgtaactcacatttataccccaattgcaagggtacttcagtcataaagattcatcagtgatcaaaacatatcctagcactgttagaatactatactaatattatagaaaatttagtctgtatttagacctcaatgactataatgcattgagcaaaattccaatgtgtcatatttctcaacccttaaaaaaatcaatcctaggtaaaaagtaaggattttctcaygaggattccatcacatgtgtctgtcagttattgagaaaaccgtgtcatgatattcttgttgtctgaatgaataattgtaattattatagagctcagtcttcactagttcaattatctatttggaatttttcagccggcaaaggtagccgctcacttccactcaatagaatagcaccagtagggcttactaaatcatccagtgagagaaagagagcaagggtcttagtgccaaatacccaagaaaattaggaattataggaaacttaaacacttaaagaatcagaatttatagtttacttagaagcacacagatagaagtgtgcaaaacaagtttcacagaaatatttcattgccagaatcctgaaataaartctccacagaaggaaactaagaaatccaaacttcttgtctcacaattgttacctaggctgggcctcagtgtaatcctactaagcttaatttttacgtcatcatttctcgtcaagataataattcagcattggcctagcccatggcactcatatgcatatgcacacttagatcaaatatgcttaagagagatggtttccttaaacactggtgggaaagtggactggacaccacatcttcagtgccagacaattgggtggtatcagtatacaaatggtaaacacccttgagttcattcacagtaatttcrtgtgcatttttagaaatagaattaatgagtcattgcttcctacacacttcaaagtagccacatccatatcttattcctctccagtaaggtgggagaattaggaagaaaaggaaaaataataatcaattgcttctttttatacacaacacccacaccccaccagggacactgacttctctctgagccttatggccttagctatgccctagttactcatatctgggggtagccctggtttcgagcaaggtctgtgggatcaaaactagacctagaaatcataaggtttatgaaagacaactgcagctggcctgatgtctccttctggggtcaggctggcccctttaccagcgacatccatgtgggccagggctgggaggccctatgacctcaatccaggacaagtttacaacagtggccccggttctcttgtgctcaggctgatcaggaatgtgggagttgtcctggggagagtcagagcatgtggattttcagcctggcacttccacgccacaagctttgtgaccttgagtattctacaggagtcatctaacatttcattacatgaagaccaggtgatcagaaaggccccttcgtctccagtcttaccagggtccaccagggcctgattcayttgttccagtgatatcactgtggggtgtcagcatcccaatggttcactcatagatccttcaggtctcctccagccaccgcccgtgtaccatgacatgacatggcatgtaccatggcccgatgtcatatgtaccatggtgtggtgtgatgtgtaccatgacatgaccatgttacatgacatgctatgacagtgacctccctcagcctctcccaggcacacagttttaccccttctcctaaagcaggttcgcacrcccatctaaaggcaacttcagtatttgcttttacttctctttaaagattacagccttaaaaatattcagtaaaatattgtacttccataaagcattgcccctgagtaagattagtgcttctcagtggacacagcagcagggaactttgtgcgttcatgctgagctggtggctgtgtgatgctattgaaaagggaatacaccaccatcagygctcggttaaaacgtcttctccctgaaatttaagaaagtcacaggctgggcgcggtggctcacacctgtaatcccagcactttgggaggccaaggtgggcggatcacctgaggtccggagttcgagagcagcctggccaacatggcgaaaccccgtctctattaaaaatacaaaaattagttgggcatggtggcgcgcgcctgtaatcccagctactcaggaggctgaggcaggagaatcgcttgaacccgggaggtggaggttgtagtgacccaagagacatgccattgcactccagcctgggtgacagagcgggaaaaaaaaaaaagtcacaatcacaacttagaatttctctgcaaataaatatgttaacctacagaatgacgtgaggaaatgtttgggtattttgtagctcccctgtgtgaataagctagcctaaaacaataatgataataatagtagtaataattcttgaatgtcaagtggaaaaattaaaaataataattcattataattattggagagtaaatgaaaatttttcaaagatactttctatgaacataaaatagagatttttcttcacagtcttatttggtttcctatggataggatacctaaataatagattaaattttatatccataatttcataaagaatgttgtgcctttttcctttcaacaactatgtcatatttaaatcagtttgctttgtaccgtaatccatgggtgaggcaaagaattctggtaagactccgttaccaacttaaagataatacccaacaattaaaaaaaatgtgtactggaattttattttcaaatttcgaatacgggaaggggacaagagctgaaaaacaaatgattgggtactatgctcagtaccagggtgatgggacccatataccccaaacctcagcatcactgaatgtacccatgtaacaaacctgcacacataccccttaatctaaaataaatgttgaaaaaaaaggagaaaaggaaaagcaagcgacaggaaaatttgaaaaaaaattagaatagacttattccttaataataattcaaaataaacatttagattcttttagataactgtaattgagtattctacaggaagagtaattttcaggcacaaaaagggtgatgagcagtgatactgtgttccataaactgttacattctttataaaggattatttatcaacatgtcaacatgtatattatttcatcctatctctctattctttttttctttttctttttcttttttttttttttttttgagataggatctcactctgttgcctaggcaggagtgcagtggtgcaaccatggctcactgcagcctcgacctcccaggctcaagcaatcctcccacctcagcctcccaagtagctgggactataggtgtgtaccaccacatccagctcattttttattttttgtagagacagggcctcaccatgttgcccagaccagtcttgaactcctggcctcaagtgatcctcctgccttggcctcccaaagttttgagattataggcatcagccaccatgcctggttcatctctttatttccagaatcagttgcttttactatttcctctccttcctcttctcctcccaacactcccktttttctttttgttgctaattatctatgaccttaccatcaagtttctaatttagttatccaaggtactgacgttgttcctcgctgagttttttttaactatcctatttgccatagtttttcctgattttatgactataatgtaatgagtttagagaaaaatggcaaaaatgccaccactgacccctctagtacccagggttgatgtaccttgtgtttatgtgcctttattaattcagcatataattcttcattttcaccttaagtgtgtttgtattttacaaattagtctaagtccacctggtttgaacacaggatactaactccacacacccattttagaaggagatctctagcttttagaagagattatctygtgatttcctatggtcattcagcaaacatttcctgcagccctactgtgcaccaggtacrgtgtccagaactaaagatacaaagaswaactcagagtccctgctcctaggtggggtgtggtgaatcacaattttgatcccgcctccccaagatcccatagctccatcaccaaacagttgtctatccaggagcaagctactcgtctagccctatttccttagcttgcaaatgagaccatttctcctggttctcttgaatgttccrtttttctgtacaatcagtctgtaattattgcgaatttttcttggaattgcatgagcattgcttgagctcatcaactacatattgtggttaaaattaagcgggggcaatctaataggcaaagcttaacttaatagcttctacctcaaattaaaattttgaatctctagtaatatctgccctttcttttcccacagtttcactcatatgttgttcataaatcttaagtatgggtttttggctctctgttaggtaaaatacttcacttaacttagccaaagccagacttgcagcagcctggaaatactcaagcgtcccttcttcccaatacacgagggtctctgtaggtttttctttgtatgtgtgtccgtagggagaggaagttgtatctgactcctccgaggatggttaggttgcagcactgtctccttaaccagagcaaatgctgggatgctccatggctttgccttggtcatctacatcacccacgtcccatcactgggctccagtctgttgcagcgcctccaggcttaatttctgttcataatctgattatggggtctgagctattccagccagtggcctcttgcttctcctgtaccataggcacaaagatacaagtgcctggtcgctctagtcctgcactgtgaaaaatctcaacccagttttgcttagaccagacgaaggtggttgctggctgagaattagctrtagagcaggctgtgtgaccgagccgtctgtgtgcagccatgttcagaagcccagggttttccagctatttgggagctttcaaattctctgagaaacaaggtaaggcaagataaataygaaatgcacttatgtatggattktataacacgatgaatgcctggggtcctctattttgccctatgtattctcctgtgttcagttacttatacacatttctccaaagacactttaaatatctaattgagtttataaatgagcttatcttgtgattgctgataatgtgaatttgttttcccttaataagttaaagttactactaaaccactgaaacctttttgtaggaaaaattgcaaatgcaattggaatgcccacactttggatcaaatgctagatgtgctgcactttagctaaaatatttttctaaatcaaatgctatacatactaaattatttccagtaggcagtggtgagtagcgtctttttattaactcttcatgtgagacagtttggaacaagatactgtcttttcagtggctttcttccagcacagaggaaaatacatgctttcaatgtaactactgaagtggtgtggcatgttcagttcactgattgaacaaaactgaaacgctaaggttattttgagtatcatatttgaaactcagccattatacatcagaactgctttccagctcaaatgcactattgggaagtgacttgaacaattcagacctcagattcaggaattttctcctacagcacttgaaagctttctgaattgatttctctttggttaattacataacaagatacttgcatagttaagagaaaagcttagatgttttactggcattatacctttcattttattgtatttctttagttggccacagttccaaattccaggactgaggatgtattttgatggataatgaagtgtcaacatctgatatattttgtacttatttttccttgggcttctgcccctaaatattaaagagcaaaaggcacttccttaggggaagaagtttctgtaaatggtctatttgtggttttcttagtggacaaatgctgtaagccaaaggctgtaaaacagattacatgccattagactggttataaattttgtctgtgcctggttttgattaacctgttcctttgggatgtttttcctgtatagaattgttaccagctgtctttacataatacctatcttgtcttcaaaatacaaataaatagttatttttattggttgttattgtgtagattttaatgagagcaaaagacacagctgagttgtcctttgctcttcagaccccacccccattctttaaaggcatctcaaacatttctagttgcctggaccaaaattgcttagtttctcctctattcctgagtatatagctgccttatttagcatttaattgctttgagttattcttgttgccataacaaatttaaatggtaacattgaactgtgttagaagtattattrttattattgttgttattattttcatttacccatggagtatgttggctactttccggaagagaaaagcaaaacttgcctatgtaaatttccatgtggaatttgattcttagaaggtgtcatttttgtatttctattttttgtctggttaatggttttctttttcttaaattatatgttcaaaagcagtttggagagttttttctcaccggatttttaacaatttgcataactatttcaatgttacattatttcttttcccttagatttcaacaagaaaaacttaagcttccttggattcccacgtcaaaggaaagtttcaaggtaaagtggccttgtctcaacaactgtgaaattttgaagatttgttgtagcttttaaaattattctcttgaatgtctaactcatgagtttaaatgtttggcaatatgttttctctctagaatttgatttattaaaatgtatgaagcagaggaatctttgtatttaattctgcttatggaaactatttggagaacagaatcttgctgtctcttgtcattgcaaacttttaaaggactattatcttttctttctcacacctgcctctaagcaggcactgtccttttgcaatctgtccatcaaagaagggagctagattctttttagaaatggtttaaacttgtttctcttccttctcccttcctccttccttcctctgctccctccctccctttttccatagacacacacacatacacaaacacacacacacacacatccatccatccatccatccatccatccatccacccatccacccatccatgtgagttattcttccctggtcttctcaactctctctcttaacctttctgaacttccagtccccttggccacagaatattatgggtgctaatttgattgacctaatgtgctaaaactccatgacacatcatcatggatgtaagagaagtggaaatgaatgcctgtgccatacacagtagctgtatctcaggtgctttttagtagattgttgtctatattaatagagtttgatattttcagatggaggcacaaagttgtcccctacgcagtcaggcaaagatctcaatctgtgcttcattatagcggaaggacccagcccccatttccacacagttgctcttgtgcctaaggtattatgacattgttccttgaccaaaaagggtttgcatttcaacaacattaggatagacaggggtctaactcctgtcctcctcaggctgagcctgctctgcatttgaaaatggcagttgatcttgtaaacacmctggatgggacaaatccttggtgtatttcctccacatcttttaagtgtttatgctttaatttttacacacaatatcatcaagcggcacatctaagtacaaggttaattagagcaatgatgatccagggtcatcagtgaggttgtcttaactgactcacgaaacgtcacttttttaatgggatgcatccgtatttctcatcttggccatgttttaataggatctgaggcttggtttctttctgtttttgtttttttttttgtttttttttttgagacggagtctctctctgtcacccaggctggagtgcagtgacgcgatctcagctcactgcaagctccgcctcctgggttcacgccattctcctgcctcagcctcccgagtggctgggactacaggcacccgccaccaggcccagctaatttttttgtatttttagtagagacggggtttcaccgtgttagccaggatggtctcgatctcctgaccttgtgatccacccacctcrgcctcccaaagtgctgggattacaggcgtgagtcactgcgcctggcctcggcttggtctctaatatgtccctagcaggttggtttaactgtcatggagctaataagtgactaaggaaaaaagagacaggaaggcattccttattcaaggataggaaaagcatgcaatatgaaagtcacacacgtcagtggacagagactcaaagagacacagctattctcaaatcatggacattatgtcatgcatacctattaaaatgacagyctgtgtgccatggtgctaagtgtraaatgggctggaggtacaagagcctgcttccttaraagaaatctggtcaaccagacaccagctaaaagagaygaaaatatgagctcatggggcttcgtctcccatatcttgtaatttaaacttcagtaatggaatgaacagattgtggaggagacttacaccgcatgggtgctggacagtcattgtaatagtagcatattccacgttgtgaaaaacagagatgataacagcggarcatcctgctctccctttaataaaattcccccgtgctgctatgggcaggcatttaagtaggttaacgggacacgtttaaaagaaaaattgtcacagaagcagggggcattctcttcttagaagcagaggaaggggggtggcggcacaaacaatcagtcctaaagaacgagcactgtttcaggggagacamagagagttggaaaaaaatccaaaaggtgtttctcactgttagaaagttaaaatcaaaatgcagaaaatgaagtggacagcactaactttagtatctatggagagatgcttccctactgaaacacaggctcttacttttggttgagctctagtgagacaccaaggcctgcagaggttgaccctgcagacacccctttgtccctggggaagttggggttgaggggtgactgaggaggaagggcaggatccagcatccgagagctccatgcttttggggtcactggtcatgtgcattagtaatgggcyctaccagtctcccgctggggggcctctgagtcagaagaagcagagaggagagaagagtctggaccctcacaggtgcttgtgtttcatcagcgtcagatgagccaaaaaaggtgctcactgatgaaccgtcctgaattttacaagcatgtcttacctgtgttttcaytgatgatcggtgccctcgggtagagaaagttcagggaagaaacatgattttttttaaagaaagaaactcgatttcacatgttgatttgaggggtcttgcattaatcacagcttgtggcactgccttgagccagagccacactttccagcccwgtctgcctgctcctgctcctcctgtctgctcatctgatttctcagaagcccccagtcatttagcgggagcaggggagagaggcagcggagacaggaccagagggtgatgacagccgtgtggactcagtaataaatgtttacctggaagctgcagattctaaaatcaatactttataaacacgtgcaattaygccagtttttcacacatgtatgcaaggtgagcaaaggtactaaagaatgatgtgttccaaattatgccctgtccaaagatgaaagaaggaaagaaaggaagaaaggaaaggagggagggtgataaggaagggagggaggaggggcttatgactgatgttattgaccgtatgctcttatagttattctcaatgtttgtaatgatgttacctctggccatcacatcaactttgcataaaaggtacacaaaaaatacttcagsgtgaattgtagtattcatttgaagtgttttgtagtaatcattcattcattcgacatattttaattttttaaaatatttttaattcaatcatttaatttttttaacagacagggtctcactctgtctcccaggctggagtacagtgaaatgatcatagctcactgcaacctcaaactcctaggctcaatggatcctgccacctcagcctcctgagtggctgggactacaggcttgtgccactgtgcctggctaattttcctatttttttttttagagatgggatcttgctatgttgcccaagctggtctcaaactcctgggttcaaacaatcctcctgcctcagcccccacaaagtgctggggttaacgaggtgtgtaatatactttgggtgatggtcacaataggcagtgggtttaggtgctttgccctgaggacatgaccagtcaactgaggcccagaccagaagcgaaatgaagccacacgatggcaggaggctggagaggagagagctcagggggaggaaacagcatgtcaagtgaaccacgttaagaagcatcagagactttcctcttagacctttggttttctttggtttctgacctgccatcaaaaggctgcacttcacatgggtgctggcactatttgtagcgtgtttcgagaaaataagtgcctgtgaagccagggagtgtccggtgatgactcgtaaagctcactctgtaaattcagcggagtatttaactcagggacagtttcttgctttttattagtggctcyattgagctttctgagaaacagaaagaaagaggaaaataacggcatacagatgtttatttttgaaaataagatatagcatttgtaccrcaaggtaagtggcctgaaaagctgaatatttcaaggattgcattatttcacttcaatgtagaattttttttcctgaaaagattttagtttcctaaagaaagtatagagctttgtcaagatgtttaaattagcaattaaataatcaattaaaataacacgccattccttaagtcgggtacatttctgccattatttaatttttttaggtttctacactgaaaggagtagttactgccttacaattcagtgtttagaagtcggtgctaattctaagtttctgactaggcaggtgtcctaggctcttccagccaatctggagtgtggcttatgaagcataattattctcaagacttttcattaaataatgtgaacacacttacctatggaatgtaagctttgctacattgtatatggaaagacgaagatttcagatgggcttggttctaggagggcaggatggtggctgtgctttggactgtgtggaagttctttccctgtagtttttacagggggtagaggttatcaattgtcccacttacacagtatgcgcagyggcttcctcggtctcttccttggcctctatggaaatgcacccgaacagggggaaggtcagcttcacagtgagtcttttccaagcccatcttttccccctctggaggtcacactgaccttgaggaactgcagttccctstttccacaggtttgttttcttccttcgaggcagcagcaccctctgccctgcccgctccgaccacatcaaagaccatggagttgggtacacagcagtcttggggtgactgtggctagtatgaaactaggagatggatttgaatctcatctcctcttcttgtcaaatacgagtctttgggcaaatcatgtaacaatttccggatstgtaaactgaggatggtactagttccagtgttgtgctgcggccagacatgtgtgcctctctcccractttgagttcagtgagtcctgtgggagcctgagatccgccatggtgggagtgttgacaccaccagtcaatattacaaagcaggtgctttttgcagggccgtgtggagggcctgggtgggcggggcaagagggcagggccattcgtacctttatcagcacctcgctgagtagttcgtacctcttagggtcttggagagataattaaggagatacctgggggatacatggggagataaggagatacatgggggaaagsagatacatgggggagatgtattaagatgtattaagatgcattaaggagatacatgggggaaagtccacagtaagggctcacttcctttattattctcctctttcatttcctcttttattccaacackagtcttcatgaggctttccaaacttttgaccatgctttgatgccttggttgtttgaaggcatctgttactttaacataattttaacactggaagacagagtgtagatcacctagrcaagttactgattttctgaagaagaaattgtagcacagagaggttgagtaattaatgcaagcttgcacagctattcttaggtcaagaagaggtggtcagtctgagttaaagctcacgactcccagttcagcaatgttttcacacatcacaccacgccacccgccaatcctgctgtaattagttgcacaaaaaatcaaatatttacagaaatataaataaatgaaaaaagttaccaatttactccccaatataaaacattttacctgcratctatgtgtacatattgaatgatgtgtaacaatatcataatttttrtgttctgcattttttcacttatatatctttatttaaatggacttaactttaytaatggagtaatttttagctttcagaaggagttctcactcgaagataaagaacagctcgctaaccacgaaagaggaatcgatgctcagcttttagttgcacttcctaaaggtaaggctgttcctaagtgaccaaccatgtctgggtagatgcgtattgtgttgtccgaatttccttgagcagaactctctccctaacctccagcttacagtctcctttcggcccttcctgcctcctcccagaattagcttcaattcccttccccctctctccatgcatccatgcatttttaatcctcacctttctactccttcttgccctttaattttaggcatcctcaggttttcgccagaggctgggtgtggcgggtgagacagggaacataaaatcgmcctgccctcatctctttctccstttaaccttctccaagggcagtgagttctgaccatacccccatttcttctctgtccacccactcctgctgcctctggaggctgccccaggccttacggctctttttttttttttttttttttttttttcttttttttgagacggagtctcgctctgtcgcccaggctggagtgcaatggcacaatgtcggctcaccgcaacttccgcctcccaggttcaagtgattctccttcctcagcctcccgaatagctgggactacaggcgcccaccaccacgcccggctaattttttgtatttttagtagagacagggtttcgctatgttggccaggctggtttcgactcccgatcttaggtgatccgcccgcctccgccttgcaaagtgctgcgattacaggcgtgagccaccgcgcccagccagggcttttacatttaacatcttgtagcttcctgctgagcggcgaacagcccgtgcagactttatcatgagcatctttcttcttccccaaggaggcactcacacgtgtttggtgaattactatttccactggtcaaggcgcacatgcggtaaaatgtctgcaccaactataaaccaattccccctagtgttaccagtgaaatgatgtaaacattgattggtctttgtaactgtaacactagcacaaggaatgatcattagtctcagctcacaaaatgtcttcatcctgactgagctgtggaaaccttccagtggaagaaacagatttgatggaagggcagattttttctactctgaaagaaaaagcaaaaatcatgccccaaagaaattagaacaaaaaacgtattcttttaatagaaagtaaatccagtaaaaaaaagtcccactgacgaattggaatatatcctgaggaactgaacgggtgataggccgagacacagtctgatgagggtgaatgtctgaaagactcaggggatttggcctggtgaaggaaacccagacagagacatgtggcaattttcaagaactgacaacgctgtcagccggaatacaggtttattctatgttgctccagaggccaaaagtaagaataacgtgtagaattacaaggaggcagatgagatttcatatcaaaaagaaaattaatcgttcacggtacctggaaatgaggtggtccacgctgtgctcgcatcggctctcccccagagttttcaagggcaagccagtggcctcgtgtccagttaggacgggtgcagatggggcatggaacggctgtcagatggaatggctctgccaatgtttaggactctctgtgaaagacaaaaaaaaaaaaaaatttcctctgagccaaactaaagtgcttaatacctatgcagatgatcaaaacaaagtataagaatgaacaaatccatattagcaatagctgagaaaartttattaggcaaagttctacatagcagaggttgtttccaccagtcagaagcatccctctttcccttcctctatcccagttcctttatttgatgcataataccgcagacaatattatgagcagaaaaatcaaaaacaggatgaaatgctgggttccttaaggttcaacaaatggtaacttcatctgtaataaacttttagaacacctaagcttattagccagttgtattaaaaaatttgtcataaatgattataaaaaataatttttacaaatcaaagatgacgattttatgtgttcaccagattggtgtttctaaattaacatggtccctaaatcyttaaaacatgctttaaaagtgccagtgccccggctgggcatggtggctcgcatctgtaatcccagcactttgggaggccaaggcaggtggattacgaggtcaggagatcgagaccatcctggctaacgtggtgaaaccccrtctctactaaaaatacaaaaaattagctgggcaagtcccagctactcgggaggctgaggcaggagaatcgcttgaacccgggaggcggaggttgccgtgagccaagatcatgccactgcactccagcctgggtgacagagcgagactcygtctaaaaaaaaaaaaaagtgccagtgccccatgtcccctgaatttcacctaaattctctacagtcttatttcacatatctttgctttttatgaaaaaaataggcagatttggaaagaccagcaatttcattgtttctctgatttaacacatgtatcaatgattttgtgtgtcagctcttagcaatattatgttaaaaaaagatttggttataattttattttaatgacatcaagttttatgtgtgagaagtttatggaagtctctttctgttcatttcctgtgaaaatgggcattaaagtggttgttactttttctctacgggacttcctctgtgtatcacaaacaagtaatcaagggattaaaaatctttacctatgtaacgtttataatatttaaaaagattttttatttaggaattatgaagtggaccaaacgtattactccactttctttagcaggtttattaagatacaacacacatccatgcaatcctatcatttaaagtatgcgattacgttggttctggcaattcagagttctgcctccatcggcacagccagttttagaacatgttcatgactgcaaaaagaaacctacacccttcagctgtcacctctcccccttattcctctagtttgtaattgcttggtttatgagctgcttgtctttatattagtggctgccatccaagagtaaaagttaaagggctttactcctgtgggaagtaagatcagaatattccaaatctggcctgggctcttgagctgtcgtgtgaaggagagaagtgttcttggcagtacccctgccacttatatttctttggaagattctactgtactcaagtttggaggactgaactcaacaatgtcttaaccagaaaccttctgtttcttagagctaatggaagaaactatgtttcccaagaaaagcaccctgcagaccaaattgtctagaatattggtgttatatagtcttattgcaaagcctattaggtggttgtaaataactttatgaagtattatagctctgctatcaaatttccttaaatcgccttacttgaaaactaacctccagctcccatcagaaataactaaagaaatagactcacagagtccagattgccacagtagtaccactccgaattactcaaagaagagtaacagaccaacatagcaggtaaaataagggacaggtggatatgtttggaagtcctaatgtatttgaaagcaaaatagaaaatgtctcattaaaatggaaattagaccatcgatgtttatttatatctggattacataataactactattactaaacatgaaccatatatgaattataattatgacacagcatataatcaattgaattgtagctggtgaacctaattttgaaaagcattcttattcttttttgttaagaaatacacactgaagaatttagagatgaaggggcctcatgctgcaattgactcaaatggttcagaaaaaatactatgtaaatatgtatgtgtatgtatgtacatagacacatatgcacatgtaaatatacttaagagaaagaagaataaaaataaacccaatatagtaaaatgttaacatattgtgaaggatatctcttacattttctgtacgtctgatattacaaaaaatttttttgaagttttaaaagaacacaaaccttcaagattttcaaccagaaggcaactttggtagaactgtaggtaggctttataaataaaacaacagcgttacaacatagatttccacagcaatggtgactttcatgcatgatgtttttagtattggctttatgctattaatagtacaaaaacatgttttatatgattaataatataaaataatataaaacatggtttatataataatataaaatatataatataaaccatattttttwtatatatatatatatttcgaggcagaatcacactctgtcactcaggctggagtgtagtggcacagccttggctcactgcaacctctgtctcccgggttcaagcaattctcctgcctcagcctcccgtgtasctgggattacagatacatgctaccaggcctggctaattttttgtatttttagttgagacggggtttcatcatgttagccacactagtctcaaactcctgacctcaagtgatccacacacctcagcttcctaaagtgctgggattacaggcaggagccaccatgcctggctattattattaataataatataaaacagatatgtaatataatacayattaattatattacatgttagtacagacatggggaaaagaggcaaaactcaaaatgtctctctgttgcttctttttgtcttstacatcatttcttataatcccgtttctgtaggaatgaggcatatcttggtaattaaaaatatatttgctagaaagaatagactgagaggtcatcatttgtttgctggggagacttttttattttccttttaaaattcactatagattttcactaggaattaataagctcaccaatacatttaaaggacaatttaattyataagctcatttaattcctcagtgaaatgatcagagaggaccctaaggtgtcccttcaagtacccactatgttgatggattctagcttccaggagcaataggcttggcatagctttgcgttgaatctaggcttgactgaaaagagtgcagtgctgggctagtggcgtctgtactgtgtaacctagggcctgggtgtctaaggcacaggctgtgtatttgaaattctagtactggggaatcagtgattctcaatggttctcaatttagggcagtccctaaggggckttagaaatatatgaggatatttttgtgtcacagcaaatgggggtgatttagcatcactataagaacctgggacattcaacatcctgcggcagagctcacagcaaagccacttcccattcagaagccattagcgcccccatagtgatctgggagctctccagagccagcctcctgagcccatgaccctgatgaggtccatctgtgtgtctgctagatcctatcctgagaatttctcgttttatgcccagaagtggatggctatcagagggcagtgttcacyggaagggcagtaggaaagtctacctttcctgtggacaggaggcttgcacagtctcccaactagatctttctttctggaatatgggaaatagaaaatagcaggaagcaacatgttgctttgcttttccatgcactgttgtaatctttttttaaaatgcctttagttgcatttctatagaaaawttttaaaattaattaaaatttggatgaaatgaaagtgattttcagcagtctctaattagaaccaagaaaagtctatcttaactttttccagtggaagttacatgatactcggtwtattaacggttttgatacttatccagttgaaataatgtggggcaagaaaagggacatgttaggccaggcgcggtggctcacacctgcaatcccagcactttgggaggccaaggcaagcagatcccttgagcctaggagttcaagaccatcctggataacatagcgaaaccccgtctccacaaaagacaaycaaaagctagccaggcgtggtggcacatgcctgtaatctcacctactcgcgaggctgagttgggaggatcacttgagtctgggaagttgaggctgcagtgagtcgagatcgtgcctctacactccagcctgggtgayagaatgagaccctgtctcaaaaagaaagggaggggggagaaaagaaaagaaagggaaggggaaggcaggggaggggaggggatgtgattrtgctactcaggaccctattaatattttctatttctcagttagggtttgaggcatgggttcaagtcgtaccttttaggcrcccttggaatttggttttgatagcttcttgagtggtcttttgaaaaatagggctccactttcctctttggggtttaaataattaaaaccctttggtttttgtcatccttgaaaatattttcaaaatatgtcctaccagccattaaagttgtatcaccataatcccactagggctaatttgttgacagggaagctgttgttattgaccaagcctcctctcccaaggccgcatggcggggtgcaccattctcattatacccctgtcttctaaataggaacatgattagaacaaggacttctctgcctccagctactctgattcctggggaggccaactgggagacctttttgaagtcagagggagagaggttttgtttttttgaagccggctatctcaacaaaagccaattcaactgaagttttaaggtggctatcacttaaaaataaatgaagaaaaacaaggcttctatccctgaacacaaagggcaatataaaactttgtgtgtgtgtatgcgtgcatgtgtgtgtgtgtagttttgactcattactaaaaattaccacttagagaaaagaaaayggaaattgaagcagtcaaacatcaaattcctttgagtttctcctgtgactcagcctttcaaaacttttcattggccctggccccaggctgtccagccacccctctctctttctcccaccccattctgagtccttcataggagtcactcagatgcgcccttatgaatttaagctattgaggaggaggcaaaaagagagacctttattctccatgaactttggccatttctccaaagaaacagttgtctggcatctcagtaatatccttgtagtcagtatcatgtgagaatctcccaacctcagcacagcgtttgttctgtttctccagtgctgccagaaacattggggtaattaccttacccatcatccacctaaattatagcaaggaaaccattgttaacatttgcttccagtgaaagcctgtgcagggaggcggaggacctgtgttcatctaaactgtagctaattgaagcggccactttaggcactgctggaaacacaatcagatagttacagccattgacaaattccgtgacagggtggaggagaagcggctgtgagttcatgcttgtagcttgccratggccctgtggggttcacactcctagtctatacttctgtaaatgatttccataatagaagcttagaatactttgttaaatcaaacaaaagttagaaacagttgctgagatttctgcctaaaatactttcctagagaaagcttgctcgtcaggtctcccttgattcccctagatgaaataaaaccttctgccttaccctgtaggattttacttcttagccaacctatatatgtgacatatacgtgagtcacatagctaggtgttacaatatatatacaacaaaacattctatttaaattattttaatgtatgtgattttaaatatattacatatatatttcatattaaacagtatgttgagtgagcatgtcttagctttgccttgataactctgtcatttttatgggcatcaaatattcagcttgaccttagaagaggatgatgcgtcctagggtgtgtcyrtgtgtgtgtgtgtgtgtgtgtgtgtgtgtgtctgcacactcttattcatttggcatctgcctcccctactaggaaacagtttccaagaaagcaggaacttggtcagttttgcatgtcactgtgacataggaatcaagaactgaaatttgcagttcaataaacacgttgcatgagtgaataaaatgagcgcacgactactaaatactrtattttgttcttttttggttttcttccagttgcagaattaagacaaatctttgaaccaaagaagaaagaattcttagaaatgaaaaggtaagatctttatagtgggagttaggaagtagaagagagcttggcaaagcagtattccattttcctttagattcgatcgctgttgctcactctgcctcttgtggtgtatttcacagaaaagaaagaattgccaggcgcctggaaggrattgaaaatgacactcagcccatcctcttgcagagctgcacaggattggtgactcaccgcctgctggaggaagacacccctcgatacatgagagccagcgaccctgccagcccccacatcggtgagcgtggagctgggtggcccattttccagcaggctgcctggctggttacgagttgccctttccacccagtggtatcagaacatgagatattccacagaagtgaattgtgtggatataatttttttagcacaaggtttcactctgtcacacaggctggaatgcaggagtatgatcatagctcgctgcagccttaactcctgggctcaagctcaagggttctcccgccccagcctcctgagttgctgggactacaggcttacaccaccacaccaggctaatttttttttttaaacatttttgtagagacagagtctcactgttgcccaggctggtctcgaacttctggcttttagtgatcctcccaccttggccttccaaagtgctgaaaatacaagcgtgagccagtggacttggcctaattttttgttaaatgtatttgttttttgtttatttttatttttattttttttagagacagagtctcactctgtcacctaggctggagtgcagtggcctgataagctcactgaagcctcaacctcccaaggtcaagtgatcctcccacctcagcctcccragtacctgggactatgagcgcgtgccaccatgcctggctattaaatagatttgctaaaaacagcaacaacatgtatgtcatctctgccccgcctcacggatctggccttccatgtcacagcagtatgaaatgattcccctcgcacattgttgggtaacggaggccagtcattttcctccctagactggggccctcaaaggcagaagctgtgtctttcttcaccctcagggcccagcacaggatctgtgctctaagataggggcctctcaaggttctaccccagtacagggagcggctgctctcagcagggagcgctagagtcaaagctgcaccttgaatgagtayggttcttactctggagatgcaagaaaactttctatctaagttatcttaatgtagataattttaaatacgttgcatatttatttcatattaaacagtatgttgagtkcacgtgactcagcttttccctaatcactcagtcattgttgtcatcaaatattcaacttgaccttaggagaggagaatgmacrcagggctgctcttcccaccacagtccctggctctgaggmgctgtgctgctgctttttattttttttatttaattgtattttatttttggagatggagttttgctcttgtcgcccaggctggagtgcgatggcaagatcttggctcactgcagcctccacctcccaggtttaagcgattctcctgcctcagcctcyggagtagctgggattacaggtgcccgccaccataccgggctaatttttttgtatttttagtacagatgaggtttcaccatgttggcgaggctggtctcgaactcctgacctcaggtgatccgcctgcctcggccacccaaagtgctgtgattacargcgtgagccactgtgcccggccatgctgctgctttttatagccagtgttttctagtttctagctcagagacagctgttgatctcattttatgatgttatcagtttgcttgtctctacagtttccaatttcctgtggccagaaagctagaaaactaagatattttaaaatcacatgcaattattgaaaaaaaaaaaaaaaaggctgggcttggtggctcaacaccagtaattccagcactttgggaggctgaggcaggagaatagctggagctcaggagtgcaagattagcctggacaacacggccagactccacctcttaaaaagtaattacacgcttgaaatatcaatacacagatcagagtcccaaaatttatagccagaaataaaccgtagtgtacccgaaatggtaatctgtgtagtatatgtgaagtttaagcttcacatagtagtgagaaaaggaggaattatttaataaaatcataatgaaaaaaatgggtttgccagagggtgggaagaggcatatctctcttctcaattcataccaaactccaaaattagttccagttactcacctgtttartttaaagaaaataatggaaaagatacatgaatatttaattcaggtggaatgaaaaaggccgtatgggaagggttaaggtaataatggaatgcctgttagatagactgttaggacccttaaatgatatcttcaaaatagatttccaaatatgggaattttttttttttttttttttgagacagagtctcactttgttgcccaggctggagggcagtggcatgatctcggctcactgcaacctctgcctcccgggttcaagtgattctcctgcctcagcctcctgagtagctggaattacaagcacgcaccaccatgcctggctaatttttgcatttttagtagagacggggttacaccgtgttggtcaggctggtctcgaactcctgacctcgtgatctgcctgcttcgtgatccgcctgcctcagcctcccaaagtgctaggattacagttgtgagccagctgggaaaacatttttatagaatacggaaaatatttttatagaacattaataactaactattttataaagaaaaaattatattaactagaaggaatatataaaaatgttattagtttgtagggtgatgattgataggtttttttttttgttttgttttttgagacaaggtcttgctctcttgctcaggttagagttcagtggcatgatcgatcatagcttactgcagccttgaactcctgggctgaagctatctgcccacctcagcctcctgagtagctggcaccatggacatgtgccatcatgcccagctaatttttaaaataatttttgtagaggcagggtctcactatgttacccaggctggtctcgaactcctggcctccagccaccctcccacctcagtttcccaaagcgctgggattacaggtgtgagccactatgccaggctcatattagatatttcctacaccaggcatgtgtgttataactggggaaaaaaaacacttctgtaaaaaagaaaagcctggtgaataatgatatgggccatatcgttatggttactctcagatccccggaaaccagcatccatcacttgtccaatgacggcagctcacttgtctgctgtctttcccagaggacycaactcatcctatggcctcccacgtgaaatactgaactccacaaaaaagggtaaatcagtaaggggaaataagcactgaacaaagactgaggcgctctggggagtgaaggggctgagctgaagttaaagccacgccttacggggcttgcagaacgtgcaccattcacagcctttgtagatttcactgccgatctcagacttcttcaacagcccaggtaaataatcagtttaggcaaacacacctcggtgagaaactggtccttcacagcatgggcacccaggtgtgtgctgtgtgcagtagagtgtcattctgtgtgtaaatacatgtctttacttgaaatctgcacctctcatccatgtgaccttcttgtaggccgatcaaatgaagaggaggaaacttcygattcttctctagaaaagcaaactcgatccaaatactgcacagaaacctccggtgtccacggtgactcaccctatggttcgggtaccatggacacccacagtctggagtccaaagccgaaagaatygcaaggtacaaagcagaaagaaggcgacagctggcagagaagtatgggctgactctggatcccgaggccgactccgagtatttatcccgctataccaagtccaggaaggagcctgatgctgtcgagaagcggggaggaaaaagtgacaaacaggaagagtcaagcagagatgckagttctctgtaccccgggaccgagacgatggggctcaggacctgtgccggtgaatccaaggactatgccctccatgtgggtgacggctcttccgacccggaggtgctgctgaacatagaaaaccaaagacgaggtcaagagctgagtgccaccyggcaggcccatgacctgtccccagcagccgagagttcctcgaccttctctttctctgggcgagactcctccttcactgaagtgccacggtcccccaagcacgcccacagctcctccctgcagcaggcagcctcccggagcccctcctttggtgacccacagctatcccctgaggcccgacccaggtaagcatccagyccacgctaagcaccctgaacgcaggacaataccttctttttgcctctctgtgtgatagggtttggctattctaagcattatgtggaagtcaaggcttattggagaaatatcatagtatatgattcttttttttttttttctgaagacagggtcccactctgttgcccaggctggagggcagtggcactatcatagctcactgcagcctggaactcctgggctcaagcaatcctcctgcctcagcctcataagtagctggaaccacaggcacatgccaccacgcccggctaatttttacatttttttttttgtagagacagggtctccctccattgcccaggctgatcacaaattcctggccacaagagattctcttgtttgacctcccagtgcactgggattacaggcatgagccaccgtacctggcctaagattcttacatttcagccatatcaaaacaggttctaccaaagcaggaagcctcatgttctttttctttgtgcgtttcttatgtttttttttttctttttcttttcttcgtaattcttttttttttttttttttatactttaagttttagggtacatgtgcacaatgtgcaggttagttacatatgtatacatgtgccatgctggtgcgttgcacccactaactcgtcatctagcattaggtatatctcccaatgctatccctcccccctccccccaccccacaacagtccccagagtgtgatgttccccttcctgtgtccatgtgttctcattgttcaattcccacctatgagtgagaatatgcggtgtttggttttttgtttttgcgatagtttactgagaatgatggtttccagcttcatccatgtccctgcaaaggacatgaactcatccttttttatggctgcatagtattccatggtgtatatgtgccacattttcttaatccagtctatcattgttggacatttgggttggttccaagtctttgctattgtgaatagtgccacaataaacatacgtgtgcatgtgtctttatagcagaatgatttatagtcctttgggtatatacccagtaatgggatggctgggtcaaatggtatttctagttctagatccctgaggtttcgccacactgacttccacaatggttgaactagtttacagtcccaccaacagtgtaaaagtgttcctatttctccacatcctctccagcacctgttgtttcctgactttttaatgactgccattctaactggtgtgagatggtatctcattgtggttttgatttgcatttctctgatggccagtgatggtgagcattttttcatgtgttttttggctgcataaatgtcttcttttgagaagtgtctgttcatgtccttcacccactttttgatggggttgtttgtttgtttttttytttgtaaatttgtttgagttcattgtagattctggatattagccctttgtcagatgagtaggttgtgaaaattttctcccattttgtgggttgcctgttcactctgatggtagtttcttttgctgtgcagaagctctttagtttaattagatcccatttgtcaattttggcttttgttgccattgcttttggtgttttagacatgaagtccttgcccatgcctatgtcttatgttcgttttaaaaacaaactgaacaggtgtcatggggacactttcatggactcctcacttcaggaccctcttactgggtttctcacacccctttcatagtttatcttttcgccgcttttctgtaatcatatcagagactgatgattgttggtgactgcttttgttgctgtgattagaatcacagagcagaagaagcaccactaaccagtggaagcatctcagtgcagagcacagaagtatgactgcaatatacacgaaatagaactagaatgcctagttctgtaagtatatcacacactaggacacaggtatgtgtgagaaccccgcattatgaagatcagccattagaaaaccactgtgtaaaaggayccactcaagataagagcagctgccatttggagaaattgaaaaaggtatraaatcagaaagtcagatcacagaagagaatatatgtttacttccaaatttaaattttaaaagtgtgatggctatattaaaagtgcaatttacttaactgtcctgcttaaagctttggggtaattgtctaggtggatcttaagtgtatttytcagttcaaacaagcaatagtttcccaggtgaattgagaagggatcagaacctaaggtcagggagattcattctgaaaaaaaagattcatatgtgggaaacacccctatttttttcccactgggacacaggggtgcacacctggtcatctctaagtggcagtaacacatmtgaagcagaccctygtggtactgaaatgtattaacccaaagacctgtcaccacatactcgagcatccagactgaaatacttagagagatcagcttccaacagaattaaaaggtagatcccaaggatccattttgagcaccttttttcagcctttagttttaactggaaatgtagggactgtgagttactgtctcatattttgaaatgaaggtcttttgtttgaggaatttgcatttcatcgtagaaaccacgttcttggtttagttactttctaccaaaggaagttcttcctgtgttttgcaagtaggatgaagaacctaacagactccaatttaaaaagaatatcagagatatataattacactggtttaaaagaaatggggaatctaatttcagattgccacatgatgagagctgttgaagtcgttatcacggtatctgagttagtcacctagatcacatatratagattctcaaatagattttaaatcagttataatagtaattaagactttgttgagcatcccaagtaaagacaggatacttcatatttcgtatgagttaaaatcttaatattaaaaaaatgtatataacttgtcttaagacytagaaaaaagcattgttgacatatttaggcctgtaataaaataaagccacttctttgtaggttattttgaagatgcatgttacctagaagttttcataagccaagccttagcytcacagcactttactttcatgaaaaagatttaaaagaattaagaaattgtaaggacttctagagaggtgcatgccttattttctaagccattaaaggtatacaattctatgattcayaggcaaagaaacccaaagtagtttatatatttattaggaaaatacctgggacatatttacataaagagggatggaaaatgtgtgayaaatttgacatttaaaaaaattaagatttacattgtaatgacagcagtgattcagsttgtaaarattgatttacagtggattaaaattctgcttagatagtctttatctagaaccaggaaattcaactttcagaaagtcattttctgattcctatttagggagaagtaagatgaaccaaaaaaaatatgtkgtaacccaaaacagtaacaaaagaaacctccttggtgacctaaataactgtatatgaaaataataatgtcatctgatatggaaacatgtaaccgaaaactttaaaatcaacaagtgaagacaaatagtacccatgaataatgtttaatgctgtggttttttgtggatttttttctgtcactaaaatggaatatttttctcactgctgcactctcttgtcatctagctctgccaaatttttggctattaaatctctgaatcaactcattcccatttaatcattttgttctgtgctcgctagcaagaggctgtcttattatttaaatacgaatacgatgacactcatgaatataccatcaaaagaccaccaatagtgtcctaaatattcaaatgtgagcaccatctccaatgctcagtttttgaatgtgctcacgtacattaacacctgtacacayctgtgtatatatacagaataatcattaattcttatacttcactatactrtactcattagcattataggcaaaataacagtctttaggacaatatttacctgaataatacatttattttacaattctttagtattcagtttatatgataaagaagatttttyaaaaaatagtyaattgattarttgatattacaggatttttaactcagaaatcctgttagatgcccaggaattcagttggacacattgctctgaagaaaactaagaatacacatagtaacgaaataggygaagtagaaaayaataagatacttccagccccacctctctaactgttacaaacctgtaaacttgaaatttcagaaatggtattatttgctggagaggtagtgttactgattatgaaccattctttattaattccaccactgtgagttttagaataaaattaaaagggatttaggtcctatggattattcagatttttaaacayctgagcttgagcttctactactagaaattccgaatccaaagctcttgttgaatktgttactttatgcatctcacgtatctatataaagaaaatgtgctgtattttttacttttatgagtggagaaactcactgtcttcagtcctgctgttgcctttgctgagcatccggccatcactctctgttctcagggaactatgtgactggcaaagggaatgaaatgaaaggtagacctcattttctttctttcttttttctttttcttttttttttttttttttttttttttgagacagagtctcaytctgactccaagctggagtgcagtggtgcaatcttggctcactgcaacctccacctcctgggttcaagcgattctcytgcctcagcctcccaagtagctgggactacaggcatgcgccaccacacccaactaatttttgtatttttagtagagacggagtttcaccatgttggccaggatggtcttgatcccttgacctcatgatacgcccacctcggcgtcctaaaatgctgggattacaggcgtgagccaccacgcccggctggtagacctcattttctagtggtgatccactctagaaaaccctcgtttattagttttgtttgtcattactgtactgcagcccctcaccactcttttctctttagcaaattgtgtccttagtagtgagaacatgatatggaggtttcatgcagagctgaggctgacattggacccctgggagagttgccattggtggatgatggtttgggcagggctccccatggaygccagagagccgcygatcrgctcaggaaatagaccagggcaccctctggaatgcagcttctgtaacaacttgacacggtgcagcctcagccactaagaaaggaaggggcttgtgctgggcacttggagtttatttctgattgcatttgctcatctcctgatgasagattttartctaaaaacygtctccagagcctcaagctctcttggctcagtggtctgtttccatgcactgagagaggtgtctgcaggagagcatcgtgcttgaccttccaygctcycgtgtccactagcaggcaggttttctgacacaggctgcggaattcaggacagtgcatcatggagaaacatacatcttgggggccattctaaagaacagacatctgggtcctcctcacagcttattctattactggaatggaattggcttcacctttcagtccctgtacccccaaacacctgtgctccctgccatactctagaatcccaactgttaaaatagatgggtaagtcattccctcttttttttcatttcatcctgttcttattgtcaagtgacaattcttattctttttttttttttttttttttttttagaaaaggtctcactctgttgcccaggctggagtgcagcagtagcayaatctcactgcagccttgacttcctgggctcgagcgttcctcctgcctcagccttctgagtagttgggacttaacagatgcacgccactatgcctggctaatttttgaattttttggaagagatggggtttcacaatgttgcccaggctggtctggaactcctggtgttaagcgatccacccgtcttggcctcccaaagtgctgggactacacgtgtgagccaccgggcctggcagactattcctattcattggactaaatgtaaatatatctccccaaaccctagctactatgtacactagctaaaaactcaaaggtgtgtgagattttaaatgcaaaatttttccttgagcctgtgtccttgcagattttgtacctgtacctatctgcagaacggtcattagcagtttttccaaacaagcgacttttagcaaattaaccgttaattttaatgagattcaaaagttaatagccattcttaacgttttataattagaagctgttatataattagagctggacacccacatggagaaactaatttgactgtgctgcatttgacttcactttggtaacaggaagcactttttagtctgtagacccttgggagttgtagggagttaaagctgatcattatatactattatatacttagggatacaacccaagggcaacccctggcctttatgaaaacctggagtgagttattatttcctggtaatacaattctctgccagccagttgctgcatcaaaacagttctgatacacacacctaaagtcaccacttcctcattctggtccccaataaccctataagcctctccccttgtaggtgacctctgccctgtgaagggttggctcaccccaagattccataaaataagttgtctgtttgtttatgagaacaaggctttttaagtaccatatgtaatacatgcatataaatgcatgtatttagatcagatttctggaggagggattgtaagtttgatgactaaaggaggcaggggagaggggagagatggaggaggaagagaggtaagaaggagggggagagagtgcgagagaacaggatcatgtaggcaagagagcacgtgtacccggaacaatggttagaaactaacaaggtgaaatttaatgaagtcttgaatttagatggaaaaaaaatcagtgcacaagttcaagattgtggaaacctgatttaacagcagttcgtgggaaacagacctaagggttttagttgacagcaagttctttatatgactgccaaagtgattagtccaatcttgggggacattaatgaaagtgagttgccaatagcataggtaggcaatggtccccctgcgtcctgcagtggtcagattacatctggatatctctttctaatagggccactgacaaatgtgtccagagaagagtccaccttcccatctgccctgctttcttgacctttccaggttgttttgttgtgttttggtaacttctctctctcttaacccatgtatgcccgaggttgcaattttttgaatttttgcaatcagaccttggtgctgtccttgagcagtagaatataaataactcccacttgcttagcattccaataatggaacactaggcataaatgggctaatagaaactgggaccatttttggagtcacttccactttctgtggtgtttagactctcgcaccagtctgctctcattatcatatcgtgagtttcccagagacagagctggagcttggctcagcttggcaaacagagccctgatgttattagtttggcttctgggttgctgatgattgtactggaagggaaaagaggagaaacaggtcatgagccaaatgaggagtcccacagatgccacttcacaggcaccctatgtcataggaaggatattcaaatgtccagcacctaacgggtacaaaaagtagttagaaaaaatgaataagacctgctttgtgttagcacaacagggcgactatagtctaataatcgtgcattttaaaataactaaaagtataatcaattgtttgtgacacaaagaataaatacttaaggggatggataccccattctccatgacatgattattacgcattgcatgcctgtatcaaaacatctcagataccccataaatacgtacacttgctatgtacccacagaaattaaaaatttaaaaaaaaaagacaacaaatggcaagcaccctagatcatggctgtcatacccagaagaggattttagcaatttcgtaaggattttttccagacacggcactgtgaatttggtgttaagctcttctgtaagtctggtaaggatgattgcagcgatagcattactttagtagaagctttaagagatgagtagataccttgctctagtcattttcatatctccttcactgcaactggaatatccaacaatttcaagtgacctagaaaatcatttttgaatgaatgttctgctattttctgtgtttgcttaaagtgtcaccmaactatagcagtgctgtttgaaatagccaatctgcaaactgtttatcagcacacaactatgagacactcgcacccaaatgcaaattgtgtttggtttccttcattgagaaaatcawgctgtgaagaaaacgtcagctgaactacacagcaggcttagcgatgttgttaatttcccttctggtgacagccttttgtctaatcatgcagagggacaccaatcagtggaacgcactgtgagcagcacttgtttatacgacaaagctctttctgctttgtctgggattggggttcttgtatgtggtcttgagtcaggctgctcataaatatcattaaacagtaaatgggaatcgtgataagtgagcagaaaatcatcggccacttgtggagcgtcgtgaactgagtccacagccccgcgaatggctgattctagtctagtctcatgatgaaagctgtcaagtccccgattaccttattctaggagtgatggttccaatcaggagatgaggggatgccaatccagcctcgcaccttcctcagattccagcattttctgacaattgtgctttctgcacatacctcctccctccctcctttctgggctgcggttacagcattcargccttcactgagattagctcaaagggagactggaagaaattggttatctcacatgtttatcctgcttctgcccccagaaaatgctacattttcagtactcaagaagtccttactctgtaacccaacgatgacatattttttaaatgaggtataatttacatcaaatacacagattttaaggatgcagcttggtgagtttgggtaaatgtataatcatcatcccagtcaggataggaaacatttccatcatcccttgtgcctctgtccaccagaattgattcttgaccgcatgtgcaaagactggtatagcctcacagtaagtatcctgtgttcaactcattatgttgtataaagcaaatctcccactgttaatttcttaaccaaaccttatttatcaaaaataattaagcgtaacatttaggaagacttcatgaaataatgtcacacaagattaaaagacatgaagagaaaataaaagaggaaaataaccaccataattcagatgtgatctctctttttgttcatgttttttaaaaaatctcacctgctattttactgtctctccaaaacaatgccctgtgggcccctgaagtaaattttgtactttgatggaatgaaatattttaaaatctcagttgagcatcgctttgccaacccctcagtattatgatcaggctgcgctgctccaaggtggaaagctcagtccacaaccttccactgcctgactcctttgatttgatattgttcattggagaaacaaaggaagaaggtagttaggttctgcagaattcataggtaatcgggtaactcttctgacggtggaaacggcactagagagagatccacatccagtcagggttgtggctgtgaccaggaagttcttggtgtcttccttgcttaaccttagagtccatgaacactggcatcccaacctcattcttacccattcaagccaaggaagcagccattttccagaatgtggaagcttgtcactctggaaggctggaaggaaggtgcatgctggggggtcctgctgcactgggtccaagccccatccttctgttaccagtcgtgtgatcgtgagcagttaatgtcctttttcccttgcacctcaccatctgcatctataaaatggagacgagaagacctcttagagttgctgtggagattatcattcatcagttaatcattccatgagcatctgagacctactgttcaccacacatagttccgagtgccgaggagatgaatgtgaacgaagtctctctctctccagaggctgtcacatcctagcgaagagagagggctgtagcagaaggggcaggtggtagggatgatgttagtgagaccacagatcggggagggccttagaaccaccgcaagggctttggggtttgcsctacttgatatgttgagccctaggagggtttgaacaagaggaatgactcatctgccttacatttcaaagcattatgctggctgctaagcggaagatagactttagtggggccaggatgaaaacaggtagaataatgaggaggtcatcttggtaacgcacgtgagaggcggtggtggcttgaactagaatgatggcagcacaggtggtagaaagaggttatattttgaaggtacccaagagaacttgctgatgaggtaggggtggggtttgaaagaaacagaggagtaaaaagcgagtctcaattttttggccaaggcaactcgaagcagggatttggcatagggaagactccagtacaagttgggacagagggaagttaagagttcattttctgggcatgtaaatttaagacgtctattaaatatccaagttgaaatgtcaagagcaccctggggctgtgtatcgtgggggtgaggaggagaactcagctaagaagtctgatgggggagatgggagacagaagaggggagtgtcgaaagtgtagatgctgctgcacaactcagaagtggctgcattctgtgagatcattgctacacagcgcccaggacagcgtgttcactgttggtgtctgatttaggcgtctcctcatccctctctcattttcatttcagatggcagataacctcacccaaatacatgtcatagccaacctcagggatcctgaaacccttacttggagaaatgcttttctagatcactcctgctttaaatgtactaaagacaaagtcaggccctcctggtgaggctggactcaccctgctgaaaatcgcatgacttctgaattgggtctccataagtattatgtcttcaaagcataaaaagagaaattcataaactttcattgctgtgttgactgtgaagaaggaaaaagataagaaaagcatttaaaaggcttattatgtcctaggcatgatgccttcacatactttgtttgtttatttatttatttatttatttatttatttattagaggccgagtctcactctgtctcccaggctggagtgcagtggtgcaatcatagctcactgcagcctcaaactcctgggctcaaaggatcctactgcctcrgcctcctgagtagctaggtctacagacacatgccaccatgcttcactaactttttaattttttaaatacagacagagtcttgctatgttgctcaggctggctcgaactcctggcctcaagggatcctcctgcctcagcctccaaaagggctgggattacaagaggcgtgagccaccacacctggcctctttgtttcttattacatacatttgtatttattttacagatgttcctcaacttagaatggggtcgcatcccaataaatccatcataagttgaaaatattgcaagtcagaaaaacaaaggaaacattaagtcaaaaatkcacttaatacacccaacctaccttagatatgctcagaacactcacattagcttggatttggacaaaaccatctggccatgcagcacactatggagatgggtcgttcccctcatggttgtatggctggtggcgatctgggagcggcggctcactgcctctgcgagcatcgcaggggagcatcgcaccacacaccaccggcccaggagaagaacagaattcacaattccaagcacaggctctcctgaatgcctatcacttccacaacatcttaaagtcaataaatcttacattgaaccattttaagtcggagactgtctatatactcagactttgagtattcaccaccctggtggtagtcctttggtttttggctggtttcatatttcaggtgtaataagcaaatggagcccagtaagtcccctgtgtctgtgtgggatttccattttataaatgctgagccaacattcttacacaagcccttgatggagtttgacggtgatattgatcaaattttattcttgtcagttaaggtcatgttcgaaaagttgtattgcacttcttttacaaagccctctgttatacagaaagcattcagcctaaacataaccctgtgaaggcggcagattcgttataggaacttgatgtcatttccaacagcaggcgtctgctggcccctcttgccctctgcacactggactgagttgcactgccttcgttcctggctgcaggcgatgcgccaaactcttcccatcaaataaaagttgatgaattggaccctttatatttggaaatgaaatgactttacatacatcttaactttttatttgctgtgggcaaaattgatgtgatgcagaggatggggaggtggggtgatagttttaggagtagcaaggctgaaggatcttactggagaaacagatcagtccaagcctagaccgagatagaggtcagtggttacagcaagacgtacaatagcggtgccaggtacctgcctgtcccctccaaccaaaactcaaaccaaaatgattttagaaaattaagttgattataacttttattttcttttagaaatttctttttgagctgcaatgtgtttccagcctggtgttgaaaaattcttgcagataggctcataaagttttgagctggtaaacattgtaactagcctgtagaatttcctttttttctttctacattgtaagaggagacagggcagtaatctgagtgttcctcctttgacttgctttatgttgttaaaacaaggttgtccttacccatgatgtttctctaaaataccttcagcctggtataattactcgttcatattctgcttggcatcatactcagtcgtgtgttgaggaatgaatgtgtggactatatattacctagcctacctgcggtttaaggtttttaatggctatgttgatttatgattcattttcgtcgttccttagctcattacttgcacttactaggagctcaataaatatcagcagaatggacctgaattagtacttgtaactcttgtgttggtcacattattcagtgataattttaaaaggaaaatgtgtaatagcaactaaaaaygtgatcccattgrcttattttattttatttttatttattttaattatcttctttatttgaaatgtgttgttttacatagatgctatttttatattaggctatttaccaacgtgccactgcaaaacttatggaaattaaattaccttttacttttagtcagctgcttacaagagaattgcctggtatttgtgggcagagtgtgactataatagactccgttcttttttttttttttttttttgkgacagagtcgtgctgttatcgcccgggctggagtgcagtggcatgatctcggctcactgcaacctccacctcccaggttccagcaactctcctgcctcagcttcccgagtagctggaattactggtgcccactaccacacccggctaattttttgtatttttagtagagatggggtttcaccatgttggccaggctggtcttggactcctaacctcaggtgatccacccaccccggcctcccaaagtgctgggattacaggcgtgagccactgcacccggccaacagactcctttctaataatttaaaattacttgggaaaacacatgatttgatggccttagatacatttatttttacctcttgattttagtagtgagccacatgtcctggaaactccatgaagtgaatatgaactctatagcaaaatgtgcttatacattttcaaaagacagaattattctttttttccctataatattcctgtttgtttatttttttaagttttaatttaggttcaggggtacatgtgcagatttgttatgtaggtaaattgtcacaaggctttggtgtattaaatattttgtcacccaggtaataagcacagcagcccacaggttgtgtttccatccccgccctcctgcctctctcctccctcaagtgggccctcatgtctgctgctccctctttgtgaccatgtgtactccatgtttaactcccacttataagtgaggattattcttaataaaaatcagcctttaggttttaagttatggtaaagtctgtgtatatgttgacgttttaatagagattatctggttttgttttttgtacacaatagtacagggaaacccaaacatgagtggtttctccagaaagattccgaaggggacacaccttcacttatcaactggccttccaggtacccgcacgccggccctctggggcttgtgtgcatgagtgttgcttcctcctgcctgaccacacatcagctaacacccactctcctcttgccttctttaataccagtgcacttgaaaatcacgtggaagttactttctaatcatttgcttttcccctccacatgccctaatccatgctaatagtatctctccttccccctctttttcaatctttgtcaatctttcttgattgacaaaccttttacttgaccttttgcttttcccttctcaccaactcacataggactggccagtgaggggcagtagtgagcacccagccaggccctgggctcctttccatagctggactcgctagccggcgtcccatctgctcagcttcccactgctcccagcccttccagcctccttgctttcatatctcctcatctctaaaccagtagttaattttcaacagttaaatttagggcatgtggttttaaaagcaaacaaaaccccctatcatttcatttttaagactgggggcagggagaggcggaaggagtcagaatgagtaagtcatggaaggacaaagctccacacacagagtttctgacagtcactttgttcttggctgaggacaacattcagattgtctctgatcaggagcacgcattccacaggagaactggaaccgcgcttcagtctccttttgattaacaaacgttttaagtatgaaaacctccaacactggctcatctctgggaaaaataacaactaagaatgttttctttccctgagttgttcatagttaccacctctatgtgcgtctgtgtggattgtcctttaatgacacatatatagatacactgcctcgtacgttaaaaaaaatatataggagtttttatcaaatttagcagggtgcacttgtcattaaataaactattcttttccatacagtgcacatcataaataattacttttgccaattaagcttaagtaaacagtctaaattcctctccccgcaagaaatcccttttcccactccaaaagccctctttgctttttaaagctgagccctaatcagttttccattctcaagtagttggaattgtgtctcctttcccactacatggtacttcaaaaaccaaaaataagaactagataacactattaaacatttactctttgctaagcactaagccacgtgctttgcaaatatcacattacattatgtcactattatttccatttaaaaggtaaagcaactgaggcttactaagggcaggtgagttgcccaacactacacagctcaacctgactgagccaggatctgagcagaggtctcttccaaccccacagccagagctcttggtttctttgttttgcagtaatggaaaaaggtctgtagcttttgaaaaggatgtcagttttgctctcagatatttgaataactttagaaacaactggagcaatctctctttatttttattttatttttgttttttagggacagagcytctctctgttgcctatgctggagtgtagctgtacaatcatagctcactgcagcctcaaactcctggattcaagtgggcctcctgcctcagcctcctaagtagctgggactacaggcacacgccactgcacctagatattgttttttacttttgtagagacaagatctcactatgttgcccaaactggtctcaaactcctggcctcaaatgatcctcctgcccaggcctcccaaaaggttgtgatcacaggcatgagccccagggcccggcctctcttttgggattcatttttaactaagagcataacagcaggacagggggatggtggtgggaaatgttcacttcattagttctgtcagcaactatcttttctctaacattcttttggtgctagaattattcataatgatgcccagactggccacatgccttctgaatgaatgaatatactctgcattgcatgaaaaagcttgtgaatgtctagttgagtgctttaaaagagaggtgattgttgtatcttgaactaaataaaaagcataaataatcgtgagtgctcttacattttcagacgacaatgaaattacagcgtttggtcaataggtgtctgtatgccaggaaccttcccccacagtccgtgttctgggcgtgtacatgaggaaagcttactgattcaagggaccaggctcattatgccctaatgcatgctggtggtggatattaacgcatttttctgtggcttctgggtatttatttagtcagaagggacccattctcccccaggatagcatctgacccctgccagcttttacaggggtagagttagttttgcacctcctgggcatacatatgcaaattggaaactcaactcaggatcatctgacaagtagttgacattagacaccaaaatgctttttcacaagttattctctctcaggtcagtttccattcactggtaatctgtgatctacgcatgctttcctcctgtgaggccgttactgcactttgcaacttaaatcctttttctttcttaaagagttaaagttagagaaaaattggtgaaagaggaaagtgctcgaaacagccctgaactcgcctcagagtccgtaactcagaggagacaccagccagcgccagtccattacgtgtcatttcagtctgagcactcagcctttgatagggtccccagcaaggcagcaggctctacacgacagccaatccgtggctatgtccaacccgcagataccggtcacaccgccaagctrgtgacgccagaaaccccagaaaatgcatctgagtgtagctgggtagcatcagccacccagaatgtccccaaacctcccagcttgacggttctagaaggtgacggaagggatagcccagttctccatrtctgcgagtcaaaagcagaagaagaagaaggggaaggagaaggagaagaaaaagaagaagatgtgtgcttcactgaagctctcgagcaaagcaagaaaaccctactggctttggagggtgatgggctagtgagaagcccagaagatccctctagaaatgaggactttggtaagcctgctgtgagcacagkcaccttagagcatcagaaggaactggaaaacgtggcacaaccccctcaagctccgcaccagcccactgagaggacaggcaggagcgagatggttctctacattcaaagtgagcctgtgtcccaagacgccaaaccaactggtcacaacagggaagcctcgaaaaagcgcaaggtccgtacccgctctctgtcagatttcacaggcccccctcagctccaggccttgaagtataaggacccagcttccaggagagagctggagctgcccagctccaagaccgaagggccttatggggagatcagcatgctggacacaaargtctctgtcgcccagctccgaagtgcgttcctggcatctgccaacgcctgcaggagacctgaactgtaggtgatgcttcacacgccctccagctgtgtcacttgcacgtccctggcagaatgattcactcctcgacctgtgttgtgttctgcattgaatcatattagcttagctcacaagtgcgtgcagggcgactatgcggaaaatggctcaaaaactaccactctgcttctgcctactaatggggaactagtggattgggtgtctggaatgtctccttccttacgtgcatggtagaggcatgaagaggggtttggtggtgtctgtcccttgactcacggagatgcataatcctttgccrtcttctctttctctgtcttcgtttgccttccttatactctctgccctttgattctcaaagcaaatcacgggtrgagaggtcggctgaaggacctggcttgcccaccggtgtggaacgggagagagggtcccggaaaccaagacgctatttttctcctggtgaaagtagaaaaacttccgagagatttagaacccaacctataacttcagcagaacgaaaggaatcggataggtaggcatgygtatgcgcagtttcctcatccaggaacgtggcaatgacacaggagttttaccacactgacggtcttgacgctatttatataggatgttggcgattccataattgttccatctaacctataagcgttatttatttggcttatttaaaagtctttttaaagaatrttagcctttacagcggtattatgatacatacacaattttacattgcattcagatgataagaagtaagaaacattatttttctttatttaatggttttaatgttttttaccccttgttaaattagactccagattgcatattcaccagattttacagtgaaaataactgaggaattttatattcattttataaatgtccatctacttgttgtatttgagttttatactgaagtgtcatatactattgcatagaaatggtaagatttgtctggaaaattgtcatcagtggtgtttaacaagttgttcttgtgcctggtctctctccacggggtgtgtacttggctgggattgtgtgcacacacgctccacagtgttgcttcacaactgtatgtgtgttttcacaactagaattgctaccaggaggttatttcttaaaagaatttaattgcatttttatttttactttcagtatgatgttttatttcgatcttctgctcccacctgctaatgtattattgttatttgctaatgtctttcctaggtgcacttcacattcagaaacgccaactgtcgatggcaagtacctgtttcccttttttttcttctttattatctcatctagactggatttaataataaggtttttggctttttgagagagtaagatgatggagcataacagtgtctcyctttgctgcaggttttcgttctgtggatatgataaaatctagttgaaattttcagacaagctttcccttctttttgagagcagttagagaatcatacagtgaccaatgtaaaaacaactaattcaaaccaaaggagcaggttcttcttgttgttgctgctgctactatttaaaactaaaagaaattccccccataaaatatattcatgaaatctcgatcagacaaacgttagagtagaaatccctggacagagtttgctttggtttggctgggttgaattgcaagggaaattagtaccttttcactgagcagaaagaatgggctccctgcaaggggaaactaccaccaattattattttagtgcacctattgttgtattcaaagatttccaggtcagccctgaaagactttttggagaccgaacttaaccttctctaatgatgtccagtttttaatttgtggctttttgcagatgaagaaaaggtggatgaacgagccaagctgagcgtcgccgccaagaggttgcttttcagggtaagctgtgctgacgtgcttgaatagagatccytactgggtgcagtaatcccagctatttgagaggccaaggcaggagaatcacttgaggccaggagtttgagaccagcctgggcaacacagtgagacccccatctcaaaaaaaataaaaattgtaagccttagggagggggaatcttgtggacccagcctacttcatgcacctytgggcatgctaaggccctcctgcctctggcccacctgttgttctcttcctaatctttggctggttgtggccacctcatggacacagcatgagtgtacacttctgacaacaatacgaggtgctcattagtgacccctcctgtaggtcctgtaggagaacaaagtgaagaatttttactacccccatttcctttccttgaatttctttgttatttttaatttttttttagagatagggtctcactctctcactcagggttgagtgcagcaatgtgatcatagctcactgcagcctcaacttcccaggctcaagtgatgttcccacctcagcctcccaagtagctgggactacaggcctgtgccagcatgcctggctaatttatgcattttttgtagagatgagggggtctcactttgttgcccaggctggtcttgaactcttggcctccagcaatcttccctccttagcctcccaaagtgctgggattacaggcgtgagccacyrtgcccagctctttccttgaatttataagggttccacaatacttctaatcttaggagatggaaaaatcttttgatgaacaaaatgttccaaagcgacgctcaagaaacacagctgtggagcagaggctacgccgtctgcaggacaggtccctcacccagcccatcaccactgaagaggtggtcatcgcagccacgtaagtgcccacaggacttctcagccttgkctatagtgtctttttttaaaaaaatacatttaaagagtgttcaatgaaaatgaggcattggggaggtgatttagctagaagccacagagaagttagtactaagggattttgtttactgtggtctctctaaactttgtaatgggatgtgtatcttctagaaaaacttgaaaggagtttttgttctattttgtttctgtctctgcatattgatattttaaaaatctctttgacaacggaaaatagaaacatgaaacttggtggattgctgtgatgaaaccccagcttccacggtcacccgctcctggccggtgatgctcagcccgtgtgccattcatttcccctttcctcctgtgctattttcaagcaaacactagaggtcttaccatttcatccataaatatcccagtacgcccctctaaaagataaggtttgttttgttcttaattgccagaaatctcttttctttttttcyttttttttyttttttttttttttttttgagagagagtcttgctctgtcacccagaacggagtgcagtggcatgatctcggctcactgcaacctccgcctcctgggttcaagcgattctcctgcctccacctcccgagtagttgggattacaggcatgtgccaccacactcagctaatttttgtatttttagtagagacggggtttcaccatgttggccaggctggtctcaaactcctgacctcaggtgatccatgcctcagcctcccaaagtgctgggattaattgccagaaatttctaaaaattaaattgcagtttgataactttccaaacaataggaagtttgttttgaataatatgtttcaatatattcagaattaatttcccagagtagttcattcagagatcattgcttcaatcaagtgaaaaattttcttatttttgcggggggcattgtttgtttttttgaggcagtgtctcactctgttactcaggctggaatgcagtgcgccatcttggctcattacagcctcaacctcctgggctcaattgaccctccaacctcagcctcccaagtagttgggactgtaggcccaaccaccacacctggctaatttttgtattttttgtggtgatggggttttgccatrttgcccagtctgatcttaaactcctgggctcaagcgatcctcccacctcagcctcccaaagtgctggagctacaggcgtgagccactgtacccagcctagttttgttgttgttgatgttgttaattggttttgtgcttaccttggacacacagacacccttcctggaaaaaaaaatagttcatcccattaggttattgacatcccaaaaggcctctatgtcagtgccccgttctgtagacctgctgttagatcagctgcctacagttcctccccgagttgttcctcagtttcttggtgcatttgtagctaagtatatccttgcactcattaggaactctttgcaaatcagtttgttttttaaaaaaagaaatatttgaatggctggtgtaaaataacaggcagatacccatgggagcaaaacagtaaatataagaaaaattaatcccattttaaggctcaataaatctaccttgatgtgcctatagattgtataagaacactgatacttttaaaaagtagattgaggccgggtgcagtggctcacacctgtaatcccagcacttagggaggcagaggtgggtggatcacctgaagtcaggagttcaagaccagcctggccaacatggtgaaaccccgtccctactaaaaaatacaaaaatattggccaggcatggtggcgcacgcctgtaatcccagctactcgggaggctgaggcaggagaaatgcttaaacccaggaggtggaggctgcagtgagccgagatcgcgccactgcattccagcctgggcgacagagtgagactctgtcaaaaaaaaaaaaaaaaaaaaaggctgggcccagtggcttacacctgtaatcccagcactttgggaggctgaggcaggtggatcacgaggtcaagagatcaagaccatcctggccaacatggtgaaacctcatctctaataaaaatacaaaaattaactgggcgtggtggtgcgcgcctgtaatcccagctactcaggaggctgaggcaggagaatcacttgaccccgggaggcggagtttgcagtgagccaagatcatgccactgcactccagcctggtgacagagacagactccatctccaaaaaagaaaaagaaagaaaaaaattagattggaaacaatattctaaaacacagacataatctactgattttttgatagctaatatttgcttttttgaattattattttttttacaccaagacatgtattctcaagacagagtaaatcctcccagctctgaacacctattcttaccccatttgctttgggtagccactatctcttatttcctgagtttgtatttgcttttgaagttctttcgtgattttttctccccaaaaataattagcaaaatattctgttaaaatttttgatttaacgtttctgaatttaaaactatgctgtccttaatgctkcttttcttctctctccttatgaatgtttcctctttggcaattgcttttaaagtgaacctatccccgcttcgtgttctgggggcacccaccctgtaatggcgagacttcctagccccactgtagctaggagcgctgtgcagcctgccaggtactggacagatacagatgcatgcggcacccggtgcaaaggtgccgaacagcagatgcatcctaaagtcttgaatgtctgtcgtttgtttgacaaacaagtcaatgccgtgagttgttccagaatgcgtggcattttgttttgtcatagcacaaggtgctgataaccacatgctggcgtgcgtgggaaaacattttgtctctctgcatatgttatgtgttagaactaggatcacactaactcacgtatccagttgctttgtttgtttttcataataatggtcatccctcaaaaattttgttcttcatctaaatactgttatagcacttaataaagattaatagaaaaatgggacattggccaggcgcggtggctcatgcctgtaatcccagcactttgagaggccaaggcaggtggatcacgaggtcaggagattgagaccgtcctggccaacatggtgaaaccctgtctctactaaaaatacaaaaattagctgggcatggtggcatgtgccagtaatcctagctacttgggagactgaggcaggagaatcgcttgaacctgggaggcagaggttgcagtgagtcaagatcgtgccactgcactcccgcctggtgacagagcaagactctgtctcaaaaaaaaaaaaaaaaaagaaagagaaaaaaagaaagaaaaaaaaagaaaaatgagacattaacctgaatgttgaaatgctgataagacccagtctttttcaaacacctgtagacacaaatacagactgaaaacaatcctccctctttctaatttatagagtcaatgccattatattttgggactgggaaaataacaatttgtagtgtctaaacgtagatgttttactgtcgtgtttcagattgtggtgctttaaaattatgtcctcacatcaggtcatatcccttcattttactgttatatgagccaaaccgcaaaagctaaaaataatggcagtgccgggataaagctggtacacccacagcagggccctcccggagaagtgggtttccctgccctcctggttactgcacgaggtccacggaggactctgaggctcaggtggcttttttgtcactggcctcattatacacctggaatatggaagctggctactctttggcctgggatagcctgtgcattggggattcactagaatcaaggcagaatatctcctttactagatctgacaattggatcggtcagggacagaagatatagtgcattacaaacccctagagattcatattgaccgtgaagacttcaggctttccttctcttctagctggaagttggagggagctatttatttatttactgatttatgtattcattcatttatttttgagacagagtcttgctctgtcgcccaggcttcatcactgcacactgcagcctcaacctcacaggctcaagcgatcctcccacctcagcctcctgagtagctgggatcacaggtgcacaccaccaagcctggctaatttttatattttttgtagagatggggtttcacgatgttgcccaggctagtctccaactcctaaattcaagtgatcctcttgccttggccttccatagatatgagccaccagacctggccagttggagggatttataatcacctgaaattttctttactcctctggttactggaaattgcagatttaagtaccttttagaaaactggtaggaacctatgagagtaaatgctaagctgaagcagtgactctttaaaaattaagccatttgtctttagcaagtaaaaatcaagaccttctgttatgttgttgacagaggactatatcgtttcctaattatttaaaatgaaagaccaccttctgaaccatatctttagataaggtctaaatacaccgtaggtaatactttgtgactccctttcattctacttattacgatactaacaatgccgcctctctgtctaagataaggtatagccaagctgacttcaatgtcttaaacaggaaattcgttttgtagaaataattcggagctcaaagtctgctctttgtagaagtgatgatgctaagtgtcctgtgccgactctgcttgttgagtagctgaacagctgcctgcctctgtcctagacgtgcttagggaaaaagaagccctttgcaaaatgatgtgacacttggcagaaagttaacgtagaaacttagcggtgtgcttttgtttgttggtatatgtgttgctgacattttatttttttcagattgcaggcctctgctcaccaaaaggccttagccaaggaccagacaaatgagggcaaagagcttgctgagcaaggagaacctgattcctccactctaagcttggccgaaaagttggccttgtttaacaaattgtcccagccagtctcaaaagcgatttctacccggaacagaatagacaygagacagaggagaatgaacgctcgctatcaaactcagccagtcacactgggagaggtggagcaggtgggtgtgctatagtccrattgcagtttgtgtgtgtgtgttcttaaattatmgcactgcagtattcctctgaggtcaatgatgtaattaaggtgctctaccaggaaactgctacctgtaggtgatttggtaatagctttcttcctaaaaatgagaattctaccaagtatgttgctctttttttgttttcataccttgcttgctgaaatatctagaatgagtccattttggagagaaaaaaatagtatgcccaactgtgtttcacccagaggattttgtttaatgagacgtattatataactatgtccaggaatggttttccactaagagaaacagtgaaactgcatcaaatcgagtatttcagcttctgtcaattcataaaccaggatttatatagatgatatttttcaagcagctttttaatttttaactgtgtccttccaggtgcagagtggaaagctcattcctttctcacctgccgtgaacacatcagtgtctaccgtagcatccacggttgctccaatgtatgccggagatcttcgcacaaagccacctcttgaccacaatgcaagtgccactgactataagttttcttcttcaatagaaaattcggactctccagttagaagcattctgaaatcgcaagcttggcagcctttgrtagagggtagcgagaacaagggaatgttgagagaatatggagagacagaaagcaagagagctttgacaggtcgagacagtgggatggagaagtatgggtcctttgaggaagcagaagcatcctaccccatcctgaacmgagccagggaaggagacagccataaggaatctaaatatgctgttcccagaagaggaagcctggaacgggcgaaccctcccatcacccacctcggggatgaaccgaaggaattttccatggctaaaatgaatgcacaaggaaacttggacttgagggacaggctgccctttgaagagaaggtggaggtggagaatgttatgaaaaggaagttttcactaagaggtaagtgaccagtgcccctaaagctttagaaagccactgggttttagtttctgcttgatttgtcctgtgtctatgatggcttttaacaaagttctataggcagtttacagctagtattggttaaaagttcagcgggaatcctattcttccctggatctgactagaggatacatcaagttttcagcaataaaactactggaagagctttcacacatcttcatggagtttctgttgactttggtcactcacacaatggccttctgagctgcttagttctggtggccccttttagaaattgatgaccccaaaggtccaggctgggtaagcacaaggaattcaggaaagacttgaccccagtctctgaatcgctagagtgcttcttcctgcatgcctgttttgcaggctagcaagctacactgcgtgggcccttcatcctctttctacgtttgtatgaaacagtacagtgtaagttataataggggtttgcgtttgtgagtatagcacatttgaatgttaaggtattattttggagaatagaaccattctggagtaaatagttaaagctgacttcctgtgtctcgcacacaggagagaaaccaattgccacgaagcattttgctgtgtgggtaaccctccrggaagtttggttttctcacagagtgtagcgtgctgcagatttgcataaatcccagtggattgggtcacccgccgtgtgcccacggattgaaccctgagagctgcactgttgagggcgaatcgctggaagaatgtttgcctgaggagttcagtgctgatgttgctcttttccttcccagcggcagagttcggggagcccacttccgagcagacggggacagctgctgggaaaactattgctcaaaccacagcccccgtgtcctggaagccccaggattcttcggaacagccacaggagaagctctgcaagaatccatgtgcgatgtttgctgctggagagatcaaaacgccgacaggggagggccttcttgactcacccagcaaaaccatgtctattaaagaaaggtaatgagattcggtgagcgaaaagtaattctctcggggaggagcttacagcttgcttttagaaaacaatctcggtgatgggcaaagagatgaaatcatacattcagcttctaacaggactgtgctgttgtcctggagtaattctaggaagctgaggtgtttgagagtgaactgcctttgctcatgagcctggtttggtaatgagcctggtttggacagggctggttccagactcagatgagaaaacaaacagaaacagacttctgttttatttatttgyttccactgtcccaatatcttttataatattaaattcttggactatctaatgacaggagctgaaatcttggctcttccccttttagatacacagggttcatactgaatgcacaaaccacttgtgactttgtgtaaaatatgtgtagagggagtgaagataaatttacatagagggcatatatctttggacttagaatccaagttttgtttcttttacagattgtaaaatggatgacttttctgaactgcatttagaaattgtatgtcaggtaatagcttgaaagattgcatttcagcatcaaataacacagtagcctaatttctttcaaaagaatgacgtagggtgcagaggaatatatttaaattagacagatacagagaactggaagtaaattaccttggggatgtgttttccttgttaacccttaaccacagatgaattaagcagcaaaagatgcaatagtgggaataaattcagagtttgatagcagagtagggtgactaaataaaaacgtattgtactgaggtgatggacattctaaatagaggcttgatcactatgcattttatatgtgtaacaaaatttctcatgcaccacataaatttgtacaaaaaaaggagaaagtattcagtaggaaaaaaacatgatggaatagttgataggaaaactgggtgaagaaaaatcttgtcaactccatattaggagaaccatttccatcgcctgttcccacagttctgccaacctccacccttcctcagcacctcccaccacacggaagtctgcaggcttcactgaccactcttatttttctagatacatttcaaactgcctaagactatactaaaccacaatgaaaagtcttctttctttcttttccttctttccttttttttttttttttctttttgagactaagtcttgctttgtcacccaggctggagtgcaatgggatgatcttggcttactgcaacctctgcctcccgggttcaagcgattctcctgcctcagcctcccaagtggctgggactacagacgcacaccaccacacccagctaattttttgtatttttagtagagttggggcttcaccgtgttagctaggatgatctcgatctcctgacctcctgatccgcctgcctcggcctcccaaagtgctgggattacaggcgtgagccaccgtgcctggccccttctttctttttttttttttttagaggaatggtcttcctctgttgcccagactagagtgcaatggtgctgtcacagcttcactgcagcctcgaactcctggacacaagtgatcctcctgcctcggcctccccagtagctgggactgcagacacgtaccaccatgcctggctaattttttcaaaaagattttttgtagagttgggaggtctcaccatgttgcccaggctggtctcgaactcctggcctcaaacagtcctcccacctcagccttccaaagtgcggggattacagacatgcaccaccacacctggcccttctttctagttttaagccaagcttcttgaacattatttgtaaaataatagatgctatctttttcaactgacaaattaatcacattgttaaatctgacttactttctcctttacttacttaaaattcatgataagttagacctggcaggctgaggggcatagggaaggggcagaggggacagtgcaatgaggagagggatgtcttcaatcggggaagcagttgggcctattgaggcttgaagttctcttccacgaaaatggggctcaaagagagtttcatcccagaaacccaaatattgacaactggttaggtgaggaagaagagagatcatttaaggaaattaacaataaatatcacttatacacaagttctgatgttttacacatgagaaaatatccctggggtattccccagtgggaaatactaatattatgcccccttctttcaaaggcttttaaaggagccttcccatctttgggaatattctgtccatctggacttaggacttttgatgaagaagtcctgtgtctatccactaagcaataattcctgatttacttacctgttttttggtaaattttagttgayctgtatttttctgaaagctttaatcctactgtaaaattctcatttttaaaagtragatactggaaagacgtagcttcttagcttgggctttgtggacatgtaaggcgttcaaggatggctgtaaagtttctgtgaacagcccggaagtgtattcagaattgaatgsgtgagcacacacacctgctggctaacagaagccataacttatcatggtctccaagagatccctgagcccagtctgttcagaatcatgatagaaaggaatgcttgattgatattcagctattcagtttgttaaaatacatttatgaaagaacaagggacactttatttagcagctatgcttgtaataaattacactaatgcaaaatatattgccagtgatcttttcccccttaccttmacagtacttttatttgtactttgctgaaagtgactaaattacatatatttacaattcatccatgatagcttttccrtgagactttaatccctcccttttgtgaaaatgaaataatgaagcttaaactatttaaaataagaatgttattcctccatttatttgggctttacttttccttcttgagaaagaaatatataaaatcataggacttccaaactttattctaaccgcctctgactgcctcattttaccaaaggagggattcggctccggtagcctccagggccacgtagtgaatagagctgacccaggggccacgtctccaactctcccctggtccatggtgagacygcggtgcgctcagattagtgttagagcagccaaccccgtgtgctctaaccaggagaatacggkgagaggacagaaatcccagctagacagcagtgttagaaagacacaccttctttcttcatgaattttctcagttcacatgctcttaacagggcttatatttcaaattacacatccaagttcacatttcagagtctcagaaatagagtctggaatttgcagatttccttcatcgttttttataaatgcctgtccccactaaggagggcaggtctgtcttcttcagccttgttgtgtcagtctctcccctgtccagggcctgactatattaagttctcagtgctcagtgctacccagcgtcacagactgccttccacattttgtacatgatctctcatttaatttttgtctgtttgtttgttttttgagatggagtctcgctctgtcacccaggctggagtgcagaggcacgatcgcggctcactacarcctccgcctcccaggttcaagtgattctcctgcctcaccctcctgagtagctgggatcacaggagcccaccaccataaccagctaatttttgcatttttagtagaggcggggcttcaccatgttggctacgctggtgtcgaatgcctgacctcaggtgatctgcctgcctcagcctcccaaagtgttgggattacaggcgtgagccactgcgcccggctttcatttaatattgaagacagcctccagaagaaagcaatattatccccatttgtagacaaaaagcatagaaactaagaaattataggaaaacctccatacactccttttttagaatatgtttgatgctcaaggaaacatattaaaaagttatttttatatttatttatttatttgtttattttctgagacaagagtctcactctgtagcccacgctggagtgcagtgacacgatcttggctcactgaagcctccccctcctgggttcaagcgattctcctgcctcagcctcccaagtagctggaattacaagcacttactaccatgcctggctaatttttgtatttttagtagagacaaggtttcaccatattggccaggctggtgtcaaactcctgacctccagtgatccacccgtctaggcctcccaacgtgctgggattgcagacgtgatcaccacacccagcsttaaaaawwttttttttcatcttttctgacattgtgaatgtcaaatttgaaccataaccagcaaaaaacttaggatgcaatcgacttttcccaccggattagtaaaattgctattttctgactgtccaaatgatgtgtgtttaaattatccctgtttgggaacttctttgagaaacattgcgaattaaataattcttatgttatttagggataaaacctttgctattgcttaaagagtatgttaggcctttagaaatcttatttccacaatgtcagaaacagtggcatctgagctttcttatttrgggaaaaagactattgaaaagaaaaaaagagccatcctttcactttggcaaattggtggcrtgtaaggacttagtggaactccctgaactgttgcagaatccacctcacgcctctatggtgttctgccctagagggaccggctggaggctcctgtgtttcccgcctgccggcccccgccccaaccatccacccttcggtatcccacccagccagaggctgtctccctgtctccacaaactccaggttcttaccctgtagctgggagatttcagccactagagggccccagatttatgtaggaataagaatagagcggcagttcccctttactccctccttttctttttctttttctttttttcttttatttttctagacagggtcttggcactgttgtccaggctggagtgcagtggtgcgatcatagctcactgcagcctccacctcctgggactcaaatgatcctcccacttcagcctcccaagtagctgggactacaggcacacaccaccatgctcagctggctttttattttttatttttatttttttgtagagacggggtcttgctctgcggcccaggctggtctcccacctcctggcctcaagcgatcctcccacctcagccttccaaagtgctgggattacaggtgtgagccaccacgcctggccctccttttccaaagtgtgatttgtctctcatttaaaagacactttagttcattcacttctccaacttgtgaaccagccaaaaccaagatctaatataagtacttaagtgtgctgttcatccctatcagagatctatggggtgcctgtaattctctaaaatgaagggaaaattctgaaaaagagagagaaaacacatcttatttaatattaggggcacatggttgtcatgtctcctgtttgacccagccctgactgctctgagcctgatgtccttgttctcaacaagcagggttctcaggccagcattccctgctggaacagtgtgggctatggaagaggaggcaccgtttccccgggtgtcctggcaggcacctgtcacggtggccctgggccaggcgttgggtgagcgggccagtgtcgtgcctctctctgggttcacacagcccaggcctagccactgcccrggctcccagcatcacagtcctgcaaacagcactttggcttggcagttgttagaagcgctgacagttgtttgaattgcaccggcaggaatttatgtcctgcgtaggcccagacgtcggctcctcgaccctctcagagcctggtggtctgcggtgagccggagggctgtgagctcacaggaggaagggacacatttgggaagatctccctccctcctcagcgtggtggacaccaatgaggaaatctaaagggacaggaagaacacactcaagttttagtgcgtgttattttcragttattcgtcatgtgctccgtaggctggagccgagggctggctccaagtgccaggtgggctccayggaagcacagtttcttccagattattctggttactctgtagtcttcggaagtccccaatggtaaccctgccagcacatgtagaagcaaaatttcagggttttggaatggaggaattctttggaggccatcccatggtgggaaaaaccttataagaaagccagaatcctatgcctttcctaaaacggtgtggcaaaaatgtgtccggtcagctaatgttctaccgaagtgaaacaagctacacacaggcaggcgagggctgcagtcacgtctctctgcccactaacatccagtgtgacctcagtcaatggaattcttgacccrgatgtacccacgttccttgtccgtcagaatgggaataacaattcccagtgtcttaggggtcgccgtgcagatcagcagagtataagatggacgaggaggtgatctcagatgccacagcttgtgtttttctaagtcagttttagatgccacaaagcaaccaccagggaaatcgtccgatgacataggtgctggtgtccttgccccagacttttgggagcttctttttgagaaggtcttcaaagaccrgagctcatgacttttaatgaactcaactcaggaagatgaatttgatcttttaaaaattcatcatttgaatccaatctgattaacaaggtggatgttcaggaggagtagctgccagcctgggtggaaggtgaagtgagagaagctggttctgaggccagtttacagggagaatatcagtgagatgagtgcttggttccacaagatcatgaactggaaggacttctcatttgggtattaaagtgctggcatgcttactttttgaaagtctcatttattgatgctttgaaagctcaaatacagcatgcaaatatgaatttcttttaatgatttcattttgtgagattattttattaggataaaactgactcattcaaaataattggagaaaagatgaatcatagtcattatatagtatgaaatggtgyggattagagctcttgaaggaatttmgacttcgtgtccaagcccatgaactagctcttgtagcatgcagggtgttgttmaacattcgagaattacaggagttaggactaaatgagaccttgacccaaagggatctgcatgagattgacaaggcagccttaccccagttctagagattgagcacttgagatcttatctgctgccacttagcagaaagaggaaaacagaaatgaaggggggagaaggaagagattgaggaaggggacaggtccagagttcgaagctcctgcctcctttgggggattcctttcttcayggcttacttcccgttatttgactgagtgaatagacaaatacaaggtgtgattatgtacacatacgtagatgtcgccggattcttgtttaagtactacaaaatttgttttcttattagcataacaaaacttttatcatagaatatatctcatcccatctccaaaacaaatatttaatgggaatcgggaagcttggaagaargacccttagagatcatctgaccagttcctgatgtgacagatataggagggagaaccgagatacccaaagrgagtagccaaattgggaccaaagctgatgttctgcttaaaaatacactgttgtctaggcgcgctgtctcatgcctgtaatcccagcactttgggaggctgaggcaggggatygcttgaggccaggagttcaaaactgccctgggcaacatagcaagcacctgtctctaccaaataaaaatttwaaaaattagcctagtgtagtggtgcacaagtgtagtcctagctacyctggaggctgacatggaagaattgcttgagcccgggagttcaaaaccagcctgagcagcatagcaagacctcgtctctacaaaataaaaattttaaaaattaaccaggcgcagtgatgcacacctgtcatcctagctactctggaggccgaggcaggattgtcgcttgagcccaggaattcgaggctgcagtgaaccgtgattgtgccgctgcactccagacctggtgacaaaggaagaccttgtctctaaaacaaatttataacaataaaaaatatttatggatttaatatttatggataaaaatatttatggatttaatatttatggatttaatatttatggataaaaatatttataccatttgtggattatgcattagtgatatcaataagacctggcccatcaggtccagcacagagggaaaaggatctaattatttggcttttccctactctttaaattgtttgagcatcggctcaaatgagtttagtgatcaccaccttttttttttttttttaccttttatctttcccatgtttgtttgtccagcgtaaatacctaagatttcttcattcatgcaatacagttagctgaaatagcctcaagtttgtgaaaaataacctttcaggattccagtattcaagcactgcctatcaagtcacatcatcattgagctaaagtaggttagttaacaatatcagttaattagattctttttttgtgtatatccttcccctgaggaaagttgaagtgataattttaaaaaatgggtttatagaaaatagtttctgtctaaagaagatggataagaatgatcaaattcatttgtaggaaaagaatagggcttagaacacctgaggagaaacagtcataaacatcaaattttacctctaattgaaagggatgatattaagagactgtaagtgcttcatggctttatgtttttgtttgtttgtttgttttttgagacagagtctcactgtgtcacccaggctggagtgcagtggcacaatctsggctcactgcaacctctgcctcccaggttcaagcgattcttgtgcctcagcctcccgctggctaatttttgtatttttartagagatggggtttcaccgtattggccaggctggtctcgaactcctgacctcgtgatccaccygcctcagcttcccaaagtgctaggattacaggcggaagccaccgtgcctggccagctttatgtttttaagcccatgtctgcatcattttctgtaacacagctttagtcctttaatgttatttcacaagtgaccagaaggcgtcgctaaaagacatttttctctggggacggttctcttgctttcagcccaaggccaaggaacagacatccttggctggaatgatggtgcatcttttatctagcaagtcagatttcagctctgtgtttcaatcaactgtaaaatcttcgggccatcttagaaaagggactttattatttttccagacatgctgtcttccgaataaatgaaattcaaaatgttaaaacgaggcggctgtggtcatrtcttggcccaagccgcctctcttacctagattatggttycatcacaaggaagagtttggtgctgaactctttgtggcgggcatgttttcctcctagattggcaytgttgaagaaaagcggggaggaagattggagaaacagactcagcaggaggcaggagggcggcaaggcgccggccagcagcctgcacacccaggaagcagggcrrtccctcatcaagaaggtaayattccccatgttaggaaaagccttccgactaacatcactcttggaagtgcatcaaaaagacaagcgtgtgccacctaattcctactctgtgaagcatttgtgcrtttttgcccttagggtacacactgagagtctgtcacagagcagctaaaattgggcagaaggctgtgcctggagatgttttaaaactgggatcagcaacacacacacactatgtcagcaagcaagtgcctgaattttaaagtgtggactttttcttcagtttaaaaaccttcttaaatgaagtctggctttcatgtgttattaaagcctttataatgaaaaaaattgaattcaccactaatatctttaagttccatgtaaaatacagacttgtgtttcccatgcagagattttaaacctaagtataaaaaataaggacataattgtggtttatgagtatttagttcatcatttaagcgtgtttcatgagtagctatgccttttattgagaatgtacagtaatgtataagttgaaacaaaattaggtaatgcatggtgatcaatactagcaagcatttcatatgcgaaagtattgatgaattgttaaatcacagatgtgatgatgaccagcttttgaccaggtagtgcacacttttgaaactgatggtgacttacttgctggctggccctacaattgcaaatgcaccttctggctggaggcgaaatgatgcaccggtgacacactccctggtcactttctaggatcagaagtcttcaagtagaaaagaaaaagaatgctttcaacccgatgatccccaggccccttctagctctaaaataagttaagcatctgtggaagggagagatgatgagtgtgactttcatgcattaagaaacgtacataaaaatgagatgtgcacatagaagtgtgagtcaggagttctgacactatttcctctgatacttctgtgtcttcttaggtttcactggaatggcaatttgaattctcttctttgagacatacatggtgttaaagatgatttaactaaagacatttaagccttggccatttgtaaaattctcaaatataactagatatttagaaagtatatgcatgtgcatatttttcacacaccgtgtgaaattcagatttcaaaaatgtgatcctgaagtgaaaatccatctgtcaaatwatgtatccctgctacccgcaaactttatttaaaagaatcttgaaatcattgcttcaaaaatgactttaacacattcctcattagcaaacctgccaactactatgtcctggcaccaagcagcgcctggccccttgtccatcattttggaaggtgcagagactccccggcccatcaggaactgggagtcccagagagccagtggaaatttaaatgaagccaaaaagcacgaagcaaaagaggttcctggtgaatagtgaaatgggtgcactgcccccttagaagaatggaggatcaccttaggtgtggaagccagaaggctttgagtggaggatgagatccgaaccacctgaacgctggctaaggtttttagaaggcaagagaggccagttgactgcagttgcccttggggttgataatccagtgacctgaagccccgggacttgcaagcaggctagggctggaatgggaaatgctgcctctgggcgcgtggaggctgctgtttctgcagacggtgaactctcccactcttctcagtggcctgcttccctttggctggagacaataagctctttgaagctaaaataagcggatctattttaggcctttgtagcccacactgggcaatctcaggttctgttgaggtcaggtgtttctcagacggcctctgacgacccctcggttcgttccttcccgagggctggcactgttttcagtcacccgccggctgtgctcagatgtggtgggtgaggcgccttaaacctggtctgtcttgagggattcccccagtagctgaggaggcttgacatgcccactgcttgcggggtgtctgaatgctgccttggagaaggacagacagtcatgacacgtggggcctgaacaggggcgcttgctgcacggagtagctctagccttgctgacggagaggtacccaggagagcaggtgccggaaccttccatctttagcaccaaaggcagaaaggagccggcgttatggtcagctcatcacgcccttcacggttcctacgttccttttgtgtgctgagaggctgctgccgtgagtgtgcagtctgtggaaatgtrgaagaggcaggaaagagaggggactctagaagttccttccattgctcctgtgaaaacacgtgcaacatagaagtcagcaccatcctgtaaaaatagaatgtgtgccacacaggtcattttgaaatttccttggagtcacattaaaaaagtacgataaaggatgtcttgaaaaatctgtaactgttttgtttctgtcaatggattggtctcaaaagaaaacatatttgaggggctccagccagcatctcattttaggtcttttattatgttaagatttactttggagccaagctcaatggccgtgcctgtagtcccaacactgggaggccaagacaagaggattacttgagcccaggagttttagaccagcttgggcaacgtggtaaaaccccatgtttacaaaaattaactgggtgtggtagcgcacgactgtgatcccagctacttgggaggctgatgcaggaggatcgcttgagctcgggaagttgaggctgcaatgagcagtatttgtgccactgcactccagctcgggtgacaaagcaagaccctgtctcaaacaaaaacaaaaacaattttgggcctgtgaatagatattaagctggagttttcattccttttttttttgagacaaagtttcattctcgttgcccaggctggagtgcaatggcacaatctcggctcaccgcaacctccgcctcctgggttcaagtgattctcctgcctcagcctcccgagtagctgcgattacaggcatgtgccaccatgcccagctaattttttgtatttttagtagagacggggtttctccacgtaggtcaggctggtctcaaactcccaacctcaggtgatccacctgcctcggcctcccaaagtgctggaattacaggcatgagccaccatgcccagcctggagttttcatttctatactaaaagatcaagcacatctcagggaataggaaacttaccagcagttccttctttccccattttacacaccctccccccaaaatgaggattgatgatcaagagcttaagagcactaattgtttacctagctagttctgtcatttcctgtgaaaaactgtttgggtattctctctctctctctctctctctctctctctctctctctctctctctctctctctccctccccctccttctccctttctctctccccctctttctctttctttctcttccttgctgcccttattatctttcacctrttcttggtatagtctaggccaggctaacctgacttaaacatgtgtgagtctcgtagcatatatacttggtctaaagacggtaaagctgtctgttttgtggatttggtctggtctgcacggtgtggtttatgtgcacttgagcatggcttgtgtacactttcctccagagtaactcattccaccagagagaaatcaaacgaagcaaagtctcaaagaagtggtttggcagcagtctctgttacaactaactttcagttatgtatttattttcaccaaatagttattttcaattccatccctatttcggtttattcgacgttaaggcacacacggtggctcccacgtcttttgtgaagatagtcatccagcgaatcagacattttccaagaagtgaaaaccctttatagacttggccattaaaaccctgtgtctgtttctgagttccagagggaactggatatcccactgtgcttctgcagctgtgaggtcagtgtatccagctcagatctatgacagccccagaacaagtgcccgaaatttcaagaaaggtgaatctggcacatttatatgctcagtgtctgctgccattgaaattccagatcatagtgcaggagaatgaagtcactttaaagtgcgaggatgggagggagagaaaggctgagggaatgctctctaaactccagatgatcattctgcggtcacggaatgagttggcctgaggttcacatcaccctattgtgtgagcacgtgcatgctgctgtttgaacccaggcatgaaatacttgaaggtgattgcgatgccctgaccaggctcttctcttccaatactctgccatgttccctgtttgttttaacctgtaggaagaaggaggagttgcggatgatagtgccatttctaatctgctttgggtaagcctgactctaacacaggtgtcctctcgatggtggccagaattacacttcgcgtgggtaatcctgatcctgggtggttccttcgtgcaccctccctggtgcttttcttatctccagaccagacacagcctttgtccggagtggagagctgagcccgtgcccttaaactattttttaatcatgtaatgaagatactttaaagaatatgatattttctgttaaatgttaaaactgtcaatgaaagtcatggttcctctctctgtaactgacaatcttctataaattaactcatttaattactgcacaaagctgactcaggtatatttaccgcgcttgtgtggatttactttagcrttagcattcaagggaggactctcttgaaaagagaactgaaattgcaatgagtaaattaacattctgttagaaaaatcattgttttgtctctccctcccccatgtccctgcccggccccgctctgataaatcttctcttttcaccttaaaccctcttgctttgctctgtaggaacctgtatatgcttctacttattctcctgctattcctgctgcccataaatacctgtcttttgtgtcgattaatcaggtgaggaaaagccactcatcttaagcctcactgcaatttctgagcaataggaaaagaacttctgtttyaattttgggaaataacttatttggtgcatttcactttgaaagagaggtgtgtgtgtgtgtgtgtgtgtgtggcagtacaattgtgtgtgtgtccatgagaktgtgtatctatgagtgtgtatctgtgagaatgtgagtgtgtgtgtctataagagtctgtgtgtgtgtctttaagtgtgtacgtatgtgtgtgtttaattggttcttcatatatttaggrtcagtcacacacacactgatccttggctcagattttcaggtggactggatggcattaattcacctcgtagtcatgaaactggtttaagaggagagtgtcccctttcagcctctgagcttcgatcctgagtcaggagcccaggagatgcagccatgttcttcgctccagctcagtgaggatgttgtcctactcagttcatagaggaggaggatatggtggaggcagtttggggtgtggagggacagggaggaagactcagcgaggggaggcccctccagtgaccctattaaagaaccaggaggagctggttccaatggccctattaaaactagagaccatgggccccctgcctcttccctccatcctcactgtagcctctctgaaccccaccccagagagcagaccccagcctgggctgagccactgtgtgggtgaataacatgaaaaataggaatggctggtttcttttatttcaccgtggaatgtccttggtgtcaaaacaactctgcaaagtggcaccatccacttttccatgaatgccaggctcccatctcctccctgccgggctttgccccatcacttccctcctagggcctctgtcccttccctcctagggcctctgtcccttccctgtaggccctctgtcccctccctcatagggcctctgtcctttccctctagggcctctgtcccctccctctagggcctctgtcccctccttcgtagagtctctatcccctccctcgtagggcctctgtcccctccctcatagggcctctgtcccctccctccagggcctctgtcccctccctctagggcctctgtcccctccctctagggccttgtctccccagcaggactggggctttcttagctctcaggtggcctctgacagtgccgcgatgggcctgctccagcagcaccagcagttattgaatgagtggctcagggtttcacatgcgaagctgacagggaaggtgtctggggtcctcccgtagtcatctcgcctcttcacagatggaaactccccacttcttctccctggggcggcctttccctcactctcctggttccttcccccgaagctggaaatgctggttgtaagagcccaggccccacgtacccagccagtgtccaccccaagaaaggggctgaaatgtggagcaaacttcccattccatcacgaacgggggaaatgagcttgtgtttctttgaaataagccaatattaaactttaaaggaaaagatatattactgaagtctttaagtgtatacagtcggcccttcatctcttccagttccgcatccaaggattcaaccaactagggatacttgggaataaaatcaataaaaaagaacaatacaacagttaaaaaattaaaaaccaatacagcagaacaactatttacataacattaccttgtattaggtattataagtcatcacgaaatgatttaaagtacacagcggggatgtgcacaggctgtgtgcaaatcctaccccattttacatcagggacttgagcatctgtggattttggtatctctaggaggtccttgaaccagtcccccatagacgctgagggacaactagatatatttttcagaagaatttatttttttggagcagttgtaggttcacagcagaaagtacagagttcctgcatcatccctgccctcccacacacagccaccccaattatcaacatccccctccagagtggcacatttgctaccattgatgaacctacgttgacgcgtcattatccccaaagttaatagattacgttaaaatttacttttggtgtggtccattctttcggttttgacaaatacttaatgacatatgtccaccgttacactatcatacagaatcgtttccctgccctgaagatcccctgtgctctgcctgctcatcactctcaccgcccagtccttggcaaccggtcattttttactgtcacatggttttgccttttccagaatgtcattgaattggaatcacacagtatgtagccttttcagattggcttctttcatttagtaatatgcatttacgattcctctgtgtctttttaaaattttatttatttttaaattattatgattattattattatttttgagatggagtttcactctgttacccaggctggagtgcagtggtgcaatcttagctcaccgcaacctccacctcccgggttcaagcgattctcctgcctcagcctcctgagtagctgcgattgcaggcgcccgccaccacaccccaggtaattgttttgtatttttagtagagatggggtttcgccatgttggccaggctggtctcaaactcctaacctcaggtgatccgcccacctcagcctctcagagtgttgggattacaggcgtgagcctccactgtgtctttttatggcttgaaagcttttttctttgtatcgtcgaataatatttcattatctgaacgtgccacagtttatttgtctattaatctactggaggacagcttggttgcttccaagtcttggcaattatgaataaagtgctagaagcatccatgtgcaggcttttatttggatgtaagttttcaactcatttgagtatcaaggagcatgattgctgtatcatacggtaagagtatgtttagttctgtgagaaacctccaaactgtcttccaaaatgactgtaccattttgcatttccatcagcactgaatgagagttcctgtcrctccatatccttgccagcatttggtgttgtcagtgtttgcatttttgccatcctaattgatgtgtaataatgtcaccttgttttaatttgcaagtctctaatgatgagatttgcagatatgatgttgagcatatttccatgtgcttattttctgtcttatatcttctttggtgaggtatctattcagatgtttttcccatctgttaatctggttgttcattttcatattgttgagttttaacagttctttgtatatttggggtrgtagtcctttatcagatatgtyttttgcaaatattttctcccattctgtagattgtcttctcattcttttaacagtgtcttttacagaagtctttaatttcagtgaagttcagcttatcagttatttcttctgtggatattgcctttggtgttatatctaaaaactaatcaccaaatccaagataatctaaatttcttcctatgtaatattctaggagttttatagttttaatttttacagttaggcttttgtgatccatttttagttaattttggggaatggtggaaaatttgtatctagtttttttttacatatgagtgtccacttattccagcatcgtttgttgaaaaatactatcttttcttcattctaatgtttttgctcctttctcaaagatccgttgactaaatttatatgaatctattattgagctctctattccattgatctatttgactgttctttcatcaataccacacaatcttgattgccgaggctttatagtaagtcttgaagttgactggtgttggtcctccaacttttttcttccccttcagtgttgtgttggctattctgggtcttttgcctctccatgtaaactttaagatcagtttgtcaatatctacaaaatctcttgctgggactttggaactgcatcgaatgtacagctcaagttgggaaaacctgccatcttaacaaaattgagtcttcttatccatgaacatggaatatatctccatatattgttaagtttaaaggaaattaacatttgccaaaggcatttctgtttcatcacttcaaaattaaaatttcaaaaaattatatacttttacctctgaacaatktttcccagctaaatataaatagtttatatactgagtatgtagcactagctcatctgtgttttcagaggtcaagtcactccttttctttcttccagcaatactggtgtcttaatatttaataatacaaaggttcagagaagaaaaaaagcacacaggctctgtctaaatggactgtttgtctctgtgtcaggcttcaacctgaattctttctcacatgcctcagggctgtaccagaaaaagattttactttattcccttcctttcatcttaggagctggtagatggtgacaggactggaaaacacttactttgaggtctgagccttaacctgtgatcttttcttcatcttttattcagggtacttgagggtgtatgcagtgacgagggactgaaatttctcttaaggaaggggcaaagctaaatttctttcatagtgtgtagaatttgaaatgatcttagcatttttgaaaactgaaaagtacaactttgttcctttcaccttatttctattacttaatatgtgcttttataatttcttcctttacagtttaactacatgtgaataagataaaaaaaattttaaaagccaggtcacaatattttatttcgataaagctctctggttgtggaagagtttgacccttaaatccgccctaatccttataatacatcttagttctatgctctgtgttggatcacatccctgcgtgagaaacattgagtgagatttgctatgatttttcagtcagtgtatacagagagaaagaaacccatcagcaacatcaggcaacctaaaagtattcgtgctgatttgtcctttgcacagtttcaagctgtgacctaccaatatctgaccatccctaagacaagaacctcctttctacctatttcactgccttctacacacacacacccacccacccacacacacacacacatgtgcatacacatacacaaatactcaatttctcttccaccctctttttctgcctttccccaccacattcgtgggatctgtctttgaaagaatgaaggacagatggggtaggattctgtttagattcttcctcaactctctcttactattccagccaatcccaaacatgtgtcagctaaacctggaaaaatgacacaatacttattactatatatataacatccttctctaaacaaggaaagaaaaatttagaaggaaaaaaacaagacaataatgaagttttaagcttaaaaaaatcaaatgaacaaatatatatatcttctttgttctcacattttgagttctaaattgtgataaatatttattagattatttagagaataaacaaactgtatatgctttacacccttctagagccacgtaaagttgaattgcagcaattagggggtcctaagctaaccctactaagtagcaaagttaagtcaaaatttctagaaaacaaaaacatttatgtttaatattactattcagaagggagtaaaaattatttcttcttgccctaggtctggcaaacgaatgggagctttaaattctaaaatggttgtatcatcccaaagtttgtatccattgtgtgcataaagggctctgagggaatcccagtgctttgaaaaacgaaattttggatttgaagataccatttttctgagtcattatccacacccactaccccaccctggactgttgagatgcctgagagaattcaccacagagttgactaagtgaatagtgaatcaccacagtgatggctggacctttggagacgccaactttcttggcacttgatgtttcttggaaatatttgaagccaagcgccatcttggtttgattaaaattcactcctgaaacttcgttttcaaagaaaacgtattctctttgttgaattttgatgaggtctttcgggcaagtgaacctcatcgtttatttaaaaaggatacgtgattcagagagttacttggaattaggggcttctcgccgatcacgaggggaaatgttcaggtttttaggaaaaaattttagtaactttgaattttgataaaatgttaaacttacagaaaaatttccattataggcagagcactttcatacgctttaccagaaccactcattgttgacattggcccccctccttcactctcgctcccttcctccctccactcctcaccccactttcttgccttctcttcccccatctcatttttcccaccccaaccatgtgccagtagtttggaaacattgtgctcctctacctttcaatatttgactttatttcctaaagtcaaagatatttcctcgcataaccacaatatggtggccaagakgaggaagttaatgttgatacaatatttatctgatccacgtccatcttaaaattgtcartttcctccaataatgccctttgtagcccccaccccatctaggattcaagccaggatcatgcatcgcgtttggttgtcatatctctttaggaaaaggtttttaacctaatttaagttggcagggacctcraaatcacttctggctatgaaggctttatagaagaatcctgtgaaagacagattcatcacttagatgatggagaagtccacgttcatagcttaaaccaaatcttcccagtgcagacctggttttgtgctgctggaaaggaagggaaggcgcctttcctctgtcaactcccatcattccaggggttaagaaaatgaactgtccccatctccactctcttcctgtccctcctsaatcaggaagttctctctcgtgggtcagtgaagggaagtggtttgccatagtgaggaggaaaggcatyggggaagagaatctctaggatggwcttgactcggggctctccgagtccttccctgtgtcagcgcgaggccttaggatcacattgatccayggagacttcttagccaaggaaaatgccttaggaaggcagaaaaggtgggggacctgctagaataagttgagtagtgctcagaagtaatttgaaagcagatgcgctagcagcaatctggggarcctcctagaagaaggtgtggagtgctcagatgtagtttgaaagcrgatgcgctagcagcagcagccttcctygggttcaagagacagtggaaagtgagagggcaaacccaggaggccatcaccggcctccagagccccttccagaaaccagcaggtgacagccagggacgtgccttctgctctggagggggcacctttgcactcttccttccttggcattagctccacacctcctgtgcttctcccccgctccccacccagcccagtgcctcgccataaacaggggtcttgcggtgcagggagggatggcttgaagacagaggaaaagcaaactctgccggccakcgtttgaggacctcctgccctggtatcgcccgcgaccaccacctacactcttctccccaatacacatcactcagtggcatgagcccygtcctctgcttccatcgctgctcctgtccctccctcctcagccccatctccccatcccaggcctgtcctgagcccctcctcctttcctgatgccctttgagtcccctgtagcttcttccccttcccctcctgccacatccccaaccgcaagcctaatgagcatcatcaatggcttggaaatggaagaagcagatctctccagaaatattccaattagaaactgctgagagcattttcagtagaaatgttaccgtgcatgtaggttttgtctacagcatagttcaccctcaacatcagatgtctcacagtttaaagccacttctgtgggctctcctggttgtctacctgcccgcagaacatcagtggctgcaggaaaaagcaagcagagtgccagaaaaccttctcctgccccttattcctaaccagccttccctgtctctaactgggcaagttccttgtgtgctcacatggataaagttttctagatcaatcatgttctttgtgagtatatagggataaaaatctcccagttaactgagtttaactagatggkttaagacagagaaactttaaaaccctgtagagtccagggcatgaaaacaatctatttttaattgtttgtgcttacaaaggattgttctggtgctccagtgccccaaaccagtaagtcacaggacagaggcattcatctaaagttacagcatcgccaatggtgatctccacccaacctggacgtaaggaagccaagcccatttcagatagaacatttttgaacatctttggacaatatacttactcctctttgtcaacctgcttttttcactcatgaaatgctgcaggctgaggtccacaccgctgtcatttctctctcctgttttctcttctgtacatttatgaacagcgggtcacagaaagtcgagagagccaaatgacgattgaggagaggaagcagctcatcactgtgagagaggaggcctggaagacgagaggcagaggagcggccaacgactcgacccagttcactgtggctggcaggatggtgaagaaaggtcagtgtgtgtgtgtccatgtgtgtggtgtgtgcacaatgcacacacgtgagcacacttacccatggagggcatggtggtacgtgatagctcaatttaaaagaagaaaccatggtctttttaagttttttctaagagacagggtcttgctcttttgcctaggctggggtgcagtggctcagtcatggctcactgcagcctcgaactcatgggctgaagcaatcttcccaccacagcctctctagtagctgggattataggtgtgcaaaaccatgcttggctttttaaaaatttttatgtagaaatggggtgtcgctgtgttgcccaggctggtctcaaactcttgggcttaagtaatcctcccacctcagcctcctaagtagctgggactacaggcttgagacaccatgcccagccttcttttaaaattttttaaacttactgacattctataaatgttttttgtgtaggttctgtgagatatttctactgaatatcttttcttcataaatagtatcttctttaaactttatatgattcttggaagtatttgaaggtcataaaacagtgatgcataattccatttgtcactatttcaaaacttacmcatttggaattgagtgcaagtgtaggtttcaaaagcagttcaaatctgctaacaaattttggtcttttcccataattacatttatttatttagacggagtttcactcttgttgcccaggctggagtgcaatggtgtgatctcggctcactgcatcctccacctcccgggttcaagcaattctctcgcctcagccccccaagtagctgggattacaggccgccaccaccatgcctggctaatttttcatctttttaatacagacggagtttcaccatgtgggccaggtggtctcaaactgctgacctcaggtgatccacccgcttcgacctcccaaagtgctgggattacaggcgtgaaccactgtgcccagcccccataattacttttttccttttttttttttttttttttttttttttggtggaggggacagaatctcgctctgtctcccaggctggagwgcagtggcacaatctcaggtcactgcaacctctgcctcccaggttcaagcaattttcctgcctcagactcccgagtagctgggatcacaggcgcgcgccaccatgcccagctaatttttgtatttttagtagagacggggttttgccatgtttgccaggctggtctcgaactcctgacctcaggtgattcacctgccttggactcccaaagtgctgggattacaggcatgagccaccccgccagcccataattacttttaaattgtttccatttccttctgacctggcaaccatgtaccctaagtcagcctttcacaataaagaagtttatcccctcttccttttaggttaattcctaggtccttctccatcaaacctgatttctctgactgaccaaagccaaatccggatatgctttaatagatgtctaaaatatgtcctcagttcctaggcagtgggatgtccctgctgcaatcttctgctgctgagctcttggaactgatttgatgcctatattcaaaaatttatgaaactgacttacatatcacttggttagtaaagttactggagagctttgaggcttcataagagtgtttggggctttatttcatatcctgcaggaaatgattaaaatttgggttccctttgtcacctatatgcacataccatcactttctaagctattatttaaaagcagatttcccatcatagtggtatacgttttcacattcacttgttcttaacatcttgtcatcaaatatagaggcttagcttttctttttctcagaacctttaatccacacttttatgaagagtacctaactcattataggtatataatgaatgtttgtagaaggaagggaaggagcgagacgtgggaaatccctgaatggtgattaactcaaatcttagtggggaatcctttctaacaaatctattcttaccttatcttggaatggtgaaaatataatttactctcacagaatgaggtaccatttgccaattttctgcatcagatcacagaactggatactcatgtttaaactcctttaacgtgagccccaacccttctttaacagaagcacgtcgttaggtgcagggtgactaagtagaactggaactgagaacttgaaccagacctcaggttttccagcttctagcccaggcttttatcttgatgactttccgctttggtttcttttctttcttccaccttaaaaaccctaatttatttgtaagtgggttcttactaccaaatgccactgcccttgtccacattgacatctgtgaaaatgttcccgaagagagtaggtgactggttgttgtacctagaattcattgaaaagagctatgggggagatctttgttttgttttaacattttgtaatttgcatctccctgccatgagccattcattccctaaggatccttagctaggtggggagcacgtttgcatagtgccactgcctgaaccgccagcagggggagccatggcagcggggtttgcccggcaccggccagracacggatggatttctccggttgctttggaaaccagccttcagagtcagtcctgttcattagctgcggagttaacggcctctgtgctaatgaactcctctgatgtctcttctcttaagcatccttctagtgagtaaagatttccctccccaccctgtgataccagattttatttatcatctttcaagaaagtttactttctcatggatggaaaccctttgcagttctggcaattgaaacaaattttaaaacttttattgacatcatcaatcaaatatatgtatataatgagacgtacttgtagaatattactaaaacttgagttttaaaccatttaatggttttttttattaaattttttaatgctataatacttctcccattcacaggaggaaggggcagaatcatttattcccttggttttccttgtgatagtgatttgcataacctctcgatgttgttcgtccagggatgcattgtcatctaagtggcaatgttatctaaggatttcacatttattacaaatgagtacagagaacattcacatctcattttgtttttttgtaaatgcactaatcagttttctttccaatgccttccacttagattagggaagcgatactcatccttctgtttactaagttttcttcttccagctggatactttctccatgcaggaattcctccctttccctttcatgtgtctctcaccacttgcccttttaaagattccccactctgcttctcggtaaatatactaggaaaagcatttcctgtttctgcccacacgggagatggacaggacttccaacacgcacagtcggtccagacctgccctggtctgtaatttcttctgaaaggttggccctccttgggttactgtctgtgtcatgtccccagggccactgtccctccctcccctcagcctggaggagagctccactgcggggggccacttgctggcaagtgtgacacagctcattctgcagatggcaccaatgcactctcagctgcccctgccatctccgaagggcctcagaactcacagctgcatttgcccaagttaacgtgtcatggacatgttttcccacgtctccaccgttcattttggaatatcggcttgtcagccactacagtccttggaaataataaaatccwgtctacgtttgcagttggttgtcccacagtcgtggtacgtgtgaaatgtgtgtgtgtgtgcctgcatgtgtgtaaattcttatatgttgtgccgtctaccctgggaytyctggagatcsrycagsgtcccrgagatttccagaagtgaccctgagatgctcagtagctcgtctgtgtgttccgcaggtttggcgtcacctactgccataaccccagtagcctcasccatttgcggtaaaacaagaggcaccacacccgtttccaaacccctggaaggtaagtcgccaaggccyyggccacgccaagcctgatcagaagaggccttagtgatgctgtctcactgacggtttctgcttgcctagatatcgaagccagaccagatatgcagttagaatcggacctgaagytggacaggctggaaacctttctaagaaggctgaataacaaaggtacctactrgaagccagaaggctttgctytcagaatctctaaatcctaattctgattgcttttcttcctcagccaaaaaaargaagttttggtcaagactgattagagaaacaagccctgattcacttgataacgtactaaattggggaytcccaataatacatttttttcttgaatctaagcccttgggatgccatccaattggaattgtgaactgagtgattttgcttataactctgaaagcagattattatgtgtcggcaaaatcaacgtgaccttgggcctggtgaactttaaattgtatgttatcaatttccaataaggtaaaagctaatattatttcatataatcacaaatgatttctaaaagaaaattatggcaaatgaatattgaagtaaatgtttcaatataaaagtcaatgcggtataccaaataaaagagcaatatgcaaaaacagccttttatctcttgattaaaatgcccaatcctggaaacttatcaaatactaggcgctgggagtccctactattgacagtgaccactaaaaggttgaaaataatacaaccaccactgaacagaaatataaaagtgtaatataataactgaactggctaggcagggaatgccagtcagcaacgcatttattacacacatggagcagtgatctagcccgtgggtcagcaaacgatggccattgccaaatccagctgcccacttgctttttttttttcttgtttgttttttagagacagggtcttgctctgtcacccaggctaaagtgcagtggtgccatcatagctcactgtagccttgaactggactcaagcaatcctcccacctcagcctcccaagtaggcgggactatgggcgtgcaccaccaagcctggctaattttttttctgtttttgtagagatggggacccactatgttgctcaggctgaagtcctgggctcaagcgatcccccagcctcagcctcccaaagtgctgggattataagcgtaagccaccatgcccagccctgtttttgtaaataaagttttattgaaacatatccatgcccatttgtgaactattgtcaatagcttttgcattaaracagcagaactgagttgtcgcaacacaggccccatgtcacccctccccatgcaaagcctaaaatgtttactggctggccctttttggaaaaagtttgccaacccttcacgtaraatgaggctgaggctggttcacctaccctcaacagaagcaagggcaggttcagaagcgttcagtgggcgcgtgtgtgcagtatggtcagcctccctctctcccattttactgcagatttgttcaggtgggaagtccttacgtcagagattaagtaagggcctgggaagcaaccacaggaccctgtatatcacaaccgtgtttcttccactcctggaacttaggaggcaatagaatttttaaactattgtgaagcataattggagtccttgtttttataaaactcttatgtcttttgcttgtttgttgatagttggcgggatgcacgaaacggtgctcactgtcaccggcaaatctgtgaaggaggtgatgaagccagatgatgatgaaacctttgccaaattttaccgcagcgtggattataatatgccaagaagtcctgtggagatggatgaggacttcgatgtcattttcgatccttatgcacccaagtgagttatttgggtctccgtctttcctccactgagaagggcttccttcgcctgcagagggcacatccatgaggctyttcccccagtgtggcctccttctccttctaactccatmacsgcggcgttagtattctagagccagggcaaggtgttgcaggagccaggggcacggagcctcgcagcagataaaacatgcagacggcagaccagatgtgcatgcaggcagaccgcgtgggccacagatgcttgtcctgtgccataaagagggcgtcactggatttttcacataatgtaaatattgttttgcagtttttaggtttacatcacttagcagagagttcaacgcctgtctttcatttgacatattgaattcttgctcataattttgcaaaatatttggatgagatgggctcaaactaatacagctaactagaaaatcagtaaggcatgttacttagcttccaatcatttataaaatcaatagatctgcgggctttctcattgatgtctaagggtttctcttcccaggggaacatgactaaaccaactaggaaaagtgattatggtattaggagtccgtcaatttcaagtgccaagaaaaagatcccaactcaaactgatttcagcaaaaagaaaagtgcggagggctttgtcggctcactggctgaacagtgcggmggggtttgccggctcagccactgaacagtgcggaggggtttactggctcacgcgctgaacagtgcagatgtggcctcgggttctagaggcccctcagaacacagtctgtcttggctgttttcctttgggctggcctcactctccgtcaggcagcggcctggcggcagatggacaccccagctctggartcacaaggctgcctccctggccagcccagcacgggtagcttttcttcccagtagtccaagcagaagttccaggtttgattttcttggcttcaacttgagccccctgtccatccctaaaccagtcactgtggccaatgsgatagaagatgmtgactgggtaaaggcggggctctgggtctcctttagagccacgatgggggtgcagtgaggtggtttccccaaaggaaaatccagatgctattaccagaagcagagggagacacgctagacaggctccacccacrgcaatccaccacatccatctgctcttaactgcaaaattgtcagtgacatataccattttctacaagctgctcctgataaattctttgcatattccagtttgctcaatttgtttcagtttgcatrttttaatttcctaccttaaaaaatgagccctttgccattttctacttcaaaatagtattttgggtatttgcatacatagcggtttaaccatttctcaatcttccgcccacacaatgtcactgtttaagtagttgtatatcataatttaaacatattgatagacayatatgacaccatggtacgtaaagacgccttttgggcacagaggcccgcgcagctggaggtggagagtggcagcaggagtctgttgggagatcgcttctctcggtctgctcaccttccctagtctgrttttccaccccaaagaattgtgagaatgtggggtggtcacagatggttgcgggcctattttatttcaatataktcttccaaaaagtggttatttttcagaggaggcagtgcgttaagtggaagctagtcatggagggtcagtaaggggaccgaaagctattgcatagggagaaagtttaggccgagcgaagaggattacgtcaaggagcccgtgcaaattcccgaagggcttgccggaaacagacaagtagacatgggtgtatgattccaaagcgagaattaggacktgtgcatgggcgtggtaggggggagggaagagctccctaaaccctagagctgtctagcagagccgtgagctgcccggaagtactccacaccctcccaggaggagaccaaggggcatgagtgagtgggggcrtccgggtgtggctgagatttgaactcagtgggcttgcatccctcttccatctccaagattctacgactccatgtcaggggagtggcggtgggaggaagagttgcaagatttgtaacaaaatcaggaaatactttgtggagtccaagacccccaggtcatccaggggtggtggtgtcacagactgggaccgcggctctgcttccatccgcagattgacgtcttcygtggccgagcacaagcgggcagttaggcccaagcgccgggttcaggcctccaaaaaccccctgaaaatgctggcggcaagagaagatctccttcaggaatacactgagcagagattaaacgttgccttcatggagtcaaagcggatgaaagtagaaaagagtgagtatttgaacccccaccctgcttctgtgtttgggaatggcttcttccgatgctctactcattgcttggttttctgccttgtgaaggccaataatggtgctcagaagaccctcatgaagtaaaaaggagtaagtttgcacatacatgtgcacgcacctagactttaaagatttttcatagaaattctcaaagtgtgtatcacctgttcagttagttaattcagattatactggggtttggttttttttttttttttttaaagactgggggtttcatcatattgcccaggctcatctcaaactctctggcctcaaacaatcctcccaccttgatctcccaaagtgctgggattacaggcacaagccaccgcacccggttacaaattaccctgttttgttgagtttttttctggaagttagaagagatggatatttctgagtatggtaattcagccattttcagctctgtagatcctgaacacacaatcattcttcatttaatcttattagtcgtttgatctcttatagtaaaagagttatttgatctcttatagtaaaacacttcaaatcactgkagtatctaatcctagatttttatattattaattaacacaaacgccagtgcttttcagatcgttcttggtaggaccctgagcttctcggagttgggatgtgggctggagggagcagggggagctggcaggggcgatgaatggaggcgaggagatgggctccagactctcagtctcactgtaggctgagccacactgctctcatctgcccagtaatgtggggttccatcattctgaaacagtgattttcttggtttgaggtgatagcatgcataatcttgatttttgggataatcttgctataattttcattttcccataacactcatagacctatttcctaatgtttttcttagaaatatagtatttagatgaagtggttgagtctttttgttataactggtttactatgaaagtatatttcagactgggcatggtggctcatgcctgtaatcccagcacttcaggaggcagaggcaggaggatcacttgagcccaggagtctgagaccagcctgggaaacatagcaagacttcatctctacaaaaaatgaaaaaattagccaggtgtggtggcactcacctggggtcccagctactcaggaggctgaggtgggaggatcactaaaccccgggaggtcaaggctgcagtgagccatgactgcaccactgcactccaggctgggcgacagagccacaccctttctcaacaacaacaacaaaaaaagtgtatttaaaaagcacaacaccataatgaattgacaagtggtattatatgtcttcaaacctaatcccagtgaaataaatttctgaatttctctctagcatatacatttttaaaacaataagttggagaaataaatgttggcacagattttacatatgtttcctctgcctccacttttgggggctcaggggttggattagtgatgactgaccggtctatagatgtttgctgttttgcagtgaaaacccatcttataactacagtcttaactctaagagcagaagatctcaagatatcatctggctgatcactttgccttcagataaagattagaacctaatcatcccttacagagtgtctacttttttgttttctttatgtataaaggcttttggtgaaagcggtctaacagtcatctggcatctatacatttggacatgtaaaagttgttaggatttagaacagctttcagtggaattgcaacaagtgcatccagctcctggttttgtactaaagtagctggtccacgtcatcactcagttcttgtccctctgcacagcatggagtgacacttgtcaacaagcagtttatattttcaatgctgtacttaattcttaacacagtggttaagcattgaattgcacatttaatcaaacttgagtatgttttccctctcgggattaacttgaaaagacaaaggtgttgagtcagttatgaataatttctgactgtaaatattgtcactgtaactgaacctcctgcgttgtgtttccttattcaacgtgcccagtgtcttccaactccaacttctcagaagtcaccctggcgggtttagccagtaaagaaaacttcagcaacgtcagcctgcggagcgtcaacctgacggaacagaactctaacaacagcgccgtgccctayaagaggctgatgctgttgcagattaaaggtatttcagagcagcctggcacggtgactcagggcccgtggtttctgtctggtcccatacggagtcctgactctgtaattcattgcctgtgccgggaaaggaacgcacactttttgagaacttattgtgtgttccttgctatgcaacctcctgtctctcaagcttccccaaatcccatgacataggaagtattctgcccaccagggcttccagaggcargaacgtgtctggagtcccagcagctactgggtggcagagctggatttgaacccaggtccccccactccagaatcccagcttttactcctggcgccccgtgccccacgaagcggtcacacatccatgcagttaccagaggtgccctacatcatcagaggggctctctgcccagttctccccgagtcagtacagaactggggaggaagacacagcttggagaaggaatcaagggaagttcgacgcagatgaagcccacctgcattccgctctagtgcccttcctgtccgtagcaagggagattccaaagatgaaccagggcgtctctgggccatgaggaggagactcggctgcctcctggtggccactgtatagatgaatccttgagatgagaatgaaggaaatatcctctccctccaggagggtttcccacatgtttctgtgtaaccactatcctattgtgtgtatttaaaaagactagtgacaagctcaaataaccaatctctgtcctgagtcctaacccagagactacatgatctgtttaattgtggaaagctcaaaatcamtaaataggagaaggtgttgaaagccacagaaggtggtggctccgtccttcctgttgagaggcccctagggttcatagtggaaactccccaggggaagagccgacccttcctgaaggcgtggcttcccttgcctgggccacagatgtaattgggtgcaggaggtggccaggggagagaaaggccccgggagaagagtgaaggagggaaaaggagcctgtgtgctcatctccctggaagggggagccttcattaacccacgcacatgacactgataatggtcctgagaagtgggtgacatttgggaaagcacaaaccaggaaagcagccactagtgccatcatcatgccctttctaaatccccctgctgccaccctgggccatgggcactcttattagcagacaagactctttagaagtgaaagcgtccgcagcagggatgcttccgatatggggtgcgtcctatccccgttctgtctggaaagacggtgactgtctgcctcgtgttcaggaagaagacatgtgcagaccaggctggtggaacctcgagcttcggcgctcaacagtggggactgcttcctcctgctctctccccactgctgcttcctgtgggtaggagagtttgcaaacgtcatagaaaaggcgaaggttggtacctgaaaaataaaaatgctttagctaacatctcctttacgcaccggaggagtgttcttcctgacgtcagtcacaaagcttctcaaaagccaggtgttgcattcaagtgagaagggataggtaggatttcttttcctgaatgtctctcaaacaagctttcattacatgtttaaatgggatactttaggactatgacctacaccccagtgtttaggtcctgggttccttcctactcctgtgtaaaaaaggaagcggccccactttaaagtcctttatcccaggtagctctgaagttctgccatagacctgttgaatgagactgtcatggggtaaagcccaaagaatagtgwtttttaaaagcatcacatgtgacctattgaagatggagaactattgctctaaagaattgatactccctggtctttcagttacattttcttgaggtcattgaaaatacccagtaaycagcatccacccacacccgtggtcacaaggctttccttgcaggcacactgtttctcctctctggttttgacatgtgccactctgtctagccaagggcttttctacccaggcaattgtgttcctctcttttttaggcctcagaacttgcaactttaattcagacaaagagggaacttggttgtagagctacttatatccaaaccattgaagaaggaattaatacacacactcatgcagccaaagacttctggaagcttctgggtggccaaaccagttaccaatgtaagacttcattgtacttcagagattgacgagacttgaatctcctttcttctcccttagctcattcttctattttacattgtaaataaaattttacaatgtgaaattcattcacattttacattgcagctactttgcaatgtaaaatgtgatgctctcctgttcttcttatccccaagctgctggagacccaaaagaagatgaackctatgaagcagccataatagaaactaactgcatttaccgtctcatggatgacaaacttgttcctgatgacgactactgggggaaaattccgaagtgctcccttctgcaacccaaagaggtacagtcygtgggctctgcccktcagtgagaaaccacattgaaagcactcagcacaggctgcccaatagattagagagtaagttcccaataaaggttagccagtgtcrgtatccattgtagaacatttacagctttttaaaggatatttgtgatttcaaaccattactggtatcttaaatgctaatatggaatccagaatatcatttagagttggcatggatcattgaaggcttttatatcttaggcaaaatacaaatattacttagccctatcttttgcattttgcataaacattataataaaatatttttaaatccttaagtttaaggaacactagatgcatgcatatataatttatggatttcccaattaatgtgctgtttttgtcctgtcacagcagtaaatatttattaattacatacatttccagtatyattaagcatgctaagtgttgagaaagtggaagacacgcaggcccttaagtttaattgggtggaagagtattagaaggaatgtaatctggagcaaggttgactgtgtgacatgtatgggcatttacatgagggaaamgtcacagaaaaagaaaccttcaggaataattttacatagaaagtgaaattgagcctagtttagagttaagcaaaatttgaattgctggaagtgaagggagaactcattctaggagaaagaataaaatgaaccatgaacataagaaatagcattacattcatgtattcattcagcaaacacttagtaatcaacccctcctgtatgtatcaccatgatctgatccctgcccttaaggatcttggaattgtgtactggagagaagacaccaytggaccatgagtgcctgsggtatatgaagtggcctctgtgtatatattaagtgaatgaatgagcacatgagagggggaggaataggggagagaggcaggaagtcgacaggaagatgtacctaaagaactcttgtgaatcgcaagttgtaagcaggttgagagttcagaggagggaacattatcctggccacttaggacactgggaggaggaatcrtgcccgcagggcagaggctggctcggtggggcagtgccagctgagatctcctggcctttttgtgtctgtgttggtcgccccgttaggatttctgtcttcctccgtttgactcactgtcaacaagagaccctgttgcacctgattcaactgttgcatrttcttgaagttaacaaattcttttgtgccatttctcccaggtactggtgtttgattttggtagtgaagtttacgtatggcatgggaaagaagtcacattagcacaacgaaaaatagmatttcagctggcaaagcacttatggaatggaacctttgactatgagaactgtgacatcaatcccctggatcctggagaatgcaatccgcttatccccaggtactcctgccgccgcccggggacagctcttcaagcgagctgattcccttcgatccctctgttctcaccacagtcctctactctcgctctttatagggttcagttttcataaacgattatatgcagtggactgtgaatattcacaaaaggaacagttctttaacttttatctaactattgcagaaatatggatgtcgtagtcttctggaagaggtttgttatagttgatttcttgaagtgagcaagaaatgctgcaagttcctccctgcggcattmcaagtgctgctgtggcagatgaacagcaattgtttaaacaaattacatgyggatctgaaaggcttccccrggtctggaattcagccattgatctgaaagtgcaaaagcaacatgcctccctctaatttcataccttcccagcatcgccctcgaatttcaggatttatttggcagcagatgatgtttatgtctttatatcttttgggaagggaagagggggaggagatggtgttaaaataatgattgcaattgtaatattccctgcatgtactrgactctttawagtcattttggcaattcaatagaatatgtgcaaagtcagaaattatgatgttggaaaaaataattcctacgtgcaaaggattgttgttttttcaactatcagaccaaaaaaaaactagtgctttttaactatgggtgcygttataatagattagaaaccagtgaaccaccaaacagcatagaatattgggcatctcccaatacattttaatgttttccattgaattggtctatgaatttcaactttcctgcctagtttcctgcttaaaatccaattattgattttcttattaattaatcattatagaaaccattaaaaattatggcagtgtgataagttttaaagtccttgttaagcaaatgcactaatgtttaacctcagtatggtaacaaccattattttaaggactggaactacagctcagaagattttatttggtatagcaaaggaaaaaagaacaagctaaagcataaaatctatgtgatagccaactgtatttaatagtggcataatcacagatctgaaagtggatgactgagctcctaacccactggttttcaacatctctgagacagaatcacctgaggggccttttaaaaaatgcatttgctcagcccagccccagagatgtgttttcgtttcatgtgagttagagcttatgtgtcaatatgtcttaaaagctcctagggattttaagatgcagccaggattacatacccagaccttcttagcaaatgaggctgaaaccactgagcccagttccagctgtaagtcagggaagggggtagagaaacccctggctcctggcccaggtttgtccccctcaccctgcaatctgccacatcgcttgctcacaacgcttcaaaacataaatgccagattccaaagcagaaaccaagagccctttcaatcatcatcttagcaagcctgcagagtaggactgacataacaaacagtcattcagatattttctgataaagaccacagcctttcaagaccgccgtgcattttccataggtgcttatgtttggttcctaaagtcccataagagcatgaggtagaagtgtctgtgctctatgatttatcyggcagctttctttgaatcaggcagcctttytgatgtgcctcagctgtgacatcagcagctgtggtcttgaccaagcaggaagtgactgaggcagtagcacagcagggcacgagcagcaaggggggttgctctaaggggtggctgcatyccgggccggattcacaaccgaagatggatctggagggatgagagatcgtgcatgttattccagggctacgccctctgcagcacgtgtatcttctcagctctrcctttatctaaaatacctgtgttcttggggacagtgtaaattttgaaatcctaaggccacacaagacctccgggtggagctatgccgttttckttcctatctctctgtgctctcctgtctgctgccctggccagtggcctagaaataagtgcacaaaaaggcacttcaagatctatgaaagtgtgttcattttagtgacgggagaatctccatactctggagagctttgttgtaacatgacataaaatagtagagaattgaggagggagctacctcttccctatgtctattaattaattggacgggaaacttggtaagcatctgcaggtgactgggcggctaaagtagacaaggttttcctgcggctcctgccttttccaaaatccccacccagcgtgccaccccagggtatcccaaagacaagaatttgctagaatgtggcccacacctgtagtcccagcactttgggagactgagaaggaaggatcacttaaggccaggagttcaagaccagcctgagcaacatagcragacccctgtctcatatttaaaaaaatacaaaaattagctacgcatggtggcacacacctgcagttccagctatctgcaaggctgaggcaggaggatcactgcagcccaggagttcaaggctgcagggagctatgattgtgcaactgcacttcagcctaggcaacagaacaagaccttatctctaaaaaaaaaaaaaaaaaaaaaaaagaaaagaaaagaacttgctagaatgtaagaaaagtctagtcctgacatggttcatgtcacattcaggcacatcaaaaactccatggacacaaagctttgcaagacttcagactaaaataacaaaatgtcattatttggtaaaatgcaggaaaataaaccatttaytttatatgtactcacgtactttgaggttttttccagcagccgcatgtgttttagattcctttgtttaagcttggcttcatcttggttcttttcctgtctgttctcccaacccccctcccaccctacagaaaaggacaggggcggcccgactgggcgatatttgggagacttactgaacacaatgagacgattttgttcaaagagaagtttctggattggacrgaactgaagagatcgaatgagaagaaccccggggaacttgcccagcacaaggtattccggcgaccaagcctcaaaactcggggcttggttcgggtcccaataaaagtggccttcatgtaaaatgatcaaatcaggatagttcgtatggctgtcaccccagatgtatcatttctttgtggtgagaacattcaaatcttctcctctagctattttgaaatatgcaatacagtattggaaaacagtcaccccactgtgcaggagaaaaccagagctcattcctcctctctgtcactttgtaccggttggccaacatctccctatcttccctgtcccgtctccttcccacacccccttccccataaaacagatgcatgtatcaacacatcgaatcatacccataataatgtgtcaactaaaatacttttttaattaaaaaaaaaaccatggacacacagacacacaaacaaacacacacacacacacacacacacacacacacacacccttaaagctaggaagccttcccaggattcactagtagaacagcagacaggcctccaattctaatctgactctgggaagtgaagagtctgatttgtgcctgttctcaggcacccatgtgctgttgtggcgatgggtgttcagacctcccagagtctttctggaaatgcagcctttccctgactgcagttaaacatcctgagacagagtgtggaagctgtatttttatgctgtcccatgaacagctgaagcagcattgagcatgacaaggaatagctgcagaaacaggcaactgaactgatgtctttgtgttcccctgtaggaagaccccaggactgatgtcaaggcatacgatgtgacacggatggtgtccatgccccagacgacagcaggcaccatcctggacggagtgaacgtyggccgtggctatggcctggtggaaggacacgacaggaggcagtttgagatcaccagcrtttccgtggatgtctggcacatcctggaattcgactatagcaggctccccaaacaaagcatcgggcagttccatgagggggatgcctatgtggtcaagtggaagttcatggtgagcacggcaggttagtragcgcttgtggttttttccagctgaaagaggctggcccggcagccctgcgggagccagcttctccaatgaaccctgtcatgccctctgctgcgtscgtgcagtggggcactgcagtcatrcgcctttgagagccasytagtaaacyacagagatgaaaagaagtaaggccraattcctaacaacctagcattgccgaggccgctggtgttcacctgtagaaattgaacttgcacatcaaggcttctcagctccctctctccctcccctgcccctgtccccagagcttttctgggaaagagatgattggcctctaaatgrtatttcccatgtggctgtgtgctgcttcaattaaagtcgttaagtasagcatatcttcgtgatttaaagctggaaccaaatggtgctgtaacattatagtaaatacacgcacagaagattgatttgaaaagtgaaagaggctgtttctcccgagactgagagcacgggtggtgctttgtgggtctggtgtagtaaatgcagagtctaaactctcctcggttcctgatggtgacggaccccattgcaaaacactcacctggatgcttggtgctggggaaagggggagtccggtgaactctggagaaatcatccctttcattgccaaggaggagccttttccacagcgctgctcaccccttcccatttaggagagcatgcaggtcacaggtttgtgatttcaactcagaagagagtatttttgcctctttacagcccccttgctgtgcaggtgcacctgcccccggggccacaggaagcacaggcagctgtttgctgatcagaaaactgcaggctcagaaccaggatttctttcctgatttatacaagatgcatctattcatcagctgacaacatttcctgagcacctactctacggaagacactttgtagggaccaagtaaatatttcagaccctgtctcagtgacataaagcaggtgcaggaacagccagcaggtgggcctcgctgagcacacggccagtggggctgtgtgctgtgcagagccgggctgtggcccagaggtccccctgccccctcagggcacgatgctgggggctttactctgcctgtagctgagggcctactgggctccctgagacatttctgttgtggtgctaatttttcagataaggaccaagacagtaagatcaaggaacctgcctgaagccacacagctagcagggagtggagctggacactcaagtccagacctgcctcttttcaaacccaactgtgctattaaaccgctctgcgggcagagagtcagagtggggctccagcacaggatgtgggcagctgtgagtctggctacaaggaggggctgaagatcccagtcaccagaccttggagcaggtcagcattgaaccagcagcaaggcgacttgaggttgggccgctgaacacaccaaacttcaggggcttcttaaacagcaggaaggggatcttccagggcccaggcagctccagcctctccttccagggagtagtgggatgtcagacaaggacccccaatgggagggacatttctttctctctttttgttctttttttttttttttttttttttttgagacagggtttcactctgtcttccaagctggagtgcaatggcagaatctcggctcactgcagccttgacctcccaggctcaagccatcctcgtgcctcmgcctcccaagtagctgggactacaggcatatgccaccattatcaagctaattttttctttttttttttaagagatgaggtctcactatgttgcccaggctggtctcaaactcctgggctcaaaccatcctcccacttcagcctcccaaagggagcagcattcctcatctacttaatttcttatgagcaagcaattggaactgctcctttcctttttcataaggagctgtgtcccttgagggaaggccacaggtgctgggaccctacagcctgggattcagaatctcaggccctcacttaccagctgtgtgggctgggtaaagttactctgtctgagccttggttttctcacctggaaaatagggattatagtactcagctcacaggactttataatcaggtatatatgacgtttagcaggtgcctggcctgtgttcacattgtaggtgcaggaaatactcatcactgacattgtcagcaggaacagcgtaattactgtttttaacttgaagayaagataatgtggatctccccaaaacaataacaataacaattaataacaaagagtcactgtcgtggacttacgcttttgcttttgtgcagaggtggcatgtacagtgttaatctctgatgctggttgccaaagacaataataatagggaattgagtgtgtttcggggcaggcagatctcttaacctttggagtaatggaactgggaactttaaagaacaaactaaaggcacttgtagtgcccgttcctaaaatgcaaaaagggaaatcgtgttttataaaaccagacatagtttaatttagccattttcttactttagctgttagttatgagaaaaaaaagtaattgtgagtgaatgaatgagtaaaactgttaaagtgaattaattaaaaataaagcgaagagttcagactttcatggactattgacttggaggcccttaggaaatatgatttgagccgggtgattcctttctatatttcttcccaatgaacacaatggacatctcacagccagctccaacaacatcttttccagcagacttacaacttagaaaaagcccagctttagagaattaagttaaagcagggagcattcagattccagaccatccctccagcaggggggaagcacagcccgatggcacttgcagtcactccgtaaccaacgcggaagctctggccccttggtgacactagtccggctcccctatcacttgtgcgcacaagggccacacctgcaaacaggactgagtcagagctcagggtgcacttctgggagagggtcagcaaaagcagcagctgcacaggtggtacagcctccgcttggccaatgctggccggcctgctagggtcaatgtcctggcccagtgcctgcagggtagggttgctcactccccagcagggtcgcgacagctgctcaaggtgcccagggatctgagccaggctcctccagggcctgatagatgtctagttcctataaataggtggctctggtgcaagaatgcttgaccatgaacagtctttatatttgtgttttctgttattcctaaatagaactactagtaccaaacattcttgaaagtgccttggtggcgtaacatgtccacactttaaattaggtaactaatcaaggttgtaaagagaatagctggctgggcacggtggctcatgcctgtaatcccagcacttcaggaggccaaggcaggcaaatcacgaggtcaggagttcgagacyatcctggccaacatggtgaaaccccctgtctctactaaaatacaaaaagttagctgggcatagtggcgggcacctataatcccagctactcgggaggctgaggcaggagaatcgcttgaacccgggaggcggaggtggcactgagccaagatcatgtcactgcactccagcccgggcaacagggtgagaccctgtctcaaaaaaaagaatagcccagaagttcttactactaaaaatttaatctttayattgccaaaattaaaaatgaatacacataygaaaaattaagtttcatgtaggactaaatttgggtatgtgcagaaaaactgtaaagaaaactagtgaaatgtttgcttcataaaatatctttaaagaaataaaattctagactcacacttgtaaccccagagttttgggaagctgaggtgggaaaatcacttaaggccacatgtttcagactaacctgggcaacatagtgagagaccttgtttatacaaaaaaataaaaaatgagcccagcatggtggcatgcacctgtaatcccagcactttgggaggccaaggcaggaggatcacttgagcccaggtgcagtgagctatggtcataccactgcactccaacctgggcaacagagcaagaccctgtctctaaaataaaagtaatttaaaaaagagacacaattctattttgtgtatatacaytcaagtctgtttgcaatgttaggatgtgatgttggttatttaagtgtgaatatgtatttacacaatgtatttgagtgctaacagatttcaagatctttataaactgttatgatctatttgaaacatatctttcctcaataatctatttagtgcaacaaatgttcactatttgaagaatgggattgctattcaaaggcaaagttttgttgctaagttagcagaaatttcaattaagtggcttccaaattaattgtgggatttataatctagtcattgatggttcctattttattttgccctctcaaaaacacccaaacttaaccagttgagatccacagtggatggtacaaaagactgtgcttagtcaaaatactgtaagaaattattagaatcatttacgaaacctatgttacagatactttaccaaacaaagggctaaaaatcaaataaatatgaccccctaccttttaagaacttaaatgagttttattcttcccttcaaacctcaatacagttgcaatgttggaaatgggattggagctgggaaaactgcagtgatataaaaccagagactccagttattctcattccttttaaacctgtgtgggtgttcccaccaactgctgcagyctcccgtgttgaccctcactccctgggacaccygggcctttgggtcaagtgcttggtctactggcctcactcagcctagaagcttctgcttccagattagcrtcattcaggtctacactccccacctcctcagaaaggccctccctcagcaggtgtcccacgagccctgaccctgcctggcgtcaccttcttgtctcttgtcctcatagcacttatcactatctgaaattgtcttgctcgtctctttgtttattagaacaaaagcaccmagcatcgagttcatcattgtcttgttcaccattgtagcccagaatcctgaagtccccgctcattgaatatttgttgaatgcatgaacgaatgaagggaatctagagtgagacatattcttacaggtagagatttggatgtctgtagtaacatctaaaatgcccatttggcctataattccagcacttttggaggctgaggtgggaggatcacttgaggccaggagttagagactagsctgggtaacatagtgagaccctatctctacaaaattttaaaaataaaaattagccagacatggtgacgcatgcctgtagtcccagctatttgggaggctgaggcaggaggatcatttgagcccaggaggctaaggctgcagtaagccatgattgcaccattgcactccagcctgggtgacagagggagaccctgtaacctccctgtgactgctctccacaccaagcagtctcatctgcctcctgtgctgctcatgtttaccgagtgcctgtgcagtkccagccatggggaccatcagcacttaatcctggcagcagccctggtgacagacatgaaatccagattagtttatgctcaagtgatatgtcagcaacctatctcctcctttctgacagaacttgaaaacttcaaagttgtattttttactagaatagttttaacagcctgcattttttcctttgtgcttaaagctggccctgctattgtttttaacattttttctctaccagctawtcttttgccaaagagtggtgtaatatggaaaatgagtttgtgtctgtgtgagcccttagtcctgctctggcggtcaccaaatactttatttatttatttatttatttatttatttatttatttatttgtaagagagtctcactctgtcacccaggctggagtgcagtgacacaatcatggctaactgcggtctcaaactcctgggctcaagtgatcctcctgcctcagtctcccaagtagctgggactacaggtgtgcaacaccacaccaggctaatttctttaaattattttagaggtggggtcttgctatgttgcccaggctggtcttgaaatcctgacctcaaacagtcctcccagagtgttgggattacaggcatgagccattcacctggcctcaccaaatattttgaagaaattactctgttgcacacttggagtgatctgccaccccctccagatgacagatctttttctcagggcaccaagagggcccctcagatcccttttctccctgtgggaagttctgggtcaggagctggaaggaaggtggtttttctcttctcctgggygtgaccagccttccctccaggtgccaacggtttctcccctgccctaggtccgaggctctttgccactggtccttgcaggcccvgggaaagtgagccagacatttgcttctcctcgggtgtctcagctgctgacctgtccctctgccattctgtgtttgcagtgggaagtcgccagaagggagagcactcggtgagggcagccggcaaagagaagtgcgtctacttcttctggcaaggccggcactccaccgtgagtgagaagggcacgtcggcgctgatgacggtggagctggacgaggaaaggggggcccaggtgagtcctggggagctctgcaccccggggactgagaggagcatcctctcctgggagccgatggcactcggcctggtccctcccaacatgattctgataatggaagaccaygtcacccaaagcacttcagtcctggtctggcttctgcaggtctcaggcyrtgcctcccatttctttcctcctcccactttttgtaagatgatcctggagaaaatgttgtatctgcaaataggaaatccacatgacaagtgcagatggccaatgggtggctttgaaaggtttccacctaaccaakcaaggcactgtaagtaaaacaaagagatgccatcatccacttctcacagtggtagtgattttttaaagaatggatccagggccagctggcaaggcctcggtaggatgaggatgctatgttttgggtgagaagtgtaacttgaacagccatcctgaaattttgtcacgagaaccttaaaactttgatcacttgttccatgtacacgaatctacmtgaaggaagtatcaggtgaatgtaaggattgggaacgcccatcacctgtattcgtggcagcctgagtggttttctggaacaggtcagattgggtcactcccttactgtctgccacacacactgcagtctaagcggcttcccagggctccagcaccttcgtgatgggccctgggcacctctccaagctccccctgctcctcccctccacccaggccactccagcctctccctgttccacggmcacctccttccactcacctcctgccctgtgacccattccactgtctggaaacttcccctgcctactccatactgcctctacgtatgtacccctgtgtacagcctcttatgaggcaggtttctgttgaaatgttacccgcaccactgccccccgcacccattctatccagagccttctcattctcccatccttctcagtccctgcactttatccctttattttcacagcacttcccaccacctaaagctacatgatcccccaggagcatgacagagaccctgagaccctggccttacaaccccatggccttatcatcccagggcctgcatcgtgcctgggagggactgctgccmagatycraggccacctaaagctactggcctcacaaccccatggccttataaccccagggcctgcatcatgcttggcagggactgctgcccagatccaaggcttgcaaacctgtctctttaacattcagatgagctctgcctgagtctcctctgctctgtagagtaccagcaattaagagttaacttgctgagtagcagcaattaagaattaactctgggattctttgaaaacaggacaatgccatgtgcaaatctctttattctcctggatgaatgattaacgatagcaggagggaagacagcagagacattcttgccagaaatagatccacactcacccagccttccacrgttccaagaaccaatcacrtttcctaaaacaatattttctactatggactatattttagaaatggtactggcaagagttgcattttaatttattcctaatagccatttcaactacccctttatttttttgtaaaggccatgaatgaatatgcttttatcatgccttcaaaatcatcctcagagttttgagtcttaatctctctcatttgagcattttacctgttaccaatccagtggatggaaaatcattttatttttatttgtatcatttttttgagacaggggtctcactctgtcacccaggctggagtgcagtggcacyatcaccactcactgcagccttgacctcccaggctcaatcagtcctccttcctcagcctcctgggtagctgggacttcaggcatgcaccactacaggcatgagccatggtccagctctggaaaatcattttagatatgaaatactgccacaaaatggcaattggttatgcaaaatgggcacagagattgataactcacagtgagaaatgctttctctcagtgctccctgactaccagctccaggaaacatttcctctttaaggaaaggtgtcctagagggaggtgactcaaacctaacattattcgtggtgcagataacacctgaaggaagagccttctctaacaggccaggaagaggctgagtggactgctggggtggccacaaaccatatattttccctagaattattaccaagtcagtgatgagtcattctcattgctgagagctatcttgttaagaatgtatttatatcagtcttgtgacatcaataaccacagaataccattaaaatatcaggagttatgttttaaaagaatattccttgacagaacaacattaagtaaagaaaatgaggctgtacatcaatataaagcaaggctcctattttgtttaggaaaagaagaccctccctgagtaacaccctgagaggaggctgcacacggcagcgttcgcagagcttctctttaggtggtagtgttagcaatggcttttgtttgtacgtcttggtatttttcagattttctgcaagaggcatgtattgtttttaggactttgaaagccccrcgccccttacctatttacctctgtttaaatcggaaggtccaggttctccagggaaaggagcccccctgtttcctgcagtgtttccagggggggatggtggtgcactcggggaggcgggaagaggaagaagaaaatgtgcaaagtaagtcacttttactgctggaattcgactttgcctttccctctcttggaaagaatttttataagctgggggctgaaagtgagtctgtcttcatctagctgtggctcgacctctgaaagcctcctgatgtttgcctgataactcagctctatgggtgctcatgacccgcctctccctggagaatttactcggggattcacctttgcacgcaggaggctggaaggtggtctcccctcctctgtctgctgtttttaggaagaaagaaaaatcagtggctcttctatkataaattatgaaattttgtgttgaccagcaccccaccccccaaaaaaatcttagctctagagccttttaaaatatgcctgttatagaacttgttgtataaatcttgggaaaatggcttttctacattgtggacttcagatcacctgcttctaactatgtaagaacccactttttaggctggcaggaaggyctgatgcctcagtgctccacagggctccctgtgcagtgcctcagcccctccagtcccctaagtccctggccctggacggaggtggctgccttggacgacacagcggacactaggaagggccgcgtttgctgccactcgctcacgtgctaactcctccrcgccgcyggtgccccctgcaggtgagtggcggctgtactgcgtgcgtggagaggtgcccgtggaagggaatttgctggaagtggcctgtcactgtagcagcctgaggtccagaacttccatggtggtgcttaacgtcaacaaggccctcatctacctgtggcacggatgcaaagcccaggcccacacgaaggaggtcggaaggaccgcygcgaacaagatcaaggaacagtgagtgttgtgtctgcggcgagtccccccacacaccgggcttcccagagggacggggcaggctcaggggtaccaagactcccagcagatcccagggtgctgaaagtgactgcagcaaaggatggctgggaacgtggtcaggggcctctgacattccgagcagagaggacacacatctcagtccagacctccgacttgggggccgctctgaggatttatctggctgggtgagaggctggtgaggagccagggagtgactcttggaagcactctgggttctttcttcatagttgccgttcagcttttggatgagaagcctgggggcctttgatatttaaagggagcacatttcaaatttgtggagttttcgtttgccagaacagcasagtgttaaaaagctaaagaagagtgtgggaaacygccatctgtgtcagacgataagatatcccccattctggagagcagcccccgatggagagggatcggactctccgggcacttcccgggtacagcacttccgggttgggttttgttcccctcccaggcaggcacctgccgttggccacttgcaaagactcagcacactgtgagatagcactgagtggggaccttggggaagaggggaaccggaagggcagtgaaggccacagcccagggaggacgctgtggtggccggcccccccggtaaggtggtctgcctctgtggctctgcacttcctagcagcccaggcaaaataagcattgcaagctgccagagaagcccagtgtcgcccaggcattcaggaggcaactgagacctgtgaggacctcagtgaggaaaagtgaagagcttcctagggtcacatgtccccagagtttkatttggtgaaccccattctctgggttctggaacagagcagtggccagggcccctgtgtccactctgaaaacacactacccagagagggcagagaggagaacggggcaggtgacctctctacagggaggcagatgtgaaacaagatgtttcatctcaaaacaccacctgtgggctagggcayggggaggggtgagaaatcacatgccctgaggtggcccaaggcatttgaggcccatcagagggtttacttggaccactgaggaaaagaaaaacaatgaagagctcattcacatattcactcaacaaacatttattgagtacctgattggcgccaagcaatctggaattacaggacttatcctataaatctcggaaaaaatggtttttctgcatcatgaactttgggcaacctgcttctaactccaaaggactggagttaggaactggggacttggtggtgaataagcccaagtctctgtcctcatgaagttcatgttctagcaggagagaaagacaagaaatagtcratatgtattgttctgtataaaaatgtgtgtaattttcatgacacattagatgtgattaaacatccctccctaggagcaagtcaacttcccctcctccaccacacacacttagagactgcagagcatttttccattcatgagtaagaattgcttttccttagaaagtagaagagacggtgaactgatctccagatttagttttgaataatttatggctgtaccccatatatatatgtacatgtatatatatatgtatatatatatacacctactattagtatatacccacaaattttaaatttaaaaaaagcagacaataacaagtatyggcaaggatgtgaaaattggaacccttacacattacttggaaaacagtctagcaatttctcaaaagatttaacaatacagttaccatatgactagcaactctactagatatctacccaagagaaatgaaaacacttgtacatgaaggttcatagccatattagtcatagtggccaaaagatggaaataacccaaatatctaccaacatattaatggatgaaaaaaattagtggaatattattctgccataaaaaagaattcagtattgatacatgctacaacatggatgcaccttaaaaacattacactaagtttaaaaactcagtcacaaaggaacatatattatataattccatctgtatgaaatgtccaaaacaggcaagtccataaatacaggagtagattagtggattctgaggactaaggatgggggaaatgcggagtgactgctaacrggtacagggcttcttcttccgggagatgaaaatgttctgaaattagtgatgacagttgcacaactctgtgaataaactgaaatctgtacacataaaaagagtgaattttatgacatgtgaattatatctcaataaagctattataaagctgttatcataatagtaataataattttgggtcaccagcactctccagacttataaagaactcttggagtttctcccttgcagatgtcccctggaagcaggactgcatagtagcagcaaagtcacaatacacgagtgtgatgaaggctccgagccactcggattctgggatgccttaggaaggagagacaggaaagcctacgattgcatgcttcaaggtaatgtggcatccacagtctgcgatctggtttttttgtttgtttttggaaacaagagtcttgctctgttatccaggctggagtatagtggtatgatcacagctcactgcagcttcaacctcctgggctcaagtgatcagcctgcctcagcctctcaaagtgcaggcttgagccactgtgccccattcatgttttatcttaattcttcagtstgtcttaaatctagtgtgatgagtattatgtccagctgattgaayagtttttttcttcccaggggtgagtttaacttggacaccaggacttcaaattctcactggcaaatcagctcccaaggcctcccggggaccaagccaccttccagggtcttagggactcagggcaccattttctttctttcctcatagctgccacctgagaaatagcagtcctctgggtgttggagtgcgatctggggaaggaagccggcctcttatcccctttccagagcccttcagtcattaacctatttggaaatacaaagatcgtgtctgtatagaacaggcactcccgttcaccagagtgaggttaggtgtgtatatgtgtactttcccagctgttctaaaaatacagatgaacattagaaggaaagcgaacttttgttaagcagttccagtaagccagacaccagccagcaccttacatatagtaactccgttagtacaacccaacactctgccatttttacagatraggaaactgaggcatacagaagttaatcaacttgcccaaggctgggcagcaatggagtatcctcataactgctccataatactctgcccctcaatgtttataaacttttatatagctttttaaacataatgcctagaaaacgtttgaaattatggagaagttaaaaaaagaaatgaagtcacttataaccacatttctcagaacagaattcacatttctctrtgctatatataatatctattttaaaaaataatatgtggatctactgttttgtaaccttttttcctttataatgaataatttcccaagttattaaaatttagatttctaatggctgtgagatattctgttatactgtgaatatatgccactctctacctgacagtctctgacagctggggagttgagttgtttcttatttctgatttttctcccttatacaataatgcagtttgaatactttttaaaataatcctatacattcattcctaattgagaggaattcctagatgtggaaccgctgtgcttgtcataaaatctgatagcatgtatcagctcgggccaagtttcattctcacctgcaatacacagaagcgttcatttctcagcacaatcataaattcagcatattattttttcctctttgccaaattgatgaaaggagacagatagctaagcattgttttgttttacttagaagtacatatagatgtatatttatatacatgtataatgtatataaaatmcaatatatgtatatttatgttatataacatatatgcatatttatgttacatatgtgtatgtgatatacacatacatatatctgtgtatagatatgcatatatacacagtatctatatatattttttagccattttaatttctactttggtgagtgttctatttgtgtcttttgcacattttattgatatttattttttccttatgtatgtcccttcatgtattaaggatattaactagttgctgtattacaaatatttcccatttgttacttggtttttcttttctttttaattttgcattgtttttcatttttatataattaatgcattattttcccttttgattggttcttttactattgcacttgaaaaggctttctccaccttgaagctcagataaatcctacctgtgtttccacagtgctttgaattatttcatattttacattcattcttcatctggaatttactttgatgcacatgatatcttcarctttgttctcttttctttcaaagatcctggaagttttaacttcgcgccccgcctgttcrtcctcagcagctcctctggggattttgcagccacrgagtttgtgtaccctgcccgagccccctctgtggtcagttccatgcccttcctgcaggaagatctgtwcagcgcgccccagccaggtaaggcctgcagggggcagctatgctgagcagtagaaggcacatcttccagaaagccttttgattttacgttggtatttattaagcagcttctgtttgccaagtacattcccagagcacccagaacatgtgcttacactcttttcatcctcacccctacaccaaaaggaaggagagtgaaatcagccacactttatagcataaggaacgagactcaagtcacttaacccacccaaagacgtcagctaagaacaggttgagcaccacagcggcaggcctggcgtctccgctcttttcccagccttcctctcagtcttgttgctgcatggtcacccgtcgactgccattgctccagccattatgtttgcattcaagatagaaagagaaagaagggggaaggaaaaaagcccacctaatagccactctctctctttaatcagataaagcacgtgttttcccagaagcccccagcagacttctgcttacatcccattggccggagcctgtcacatggccagccccagctgcaagggagcctggggaagcaaatggcagaggagaaggatgttggggtattggctaagttagccagggaacagggtctgccataccaagtctccacagcagagccaagactccagcccaggtcttctgatcccaaggtcagggctctgtgccctcattctggttgggaaagtaacaagagactgggcttgacaacccctcccacccaccctccaatgaagccaaggtcagctgcctctcagtttgtgtttgttgcttctcacattacaagagcctggagctgcagccagggacctcatcttgcacygggatctcagggcagcactgaaagtttgcccagtgcacatgtcatgcttggaaaatcagccaccagtaagagagggtgtgcccacgcccttcatcctggggctcagggcgggttatcaacctccactgggcttttaaagtgtggttttcacagaatcctgaaatgcatgtcaggaaaggacttacagtgagccgactagcaagagtgagaggcattttgccacctggagtaagagtcagactgacaatttgaggaggagaaaaaggtaggaggaaaaggcagtagaacagttttgatttttatttccttttattttattttttagagacagggtcttactctgtcatccaggctggagtgcagtggcgcagtcatggctcactgcagcctctaactcttgggctcaagcgatcctctctccttagcttcctgagtagtggagactacatgcatgcagcaccatgcctcgctaattttttttttctttttgtagagatagggtctcatcatgtggcccaggctrgtcttcaacctccgggctcaagcagtccttcctcctcagcctcccaaagcactgggattacaggcatgagccaccactcccggtggcagttttgctttttaaggcccatttctctgtaagagagccatgagctcacctcactgctaagcaatcgcgtgcagggcaggaacgccactgacctgtctgcagtgagatgtgcgctccagtgttgattgtgctctttggagatatgcggtgctaacagccccttgagtggcacatgcattatcccttccactcttagcacagccctgccagtatccagaagggccagggccttgagctggggcaaagggaggaggacctggaggacgaggaatgaaaaagaccaactccttgacaccacttctctctgcctacaggcttctccccgttgaactgtcaaagggctggggtatcctgggtttctctgtttgcccctttgcccctggtttgatggccaagggggtttccccctgtgacactgcagtcaagagggacaacatccactaggttgggggaggagtgagctagaagtgtccgtgaaggagctcctgatggtctggccctgtccctgccctcacagcacttttccttgttgacaatcaccacgaggtgtacctctggcaaggctggtggcccatcgagaacaagatcactggttccgcccgcatccgctgggcctccgaccggaagagtgcgatggagactgtgctccagtactgcaaaggtgaggctccctctaacatgcctgcagcacggaacagatggggaagcccctcaggcatgcgcagccaggagacccccttccccttctgtgcatgtcagccagcatccatccataaagcctggcaggtggtgatgaaaccaattttttcccctttaactttttgagatgtattaagttttagattagcgcattctcagctgccagcatgamgaagaactagtttttctctctgatattatgaggctaacttgttaccctcaaggataaaggctgtattgtggaatgccccaggcagattaaaacccygctgtactcggggttgatcatgctgagagacaagttggcctctgccctgtacattatctgcaagcactaccacgctgttggagaatggaggtctcccccaaacagtgaacggccattgccaacctttttattattcattattatttttagtattatatccaaagagaaatacccatagtaagttcatggttctttactatacacatgaaatttctagtcttttatataaaatgaaaatgccagtaattaawcttatttaatttttatggtttcattgacacaactagtttaatgtcactgagtatgtgcaatggattctcttcctgaaaaactctttagcaataaataacatatgaaaccttccactcaatgttatagtgaatgtggatgtataagatgctgtcgttcgccgtcagtcattatgggagttaatcctgtgctaggaaatgagacggatgactctacaggtgaattcaggaggaagaaaatgctccacccagaagctgcagacagagcmtctctctcccttccaggaatacacagcgttttgttaggttcaagaagtatagactcaggttgattataggtcactatggtagtcacaggcatgaaactmacatcttatataaacattatccatgtrttgttatgaactactggtaacttgcattttaagcatgaagtcatgagttctggcaaagaagaaaagatttcaagggaaatcagagaaagacagggtctccctggggtctactgacattgcaatctgtgtaactacaggaaaaaatctcaagaaaccagcccccaagtcttaccttatccacgctggtctggagcccctgacattcaccaatatgtttcccagctgggagcacagagaggacatcgctgagatcacagagatggtgagcacgctttcctgccctatgaaggtggctcctgcgccttttggattgtgggttaactttactttggggagagcatccaattgcactttcagagtgggaaaatatttttcsttttgyaacatcttaacaaacctacatagaatttgcttaggaagaagagaagtctaatggaaaatcaattaactattttagtaattttctacacgatacccaaattttaaaaacttaaaagcaaaggtgagttgaatcatgytgaggactatatatgtacataaaagctgcgaactcttcattctgtttgctaagaamctgttgcttggcattgcttgtctctcartgtccatgtgacgcacaaccaaaccctcatgtttcagatgttaaccttgtgtagaggagacacaaacgaaatctgatgaattagtatgttcagaaaactgaatgaatggaggtgctgcgactcccttatgataagggatcactcaacatctcattaatattgtcttttatgagaccacctggtatttctgcatgaggcatttatcataacttctatccaccaaaatatattataatctagaatgttttcttttccaaccacacaggaaagaattttattatagctatgttgaatttcttatatatgagctattaacattgctaggaatagcaaatccaaggatttgttttgatttggtgagagataggttttttaccattttgatttttttttaccatgtgagagctgctttgcttggggaaacgacccaagtgtattttataggaaattcgagtaattttaaacaaacagaatctacttctgcttagcaatggagagggcctgttgggtagtacagacatcactgctcaccctaacctgtctccctggagccaaatggacttgatgtacacagggaaggggctgacttcagcttggtgtctgccgcagccggaacgagatgtttctgttcactgcaactgtggtttcgtgaaaccagaaggctctagggattacragctctatggctgctgcatgcagtctaagttcaggagttaccaaattgccaggggttcagtccagggcttattgctcactacacagaagaaagccaatcactgagacaagcatagccaaggaagaaagtttatttgggtgctacagccaaggggaacaggacataagtctcaaatctgtgtctctggcctactaaaattagggatttttatagcagggaagaaatgtaaccatgtgtgggaaacaggaattagggaggggtgaggaagaggagctggtcaacaggaagcggggggttggttaggcatcatggtgggtaaggggtctggtaagcttcaggttttgtttttgttttttgagacagggtcttgctctgttgcccaggctggagtgcagtggtgtaatcacagctcactgcagcctccagctccaggctcagacaatcctcccacatcagcctmccaggtagctgggactacaagcacacaccataatgcctggctaatttgttttgtattttcaatgaggttttgccatgtctctcagtctggtcttgaactcctgagctcaagccatctgcccacctcagcctctcaaagtgctgggattacaagcatgagccactgctggctttttgatactattggagatgcctgatggttggtttcctgagaaaggaactcagataagacaaatataactttctcgaatttcaagactaggagagttaatttcgacgtttattccaaagaaatcataaacatcagttctgtggcacagttgagccactttcagaaggatataactcaccatcctccctgtgtattcactatagatcttgggggttagcagcggggccatttactgttgtgcaggcctgtgggattccagccggagaagagtcaggcttcccacaccagcaagttatacaaataattaacattcagcaagtgcccactctgcactaggcacatctccaagcactttacactgattttctcatttatcacaacagtccatcaagatatcttattattattcccattttactggtgtgggagcagagacacaaaaacacgaagtcacttggccaaagtgactttcagtgagtggaggagtcagtactcagacgcaggcaagatcatccaaaattcgcctcttctttttttagagaaaggatcttgctttgtcacccaggctgcagtgtggtgactcaatcatggctcacacaaaccttgaacccctgggctcaaacraccctaccacctcagccaccccaagtaggtaggactacaggtgcacacttccatgcctagcctatttttgtattctttatagagacagggtctcatcatattgcccaagctggtctccaactcctggattcaaggactcttcccacctcagcctcctacagtgttgagattacaggcacaagtcactgcacccagcccaaaacctgcctcttgaccaccagtctgttccatgtatttctaatatgagcaacagctcttagtcatgcattcccaccatccacccacccaaaaggagagcagccaatctggggtcccaagtttaatggaggaagagaatttacccagaatagtttgttcatattcacacagtggttttaaaaacaaaaaaattgattctgctccagaatattctaggtgcattttctgaccttctttttctattgcagattaagaaatggggccaggggagggaaggggggtgtgatttcttttcaggttattttttaatatttatttttaaacaaattccattatttggaggcttctggtgtttagacttcaaatctactaatcttagtccataattcactcatgggacagtccctaaacatttttccagagacagttctgagacagggtttgtttaaaactctgtgacaaggtgagaaaagatctataagtcagagaaacaagactccatcatctctacaaaaaaaatttttaaattattaggtgcgcgtggtggcacatgccaatagtgccagctactcaggaggcttgaggtgggaggactgcttgagtccaggagttyaaggctgcagagagcyatgattgagccactgccctccagcctgggttacagtgagacactgtctctaaaaaataacaaaatttggggtcaagtgtggtggttcacacctgtaatcccagcaggaggatcgcttgaggccagaagtttgagaccagcctaagcagtatagcaagacccagtctctacaaaaaaaaaaaaaaaaatggaaaaggaaaaataaattagccaggcctggtgatgcatactcatagtcccagttactcaggaggctgaggcaggaggatcacttgagcccaggagctggaggctgcagtgagctatgattgcaccactgcactccagcctgagtagcagagtgagaccttgtctcaaaaaataccattttttaatttaaaatttaaaaattttaaaaattaaaagtccagacaactgcagggctttgggcgatcccttttctttcagagccatttcctcctcagtgatatggaactatgcatcctcaggcagtatgcaggtggcacagggctgtgtgtctgtaagcacttaataaaacaagttcaaatgtaggacacgagctctcctctctgccccctcctcttctctaggacacggaagtttccaatcagatcaccctcgtggaagacgtcttagccaagctctgtaaaaccatttacccgctggccgacctcctggccaggccactcccrgagggggtcgatcctctgaagcttgagatctatctcaccgacgaagacttcgaggtaagcggttcttccggtggggtggggatgggagtaaaacaacacayrcacgcccrgctcctttcactgagccgcggggcgcttctcccaatgtttccagtttgcactagacatgacgagggatgaatacaacgccctgccygcctggaagcaggtgaacctgaagaaagcaaaaggcctgttctgagtggggagacgccagaggagcctcacggtcacgtccaacaacaccactgcaccagggaaatggatatatatttttggactggtgtttttcacaaagtatttttcaatcagagttttcagaacctgacattgttaaagatactgcttgtcccggagttgtgtattttgtaaatgttcaagggaactgtttggaaacttctttccaccattcaggaggttatcagaattaataaaagtatctgttatgtgcacttaagccgcagctgctatagatagcactgccttcttgttccagctaggcaatgccttttttttttttttttgaagcagttctctttataaagtgttattttgatagtttgtggattctaaaatatatatatatttatataaacaccatataagtcaaatatgtatttaacaaagcaatatgtattcattcactttcaagatttgttttggtgtcaaaataacatgaaaaggtagatggagttgcttctgttgaattagctctgccaccaatatgtatcttcatayacgtttggaaatgtttcctgcagcattaggtatgacttgttctgagtactgcttccggtgctaaaatgaacaaagaatttgtacttaatggcatggactctggagaatctatgcgaatcaacctttctaccttaatatctccccaaaaatgtatagtgccttgtttttatgtacagtttatatacagaaaagtttgctctgcatttttgatgatggtttggaacattatctacaattttactctcaaatagtcaaaataaaaacatctcaatttctaataccggttgtaaacagtacacatgtcattttgtgatataggactcccaaataaaagtatcagaataaacacaacaattaactggttcacattgaattccaagcatgttcctttctggaattttttttttttttggtaaatattaacatagcaccaaattttgtaattaagtataaatgactatacatttgaatttagtttagggcaagattttatacaaggtcataagattaaatacagagttatttgccccataaaattagtactcagtactataatgaagacatacttttgcaaatcatcattcagcagaagttctttatcccacagctatatctatctacaatttcaattttaggatctcaatgccctttaaaaaattgtatgggccaggcgaggtggcccacacctgtaatcccggcactctgggaggctgaggcaggcggatcacctgagaccaggagttcaacagcagcctggccaacatgttgaaacccagtctctactaaaaatacaaaaattaggcatggtggcacatgcctgtaatcccagctactcaagaggctgaagaaggagaatcatttgaaactgggaggcggaggttgcagtgagccaagatcgcgccattgcactacagcctgggtgacaagagtgggactccatttcaaaaaaaaaaaaattatatggataagacatctagaaaacttaaaaaatgagttagaaaactcctcacaagctcccatgttcttaaatccatggttttgtgaacatattctacagacctactctgaattgtcatagcccttccccactccctgttagtctaatttaacacatccagtcacagcacatttgcctgaaacttcaggacttacaggccccatcctgggaccgcaccagggtagaaacctataacctgctcctggtctcaccattttatgatttttatgatattgggtcatcactgaacttttctaccttgatttcctttaaaaggagacactcctagctatcctgcctgcatcacaagattccgagcaaggaactagtggaagctctttgaaaatcgccaagtgctagatacctgccagtattaagattattgtgatggtagttaaaatgggaaagcaggggggttaagttagggagtgttgtcatgcacctagaaatgatggattaaatcaaagcaaggagacgaaaaagaagagaggttcaaagtccatgttccatagataacacgcaagaggtatggagaaaggttcctagagtcactagggcaacctgagggtcagaaagaggcaggattgcaacctctgcagcaggttccagatatcacctgaatctttagatacccaggaaggagcttgagttgctacaggaactaccagtggagagccgctgtaatgaataaataagacagatgtcctcattaatattcattaacaccagattttcccaaagtcctttaaaactgtgtctatccacttgtattaaacattggcarccaggtgcggtggctcatgcctgtaatcccagcactttgggaggccaaggcaggtggatcacttgaggtcaggagtttgagaccagcctgaccaacatggcaaaaccctgtctctactaaaaatacaaaaattagctgggtgtggtggcgcacacctgtaatcccagctacttgggaggctgaggcatgagaatcgcttgagcctgggaggccgatgttgcagtgagccgagattgcaccactacactccagcctgggcaatacagtgagactctgtctcaaaaaaaacacaaaaaaacaaaaaccactgtcccccgacaaaacgtgctgtctgtctgcttctcgccacttcttggtgaataagacaccccagcttggagagccagtatactttttgcctcttttcctctaaattgtttcctgcatctctttcctgcttatagaaccagatcctattttccatggttttttctgatccttttccttccataactgcaaactttgacctttgtacactgggaagggacctagctgaaacacttgaattgctaaaccttaaagtctcagcccaggaattgacactggtgcttggggcttttctccacagtcatccaaactcaaacccccgctctcactaaatgcatcaggggcagggaagtgcgatgtcctgaatttgctgtccttgaactaagagactcaagagaggggtgggtgtttggattgagatcgatatcagaggtgccgcggggcagatgggatgttgagcgtgttctgtagctttggatgaactgtgcgaatatgagccacttctagagtgggacaatcctgcctctttgttcccaaatccgaggaggggaaaggctgctgtgagcccacttctttctctcctactttacatttcctgccctgctattagaattcccattttggtaaaaggaaacgtattccagaaacagttccagaattcattttggtcctttggttttgttttttttattataaaattagccgtgtgtgtccactcagaaacctggacacagatgttcatagtggcattattcataatagcccagacctgtaaacaatccacatgaccgtcaactgagaaacagaaaaacaaaatgcaggacctccatgcgatggcgtcctccccgacagcaaagggacagatattcctgcgtatacatgacgtacacctgatactcactacaacatgcatacgcctcaaaagcattaagtgaaagaagccagatgcaaaaggccacatattgtttgattctttttatatgaaacttcccataaaggcaaatctgtgcaaacagcaagatcaacagtagctgaggttggagatgggagtggtggttaactgcaaatggcatgaatgatctttttggagtaatggaaatgtctcaaaactggattgtggtgatgattgcacaactctataaaggtattaaagatttttgaggccagacaccatggctcactcttggaatcccaacactttagaaggcgaggctggaggatcgttgggcctaggtgttcaagaccagcataggcaacatagtgagatcccatttgtacaaaaatttttaaatcagccaggtgtgttggtgcgtgcttgtagtcccagccacttgggaggctgaggagggaggatcccttgagcccaggagttcgagtctgcagtgagttgtgatcatactactgcactccaacctggtgacaaagtgagaccttgtctctaaaaaataaaaaaataataattaaagaaattattgttcacttacatgagcgtattttatggcatatattattatatacatacatacacaaacacattttatatatatatgtaaaatatcacaaaaaagcagtttaaaaaatagtaacacctgatctacgtaaaaaatgcaatcactacaaagatatataatctaggaatcaaaaatcataaataataccactaaccaaatacaagtactttaataatctgatttatattcttctggatttttctttacatctactagcatagatgtgtatgctcacattaaaaaaggaaaaaaactggcacatccctgtagtttcggctacttgggaggctgaggcaggaggattactggagcccaggaggtagaggctgcagtgagccatgattgcrccactacactccagcctgggtgacggagcaagaccctatattaaaaatatataaacaaaaactgtttttgttctgcatcttaaattttttgttagcaataagttgcagacactggtccttggaggtttatttatgggtgtgtgatgttctgagatcacagaaggcccagtgtgaagacctaaatcagcgatggtcctgagccccaatcccactgacctcccaccaccgtcctcagccatcacaggactttcttgatctgagatctaggtaaggcacagaagtctcaaaacagacctctgtgcaaagcctttctgaactagcgtagcgactagtaacaggcgacaataaccaagaagtcaataaagagtttggtgcgaggccaggtgaggtggctcacgcctctaattccagtgctttgagaggccaaggagggaggatcccttgaggccaagaggtcaagatcagcttaggcaacatagtgacatcctacctgtacaaaaaatttaaaaatcagctgataatggtggggacatggctttagtttcagctactctgaaaggtgagatggaaggatcacttggacccaggaagcagaggctgcagtgagctattatcctgccattgcacccagcaacagagcaataccctgtctcttaaaaaaaaaaaaaaaaaaaaaagtacagtgctctgttttcagaaatatcaaggtaattcaaatgcaaataactgaaaattaactatattggtagggcatttggcccaaagaagccttcctctttttgaaaagaaaatacattgcattgcatgcatttgctcttctccccagagaaaggatgttgggctgcttcagacctctgacaatggatgcacccccaggattagatcagaaagatggacctgccaggggaaagcatcagaggcttctgttcctaccatcagtaccatggatgcgctgcgagtgtggagtctgtatggaaatgccccactgatttcacagtgtctaaagctgatccttgaggactaatagagaagaaagatgaacagaccagtatcccttgtttctaatactgaactggcctttactgagcttttctgtcgcgcagctgagattgaaaaggaagccacaggagcagaagcgaatgcaagctaacagaaagaaagggagcgcggaggatgccacagccccagcgccctcccagcctcagcagagctgtggggattgttcttcacatctgacgccatggggttctggaagtctcttaagggatatattggaactgacttgtattatttggaaattgacataaattgtctattattaaatctcactgaattaagcccaaatttaccatctgaacaccgttttagcattcatcctgaaatggctggaacacgagttgttagctccataagggtaaataaatattagctgggcgcagtggctcatgcctgcaattccagcactctgggaggccaaagtgggaggacagattgagcccaggaatttcagatcagcctgagcaacatgatgagaccctgtttctacaaaaaattaaaccattagccaggtgtggtggcatgtccctgtagtcccaggtactcaggaggctgagctgggaggactgctggagctcaggaggttgaggctgcagtgagctgtgattgcaccactgcattccagcctggatgacagtgagaccctgtctcaaaaaaaaaaagaaatattgagaaacgactgaccaagagcccatatggaagcaaagaaaaataaaacaagcccaatgtttagtagtggtttctgcagatggaagacagcaaacgggggaagagtgcatttgggattgcaagacttggttagtgtcagagcccgtcctaaaagacaacgatgcagcaggaccctacctgtccttatgacttcctttcatcctccaggctcaccctccatgcttcccttcctgaaggaggccattcattattaaaaacaggaactgcaaagatccagcagggagcatcgtttgccaatgacacttgaggtcccagtggggaagactttttttttttggtcagatggggtctttccccagattcacatacagttatcaccacagccacagcatctgctgaagtctatttctagtatcatgttgcacattccagagccctcattatttgcagtggtccgcattcattcatgaatacttatatttactacttgttcattcaaatatttattgagtgggtgcttagcttaagggtcaacagaacacaaatacgccttatatctaggctctgatgccccaaggggcctgcattccaggagaggtgaaaataatgataattcaccaagaagcacaaataatgatgcagggtcagacatggtggctcacactgtaatcccagcactttgggaggccaacgc

SEQ ID NO: 6888 - DNA, 30624 bp, Homo sapiens
ggactttcctgcaaaaccttaaagactggttaaattacagggcctaggaagtcagtggagccccttgactgacaaagcttagaaaggaactgaaattgcttctttgaatatggattttaggcggggcgtggtggctcacgcctataatcccagcacgttgggaggccaacgcgggtggatcacctgaggtcaggagttcgagaccagcctgactaacatggtgaaaccctgtctctactaaaaatacaaaattagtcaggcgtggtggtgcacacctgtaatcccagctacttgggagactgaggcaggaggatcgcttgaacccgggaggcagaggttgcggtgagccgagatcatgccattgcactccagcctgggcaacagagcaagactctgtgtcaaaaaaaaaaaaagaatatagatttttaaatggcttttacttttatattcgctaaactttctcaaactggatcctgcttattacaggaaagagttcttggttgttttctccttggccctatccctgatttacccttagagccacaccagggtatgttgaggtgatccagtatatggacagaggaagggaaacagctaagaatgactccagcccccatcctatgcactcacagaagcttcccatatcctcttggagagagaggaagaaagtttttccttttattccttatagtctggctcccactaaaatatgtcaaggcataaagtcttgctattccatcaattttagaggatgtgacaaggggcctttcctttttctcaaaccaaaacggttacagaccctagatattccctaagggaggaagagaaagcttagagagagcagaagaaaagtcagaaggatccaaagtctcatagaaaggcactggggttggctctaggatccttctgattccgaaatctcattgctagccaaacaccaaggatctgtaggaacaaagggagagagataagtatcaattaattctcagtctcaaaaaggatgtgtgtgagggaactggagaatgttacctctgtaaagctaaagaagagtccaacaccccctaggattttcagggcttcgtctgaatgcttaagaaacttttctccacacatctggcatgtggggctctggctcttgcagatctgaggataaaacgtgaagaatgcaaagttgtgaatgtaaagttgctagtgactaatacctatgccgaatgtccctagaaactttactgttatctgaccagtgtcctacaaactaaaatcctacttggctaattccccagcctctatccacccccacctcccaccaacacagccccaatacaagagggcttgtagagagagaaacaatgacattcaaactaaatttgccaacttgggcattgtccttacccagtttcctacctcccctggctgctgcaccacccccaacacactcactgcagtgcagaaatcataatcttgttgatacagggttgtgaggttgaataagccacaacaatcaaaacttctttccagttcatcccgagtcttgttgctcatgacccaccaagaagcattgatgacatctgtctgaaagatatgggtagagggaaattaagtctccctacatcctgttatcagttcaagtgcctcaatttccctagcccagcaaaggaagtcaaacagaagcataacggtgtgcaacaattatagacacgataaatatctaccttttgaggttctctagatcatcctcatggaaaattaaccagacatcccagaggaagcaaatagcccaagaggccagaagcagtgcacctaaggatgatctttgggtagttggggccagactaaggaaggagttcgaggttaagaggaaaattttaaaaagcaagtaagtacttgaaagggtactgtcttacctgtttgcttcggttaatagccagacatgagcaagagattacaaattggaagatgaagaccaaaccaaggatgatcatgtactgagaggaaaggttatggaaaaaagtcctagattcctttatgtttcatctataataactgtctggtctcatctgttcatagaacttacaccaccatgtcaaattgaaagcaataaaatcagctcttgtttcgtagattatgggacagggcagggcaaggagacgtgtccaagatccctgaggtcccctacccttctaacatcttccttagatgacagccctcccaagcccccggttgcccccatcacttcaggtcaggatacaaagamcagcaggacttggtggtggttgacagcacccaccagtccagccactgcaataaggagaaggaagactcccacagcaatgactccgccgatgatgtggatgctggacaccagacccagrcccttgccccaagcagccactccaatgagcaacaagctcaccagctacgaagaaagagcaggatacatctcaacaattctagcatgcggcacagcccaaggccatacaagaggacttgggagcggggcagggggaaggaataatggaatagtgtgtgaatgggagctggggatggtgctatccgcaccgggagcatccctaggcactcccaaaggttagaatggctaggatggcggggagggggtggcagggatggtagtatgaatgcaaaagatgaaccctcaggatcatcctatcacttccagtttggaagaaactgaggttcacaggaaggaggtatggaacttacgcccacggccttcagttcattcccccaccctcagacaaacccccttaatcaaccggaagtctcctctctcccacggaagtccccaggaattccctcgtcgccggaagttcctgggaatcttcccggaacccccatacacccctctccccaccggaagtaccctagagattctccccacggggcctttccgccttgaagcttcccccacctccaaaacctcaccatgtagaccacgttgagagcgcaaagcgcattcttggagcaggcaaagccgccacaaaccatctccccagctctggggacccaagtggtcccaaggacttggggggagggtattggggaccgtcttccaggaccccgacagcttctgtctctttaaatcgaggccagccaaacccaatactctgcgcctgcaccgtccctcccctgcctctggattggcgaaatgcgtggctaatcctggacgtccaaggcctgcatgccaatcaacccgcattacgtcaccgacccgccttctgtccctctccttttgttttttcattgggcgaaacttaaaactaggggcagggtttctagagactctcttagggactacagcctaaactccaaaagcttaggttgaaagctgagctttctgtggtcggagttaggagagggctaattcccagggagacggctctggaggaacttaggtgaaggggagacgscgggaggggcgggtagggggccgctctgagagctgggcaaaaagggctccgcccgtagaaggagggcccttccccacccccttccccctgttctgcagtgacctcacgatgacgccattgttttgttattgcgtcacgctcgggaacacccaaaggagccacatattgagcttatttagcccggccgcagagtccgcgggttggacacagcaacacccagcaaatcatcacacgtttgtgtgtcctctagtacccatgtcctgttccatatctcctcctaaaggggtgtgaatataccagaaattcagtgtggaaatagcggcctcaggccagcgcattcctgtatgtggcattgccacaagtgcacagaggggtgtgctcagcattttcagagtacacgcctgatctagggcttgcaaaaaaacggcaggcaagaggaagagtctcatttacataaatataagtggaaggagcctccaccttttcacttgggggtaggctgatcaacaactttattatctagtaagtgctttgacaaaccgtccttctcacgggggtagggaaaggcataatccttctcttccccaggagaaagaaacagtaggaacaaaaaagaaaaccctccaatcaactcaacagaatgatttaagtttgtgtgtacttagattctatagacttactgccacagtcagattgccacttcctagctgcgtaacctttggccaggcacttagaaactgtctgtgcgtgtttcctcatctgtaaaatggggataaataacaacacaccctacctcttgggttgtaagaattaaatgagttaatatatgtagaatacttagaacagtacctggcatatagtaaacactcaatgttagttattacttttcaggtcattttacaggttcctgtgggcaattccaacctcaattcccttatctttaactacacagtatttatataaactcttacagaaattaataccaaaaaggtatgcaggagaatagatgtttgacagggcgagagaggtgtttgggtcttgaaacaaggtaattaagttattatcattattattattttgagacagagtctccctctgtcgcccaggctggagtgtagtggcgcgatctcagttcactgcaaccttcacctcccgggttcaaacaattctcctgcctggctcagcctcccgagtagctggattacaggtgcccgccaccacacccagctaatttttttgtatttttagtagagatggggttttgccatgttggccaggctggtggcgaactcctgaccttaggtgatctgcccgcctcggcctcccaaagtgctacgattacaggcgtccggtggaaacaaagtaattaggtcaaactacccgctacctcctacctcccaccccctcactccccacctccatccccttcctaccccaagtcccatcttcattgtctccttcagttcctcatctaccttcttttctttgaggtcctaaatcaagggcaagacaatgatattagaaggggaactggttgacaagcattttggttgtgtggtgtagtgaaaagggtatcaaaattataaccaatctgggctttatgtgcttggtaaaaaataaaaataaaaatgtaaaaataaaatcagaagacctaaatccatgtctttgtttcacctcttaatggcttctctgagccttagtttccttttatgcaaatagggataaataatcctactcctcagggctgtcatgaggataatatatatatgaaagtatgttgtaaactattaagtgttatagtcatgttaattattatgaaagcgattggacatggaacatggtagtttttgtctttttataggttactttcctccttcataactgattttccccataatcacttggcctatttatttattttatttatttttgacgtggagtttcgcttagtcacccaggctggagtgcagtggcgtgatcttggctcactgcaacctccacctcctgggttcaagtgattctcctgcctcagcctcccaaggtgctgggattacaggcatgagccaccacgcctggcctcacttggcccttttaaacaggaggtggcctcagtgggtagctgcctgaaaaagggttacatcgtaagacataaggatacagggctcattgggatgtgtagagagggcaatgggtacaagtgtatactagaatgcagggctgtgagggtaacagaccaaatgtgcatgaattcctgtgagagtttgaaatccgcaggtcatcaagagtttaggattgcacctcggacctagcttgccatattctcccrgaaccaacacccatcttaattagccacctcccacaggaggccctgggacactgttaagatttctccatccacctggctgggaaatcatagcagggactggctggcagggttgatgggccaacactagagggggtgggaggtgcaggaggtagtgctgtcccaggctgtgggtttgaaactcaccagtcaggaagtgaggtcgacagacggaagggcgggcaggggcggggagttctgggcacagcagaaggggccttctgaggtttgggggctgtagggccatgggcctcagggccagaggtggttgttagcctggcaagacaggtctgggcaacatgcatgcccagaggcagttcgttgtagctgcagtgagagcagaagtcagacgacatgaggtggccaagcaggctctaaaccgcctcaggaagctggcagagagggtggacgaccccgaactccaggacagcatccaggcctcattggacagcattcgaggtaagagaaaggtcagccctcaacttgggtgtatcrgggactagcaggtgcatagaaggtttagctgtatcatatatcaattcccagtcagctacttcctagtccccaagatgggactctgggaaagaatacatttagggaggatggaaaaagacatgggaggtatcattctttctctttccctgctctgatccttctcccaggagatcaaaatacaggtccctgttgagctgaccttcttggcaatgaagaaatgtgtgagcatggggaagatrggctgtgacagactcatggtagacttgttccctgcctggggagtccagagcaggaagcagtctggggcagcaggttctgggactggataatgagttcattcccaggacccacaaaggatcagtgacctcttgttctccagctgtagagagaaacacatgcacacacatacacacacacacacacgcatgcacattgaagtacaccatgcagagaatctcaggctcccaagcgcatactaactctcacacactatgctctgcagagccaaagtgcagataggtccccagaactctycttggtcccctctcctccccttgctcctgtycctgtcttccccccacacaccttccgctctacctccttagtgccattagagcaagtgatgacaacacagggaggaaatgctgccatggcaacaccatccgccacatcctcctgcccaccccaggcttcagtcctgtggtggagccctggcaggaacagcttctctccatccacaaggccctaccactgaggaactgrtggaactggaggttgttccagctcgctgtcattccattcacctctgatgcagcaaagagctaacaaaagcagccttctttgctcatgaaaggtrtctrgtggaaacacttcytccatcatatcctgatctcttccagccatttcagtcttctccattgttacctgcctacctgggtggttgtcaagagatcattctttccctcaaggacacctcctgccagacctctctgctagtacaccagagtataacttggggaaggaacagcttgctttggatgcctagtgggacagtctgatgatccccttcccattgttcttcggaggctagtgcccctctcacctcctgtcccataccctttgccaggaactacacctgaagcttcccctgacagccttagtgtttggaaaggcagaccaagggggagtgggccatggggcctcctagggagaaactctaagccccacccctctcaaaaataataatgataataataataaaggagaagagcggtttaggccaggcagaaaagctgtgcttagctctggagagggaggagggtgaggaggggtggaggtggaaatccctgagaaggcttcactcctcataagtgatttgttttactccttctctaagaattagtattctgttcccattgaacataaaggaaaaccgaggccatcaaaggagggaagtttaagccagagccaacaattctccttcaccctctccatcaaaaaacactactgaagggtctcctgtcctggggatggtgtcatcttggttctgtagggagggagggagaaactgctgagccccaggacagaacattggagggattggatacaggcctctgggagaacaaagggctcctggcatcctggctcagcccccccaccctcagccccccaccaggccaagcacgctgcgggctcctgcctccaagagccgcccacggcagcacttattatagtctcagctgcgtcaggagggtgggacgccaaatcaggggactgctgtgactccccaagtcccgggaaggggtctccaaggctgcagagagaccttccttcgcccatcttaccccacccccaaggggtctcaacctcttttccactttggcctaaccacttcaggattctcacctggctggaggatagagagccttgaactccaagacccctagaggggtgggggacacggagcagacggtttccattcactctgcctgcctcctctttaatcttctgaaagaatcccactcagcaaacctcaggagactgaaagggaaccctgaagaggccggctctcactgcctcaactgaagggtccttatacttggggagtgaaatcctccacctgtgggtagccaggtgtcagggcagtgcctccactaattcagcatcccgcggttggtcccctacccaccatacacacggattcctctctgcttctgcccgctgtttctgaggcactcttggagctacggttgctatggagactggatgcattttggcatgggggggtatcagtctaagacacatccttctccctcctcctagagctggagcctttgacttaccctgtggcctgggctcctccagcactcagatctctcccttctctcctaccctgctaagttycatgtttgtccccatccctggggaacattttccaagttcactttgggacagtcgagctcaagtcttggccccgtcaaagtattaaatgtggtggtgtgagtgggaaagggagctgggtcatgagaacgggaaccgtccaggtacctgggggagacaagagatcctgggggaagggatttcagggcccccactttcccacttcatcttccccagaattggcagtgaccctgggtttgctctgtttaccgcggcccctgtccacccaatagatcgattttcacccttatccctaaatgccatacctcacaatcgcgcttcctaaccttggtgcgcgagaggagggggctaggttgttggaggaggtgagtccaagtcccaggaaatccagcccaggatttgggagagaaatccagccctggattttgcaccgccctcgcagacatcggtgctggtggagaaaaggtgggggggagatagggtgggggggcctgggggccgcctcctcctmaatgtgaggggagcgcccggacacagcgcgcatccggaccaagccgagcccaggcgaggcccccggactcttcgcccggatctcacgcccctcccctcccagaccccagacccgtgggttcccacccacctcccgttccctctttcctcccccgccgcctcctgtatctccatccccagcatcctccccgcgcccctgcgaatcccccgcacggccagccccactagcttcccaccctcctctagaccctctttccgaccgcatccgcggcccctgtcccttgagtcccaattccccgcccctgcctcccccgcacaggttcgtttcccctagcctccggtccccttttctgctcccttttcctctctctcccccatttgcccccactactgtcctccccgccctcccccacccatctcagcgcccccacccaggccggggtggacggtccggcgcgcctccctggagcagcaccaaggtcccggggctccaagagggtgggggcgcagggcggggagcatggggagggggcgccccatgtgatgggaggggggcgcaagcggaggcggcggaggcggcggcgacagcggagccgggccgggggctcagcggggtccgggggctgggggcagcgagcagggcggccccatggccgggcccccctgaggcagtccgggggagtcccctcccctccccagctcgggggtctccgggccccatgagccggggcgcgggcgcgcttcagcgccggacaacgacctacctcatctcgctgaccctggttaagctcgagtcggtgcctccgccgccgccttctccgtctgcggccgcggccggcgccgccggtgccagaggctccgagactggggatcctggcagcccccgaggcgcggaggagccgggcaagaagcggcacgaacgtctcttccaccggcaggatgcgctgtggatcagcacgagcagcgcgggcaccgggggcgcggagcccccagccctgtccccggctccggccagtccggcccgcccagtctcccccgctcccggccgccgcctctccctctgggccgtccctccgggacccccgctctccgggggactgagccccgaccccaagcctgggggcgcccccacctcctcccggcgccccctgctcagcagcccgagctggggcggcccggagcccgaaggccgggcgggcggcggcatccctggctcatcctctccgcaccctggcaccggcagccggaggctcaaggtggcgcctcctccgccggctcccaagccttgcaagaccgtgaccacgagtggagccaaagccggcgggggcaagggcgcgggtagccgcctgtcatggcccgaaagcgagggcaagcccagggtcaaggggtcaaagagcagcgccgggactggagcttcggtctctgccgccgccaccgccgccgccgccgggggagggggctctacagcttcgacctctggtggggtcggggctggggctggagcccgagggaagttgtcccctcggaaaggcaagagtaagaccttggacaacagtgacttgcatccgggaccgcctgccggctctcctcctccgctaaccctcccaccaactccgagtccagccactgctgtcaccgctgcttccgcgcagccccccgggcctgcacctccaatcactctggagcctccagctccggggctgaaacggggccgggaggggggccgagcatccactcgtgaccgcaagatgctcaagtttatcagcggcatcttcaccaagagcacaggagggcctcctggctccgggccccttcccggaccccccagcctgtcttctggcagcgggtccagggagctgctgggcgccgagctccgcgcttcccctagtgagttgagtcagggcttgagaacagggagggaagggtacctggaatgctcagcttggggtggaggagcgaggtccaggaaactagggaagcttttctctggggtgggcggatgaaccaagctcacccctctgtcaaggattggggcaaagaataggagtcctgaagcggggcgagtagctacattgtgcgacaggagaaaggacttgatttcagagggactcagcctcagagctttctgggaaagtaacgtccttgatcagagtgactagaaaattgctcccagagaagcccaggaccccacttccagcctcagctgaactctgggagcatggaaacggggctttgccgtgtttagascgacgytgaaggtgaaggggatgaggaagcctcagtttcccctgagcacttggggcaggtggcatgacagtgaccttgcaggcagcttctcgccagggactagtcgtcccctgggctgagagcaggctagtgatgtttttcgtgcggtgaaggcggattgggcggtacgcgagtccgcgggggctggaacgtgcagaatatttaaatgtgaagtgagagggggcggataggaagcctcacttcccccactgccyaccccctccccagagccgcattgaaacccacccggggctgaccctggagtgagtcaggtggggcggaactgctgcaaaggcaatccgtaccccgggagacttgggaggcggtacggggaaggtagtgttttttacgggggcagggtgtctattattattactattttcctactggaggagataggcaggagactcttggttcggctcacactcccgggagaggaggcgggtccgggagcggaggcggcccccggggtttggctccggagcgggtgggagcagatggctccggatcccagagttcccgccgcagctgcggcgccccgggaacgtccggccggtgtcaggcgcgggggctggacctggctggcggaaggagcatcctttcccccgggcctgtggcttctytcggccaggcgatggagcccttccccacagttcttttggagggcgtttgtggggagggtgtgggagatggaggcataggaaaatcctagctctttcccttgggctgtggggaggggtccagggctacagtgccgttgaccttgaagaaggggagggaaacccctcacctcagtttctctmctgtggaatggaggttggggaagacacactctcttctgtgtttcagcacctcctcccagggtctgccctgggaaccagtgggttagggaggagctcctcttctattctttttccagagggaagaacctgccactgtcagagccctggtctccctgtctggggccaggacccgcgtttggggatgtgctttaagggagatgccaactgaagtatttttgtcttgctagctccgttgctaagcaaccactgagcggcagcaacagctgggggagagtggctgggatgggaggcctggggaccaccctcaaacctgtctgttgcacacacctctccagtgcaggcagggttgggggggggttggaaagctgcagagggaggaggggtggctcagtgttgggggtccttctgagccaggagcctcccctcttactgcccttctcccgttacagaggctgtgatcaatagccaggaatggactttgagccgctccattcctgaactgcgcctggtaggtaacccagtccccttgcctatagggaaggctgacctcccacccactgcactctcagctctctcccttcacctctccttctctctctctctctctttgggaatagggaatcgttttccagttctcctgagagtctgccttcatagcaccaacatggggtttgctacagcctcctcacaagtttttcctatctagtctttatgcagccatcccctttttcctgtttgttcatggtcctcctccaggcttctcatttctggtatctgccctttggccttcatgttgtactgcctagaattgggtaaagttttccaactagtgcctagagctgtgacatgctacaaacacacacacacagagacacacacacacaacatatctagtatgttttctaaacaacccaacacacaaaaaagctggtactgaattgctgacattcttcagctcgtgctccactttgagcttgggatcatttcttaccacactcatgccctgatcctcccaactgctctgatccccccagctgctctgatcctcccaactgctctctctggaatgactgtcatccaggccctgtagggtcctgcttggatgacttatctctctgggttttctggagtgtccagacccatgcatcctgccttctcttatatcccacaatttctgctccacaaccttgccctcagggtgtgctgggcgatgccaggagtgggaagtcatcgctcatccaccgattcctgactggctcataccaggtgctggagaagacasagagtgagttctgaagagccatagtaagctaaccattggggtcagggatccaggagtgagatcartgattaggcaggtgtggagaccaggggggaaggatgaggccataatagcaaaagcactgggagcatggggaggtttggtgacctgtcacctctgacctgttaccccttccaactcttctggacaggtgagcagtacaagaaagaaatgttggtggatggacagacacatctggtgctaatccgagaggaagctggggcacctgatgccaaggtgagggtggaggtggtgggggacaggctggctggggtcagcactggccaaaggagagggctctggtttcccaggtcttcatctggattgggtccagaggagtagacctgtctgactttccatttgctccctcaytccccgcaagttctcaggctgggcagatgctgtgatcttcgtcttcagcctggaggatgagaacagtttccaggctgtgagccgtctccatgggcagctgagttcccttcgcggggagggacgaggargcctggccttggcactggtggggacacaaggtaaggaggggttaggaaagcactgctttcaagggaggccctraggaggctactgggatattgcccaacatgggtgagaacttggtaaggtgtggaaatggccacttggattatagtacccttctggagggagcctggtctccaaataagggagtcatgaaaccaaacaataacttcccaaggtctgagcagagaaaaggggatctccagggaggaaaggacagctatagtagccatctccttgcctctcctgaaatgtcacctaccttgtgttctgacactgccatttcctagtgccaccatcctaggacacagaaaatctcaagtcctagkgtggataggaaaccttttccatcttcctttttgcgacagctgggtaaggctgacaccttttaaaggaacttatccaaaaacaaagtgaaaacacaaaggaaatgatgatgaaaagaagagagcagaaaaccttttagttctcaragaagtgactcagaggctcccagactctgccagggccaggaaatgcttttccagcactcccctgtgtcgagctggtgggacttggtctggatgcctgttctgctggtgcctatctccacytgttgcttgcatcctggtttcttgctgcagagtgggcagtccagccatgacccatgggcacccaaccttttcctagttcacaagctggtgtcctcccaccagttcagggttctatggatttgcagggcagggtgattgtsgctcgcgcctgggtctcagctatgtagaccttgtcaggaagcaccactcagcagctctggagtattccttgaggacacacacacacacacacacacacacacagctcacccagctaggtgtgtgaactgggcccagtactcagaaagggcttatgtactcccattccacctggtcacagaaaagatgatctctcacaccccatccccagtggacccagcctgagggcccagtgcaaggataagggaattgtgaaaaatcgaacaaggtggggctccttgttcaatcctgcccctttcctgtcccctcagacaggatcagtgcttcctcccctcgggtggtgggagatgctcgtgccagagctctgtgcgcggacatgaaacgctgcagctactatgagacttgtgcaacctatgggctcaatgtggatcgggtcttccaggagggtgagtgtagtgatctccagcatatgtgggaagccagagcaaggggcctgggatattctcagtggtcaggcatccaggcctctctctgtgagtgacaggaaattagcctttgtgggagggaggagagatcagggaggccagagaaggtttgcttaatagtcgcaaggtctttctgggctggaggagctggcaaggccacaggtggcatggasgccacagtgacaaggaagttgggtcctgtgttgtctactggggatttctcaaagctgggcatggaagggtggtcttgggtatctggcctgctcacacctccttcygtcaactcccctcagtggcccagaaggtggtgaccttgcgcaagcagcaacagcttctggctgcctgcaagtccctkcccagctccccaagccactcagctgcatccactccggtagctggccaggtgagttggggtttcagagtctgcagaggggccrgtaagatgcagaggggctggggatcctaggacaggtacagagtacccaaggaggttcagggagtggggaaacagatggaaatggcagtgaaactattggcagaaagtgcattggactggaaatcaaccagatttgagacatcatttgcagtgtccttaagcaactcacctaacctcccaaggctatcaggaagattgtatgacacaatacttgtgaatcaacctttacaacatttaaagcattgtcacaatgttagtgaggattttwaaaattattaatgacaacataaataaatggtgaggtgatcaaggaatgtctcaaattccccataacgagatatgagtgtagcttggtggagtagggggcatctcagctctgctgactcttccatatgtgcccaggctagtaacgggggccacactagcgactactcttcttccctcccgtcctcaccraatgttggtcaccgggagctccgagccgaggcagctgcagtggctggattgagcaccccagggtccctgcaccgggcagccaagcgcaggaccagcctttttgcggtattggacatggacatgctgacccccatcctcctgtcccccatgacctgcccatcttccctagtccctagactcctctgttgggcccttcttcatctatcttccctatcgtcacatcagtgtatccctctatccatcctcaaactgattccartaaccattccagaatcgtcggggtagtgactccgagaaacgaagcttggatagtcggggagagacaacagggagtgggcgagccatccccatcaaacaggtgagtgatccaggggctgggacaggctaggggcagctggtcttagttggcttttttcccacatgtgtctttcccctttctccagagcttcctactaaaacgaagtggcaattccttgaacaaagaatggaagaagaaatatgtaaccctgtccagtaatggctttctactctaccaccccagtattaacgtgagtggcagagactgggccacrttggccagctttggatttccctcaagttctacctgtctatgcctctgacaaagcactaacctcatttctaggaagtgctagtcctcttctcttaagtttagcaggcatgtgttaagagcccaccatgtgcccmtgccaggaatgtaaaggtaaatacattgccccaggaacttgcagtctagtgggagagcacccaggaagggaacgctttctggaggagacaattgctgggccaagtctgatgggcccatcccctagatgttcatcacaacccatttggcccccaagacccctccccagtccctctctattctgtaccatrttgactgcttcccagcataccaaggaccccaaccttccctacactctcggccytgtacccctccaggattacatccacagtacccacggcaaggagatggacttgctgcgaacaacagtcaaagtcccgggcaagcggcccccgagggccatctctgcctttggcccctcagccagcattaacgggctcgtcaaggacatgagcactgtccagatgggtgaagscctgggtgagtaaggtttatgacataggagcagaagaggggccasggctggggaaaaagaggggtaagagggaagagggggctggcactgggcgagtaggaagctgggtgataaagagggaccacataaggaatggggccagaagaaagaggctcactgaggtttcatcttcttccgacagaagccactactcccatgccaagccctagccccagccccagttccctgcagccaccaccagatcagacatccaaacacctgctgaagccagaccggaatttggcccgagccctcagcacgggtcagtggggatgaccttccatctgctgtcttccacacccaaataggatgagtgtgggaaatgaatatggggtgaaggcttggaggctggaataaatgcatgagtgaacacatggagccccacacatgaataagttcaatcataccatgtctatcataatggttaagacaagtggactctaacgtcaactgcctgagcttgaatcctggcttgccacatgggcaagttacttgacctctccgtgcctcagtttcctcatctgtaacatggagataatagtttctacctcagagggttgctttgaggtttaaacaaactgagaatattgtctagtacatagtcagccatgtttgacatgtttgaaaaaaatatatatatatatagtatgcaaataacattgtaaacaaatgatccttacaacagttttgtcaggtcaagattattacccctatttcagagataaagaaactgaggctcagaagattaagtgccttgctcaaggtcttaaggccagtaagtggcagaaccaggatctgagtgcaggactgactctaaacctctcatctccctgcatccccaggaatgatcaagggggaactcctggagagggacagttgaggaggggagcccyaaaatgccaaagctagttcagggaatgagacaggctatcaagaaatcaggaaatctgtggagggggctactgaggcagctgtgtcttcctccctaagactgtaccccatctggagacctgagccccctgagtcgggaaccccctccttctcccatggtgaagaagcagaggaggaaaaaattgacaacaccatccaagactgaaggctcggctgggcaggctgaaggtgaggctctggcaggcacttccactcccacccagaaccctcatccccaacatcagctccctggcctaactcctgcagcaggaggaaaagtgcctgagctgagtgcttgactaccattaccactgcacacaacttagtgaaagagtggatggacatcccccagcccctgtccttctttccttgttccccagctaattcctttccccagcccctgttctcaacgatgtccatgtctatagctcctgctccctctcctaatgacgttctagttcctcttccttccctcaactccacttaccaccccagccccygcacccggcagccccgctgatccccagtgattcagccccttatctcagcatctcccactgattccccagatcctggattctgtgaccacccagccccttctcccaataactttctttcttttttttttcttttcttttttttttttttttttgagatggagtctcactctgtcacccaggctggagtacagtggtgcgatctcggctcactgcaagctctgcctcccgggttcacrccattctcctgcctcagccttccaagtagctgggactacaggcacttgccacyatgcccggctaattttttgtattttttagtagagactgggtttcactgtgttagccaggatggtcttgatctcctgacctcgtgatctgcccgcctcggcctcccaaagtgctgggattacaggcggtggggattacaggcatgagtcaccgtgcccggccttctcccgataactttctattgccaagtgctccccaacagcccttgaccatagtgatccccattcttgtccctcagtgattccccgcacccccacygccaccagccccagggccctctcatctcagccctgcgccccagcttctgtccccttcccccgtgttcactcagatcctgaccctcccttcttctcccagaggtccagctcctcgctggtcttgataacccatccctgctgcccctgctctctgccgggtgctcagacccaggttccagatctgcctactctcatggctcttggcttctgttccactctgctccggggccactgactttagttctgctttctctccccatctgtctgtcctgctttgtctctggcactctgtcactatctctctccatctctccatctacctgtctttttctccttctttcttggtctctctttctctgttctgctctccattctatctctatctccttcgcttcgggaaaccagccaagcgcaaaatgtggaaactaaaatcctttggtagtttaagaaatatttataaagcaggtaacaagtggggagccgggaggggcgctcagctggggtgcagaagggtgggggtgcccccgccttccccwgcatgtgctcgggcttcctgctgccccccaccctctgctttccctacccccactgccccactcccaggggctcgggatggacatcagggaggacggtcttgggaaaggcagcccctgcttgaactctgtcccttaatgaccccatcccatcccccactcagaggaaaactttgagttcctgatcgtgtccagcacgggtcagacgtggcactttgaggcagccagttttgaggagcgggatgcctgggtccaggccatcgagagtcagatcctagccagtctgcaatgctgtgagagcagcaaggtcaaggtaagagtttgaggtggagtggaggactggccgcaggaactgaccctggtgctgacggccattggcaacgacacggccgaagtcgtgtgagaggagagcagaggtgtctgagaaggaggtggggcttggaggcagagtcagtgccaacccaaaccctctctgcagctgcgcacagacagccaaagcgaggccgtggccatccaggcgatccggaacgccaaggggaattcaatctgcgtggactgcggggcccccagtgagtgccaggaggcagcggaggggctagggagtgtagtgaatgccggggtgcctgtgctgcccggctgggagccgacctctacgctccttccgcagaccccacgtgggccagcttgaacctgggcgccctcatctgcatcgagtgttctggcatccaccgcaacctgggcacacacctgtcccgcgttcgctcgctggacttggacgactggccacgggagctgaccctggtgctgacggctattggcaacgacacggccaaccgcgtgtgggaaagcgacacgcgaggccgtgccaagccctcgcgggactcttcgcggtaagcgtgagggaacagagcggggggagggttgctgagggtgtgcgaacctgagacggtcccgtgggtaggggcagaagtcctggctgggggtccctagagccttttccgttgatccctggtcttgcagggaggagcgcgagtcgtggattcgcgccaagtacgagcagctactgttcctggcgccgctgagcacctcggaggagccgctgggccgccagctgtgggccgccgtgcaggcccaggacgtggctaccgttctcctgcttttggcccatgcgcgacacgggccgctcgacaccagcgtagaggacccacagctgcgctccccactccacctggcggccgagctcgcccacgtcgtcatsacgcaactgctgctgtgggtacgtgagctggggggaggaaagggggtctttgaggcttcatctcggaaaacgcctggcgcgggaaagcccgaaattccmagagggaccccggaagtagscttgsccatgtgggggagscggcgccgggtgtgggcgccctggggacgckcggtcacgcggccgtttccgccctctagtacggcgcggacgtggcggcccgtgacgcccaggkccgcacggcgctgttctacgcccgccaggctggaagccakctgtgcgccgacatccttctccagcacgsctgcccgggtgagggcggcagcgcggccaccacgcccagcgcggccaccacgcccagcatcaccgccacgcccagcccccgccgccggagcagcgccgctagcgtgggccgcgccgacgccccggttgcgctggtatagttgcccagcgggagagacacccccatccccacgcgggccgggcacgaccacaccgggcggaccgctggacagacgcacccactcacctctccgatccgcaccccgccccacgggagcacttcctacccccacgagggcacagcccccacgccttccagaagacacaaactcacctccctctccccaacgaggcatggagaccccagctcaacacgccccctctccattgtttccacactcggattgctctgggtctacccgctcggggttcgcggaaggggaggtccccagcggtacgggctcctaggcgcttggacatgcccgcttgtgccccctaggggcggaaagaagacccggtcctgcccgagctcaacaatcccagggcgggagcccatacccaggctggctcctggggcgacgccacgccagagggagggtttagtacatgggagggctagccccgggacttggggccaatacggaaaccctaccccttccatgctcatctcactgcccagtgaagggggcaagggcagcgaggggcaggacccctgctgctcatgggggtgggggttcccaaccctttccgtgaaagggaccgtgagtagtggaaaccaggacgtcccctacacctacccatgggtggaagctaaagagtccggggggaaccaagagcctgggtccctcccactactatcttgggagggagaagggatggagcaggagcgggctaagagggctgcgggggccttgtaatttattgctttgttccccaacatggggatgggggcgggcaggggcgtggggagggcgttttggggtaggggaagcccagggtgggcagggggtgggttggggtgggggtgctctcgggttgtgtctgtgaccgtgactgcgtacctgtgactgtgcagcgcccgtggtgatctggggtagggggcacccctacagtgggacccctcccccattattctttctgtccagcccctccctmccactggagcagctccagagccattcctcacccccgtgacctctcccagccagggctgagaggattcgaggtggctgggagggtttccaggccccctgccccttccccacaaactgggtgatagggcggacttacctggcccagccctgcctccctcagccaacccagcccttgggctgtctgtgtcagtggtttccggtcttttttttttttttttttttctggctaaaatagtttgcaaaggaccaggtaattggggaggggagagaggtgggggcaagggggaaatgcccccccatctccttggaggcagtggtgtgaatcttcttcaacagcaattaaagaggaagtgattttgtctagggggtgagctgctggtctgttcttggaggcaggtcagggcatggccttggtcaagatggggtactggggttggacagggacaggcagaggtgcctcccactggggctggtggcaggacagtacccatgggcrtggaggtggttccatcatgtacaacagttctgggttcatgtagtggaggacgtgggcaggttggagtcagtggggaccctgggaacagagaaggcactgactcttaagatgatgccagtcctgggagagttgggatatggtacttagaggagaggacaggcccatggagaggggtgggaagatgggacagctttgtttaagagcaggaactttggagacagatctgattttgaaacctgcccctccactgcacagctaggggaccttggtggcatctgtttatctgtattctgaacagtatctgttcagagggcacctgaaaggcgctccagctctgaggagggctgccccgagccagcctgctcaccgtgagcactaggtaccagagtagaacatagagtaggggttcctcccctggcctcgtcagggggtgttccagagggaaggggtgggagacctcctgggaaagatttcccagctagctgcagaggtccctggtgtccacaaactcagtgtcagctgatgcaggcatttatccacctccgtgccatcaaagggaccaccaaggccacagcggcctgaagccggtgctgcctccrtgagctgcagtgccactaggctcagcacatagccaatcctaccatttctcgagggcagctgaaagtgtttactcaggtagaggggctggacagggtagggttgggtcagcagccagtgcaggttgggcacagccatatgttgttatctaccttgaggagttagttggtagcaccagcatctttgggtagaattgcttctgacccttggtgcccaccagccccaagaggttcagctgcaagtgtgccactgaactgaggacacagcaccagacctgaatccagttcacatggaggctgcggctctacagggtcctaggctgtgaccacccagcacagcggcgtgacccaggaaaggtggattcaacagtgcaggtgcagtgacaagtacagaggcaggtgtgtggtctgggcaaagcgasaagaggggggaggtagcaaagaagattggactagaggacctggccgttcccccttcacctccaagaccctggactctcttatttcagctccmctccttcctcgtggccaaagtttgctcccttcttcagaagtttgggagtgtgagagaatatgggaaggaaataaggaccctggagagaatgraattgccttcaaagagcaagtgggaagttcctttcatttccagccagtgaaaaatggtcaaggtgtcagcaaacctcacaacaaatcccaacaccaagtaatccacttgcctcttgtcttaatggggagtgtctttggtcttgcgggggagatgtaaagggtggtagtggatggaatgacaaaatatcaagccctccaggttatgacaaaataggagcccagaaggggactccctgggtgggtgaaggagagctgctgcccctttgtgcccatgcccccttcacagctcrccctgggctgccttgcttggatgccctgccatgcaggatgccctattgccatccgccagccctccctgcagccctgctggctgccatctgccacaccctgctcccctccttttgtttgtcttagcacagctggggcagaccgaccttcaccatgggagtgctgccgccaaaagccaaaggaaaggaaaaaggaatttcgattgaaagtacaaaatgattaacagagtgagatttccagaactctgctttctggtgatgctgagactccatccccagcaaatcaaagcacagccctcctgccccagccccttcccattctgagcttctgatcagctttggggactccttctgagactcttgcctccaagtaacccagtcttttcagaactcaggagttggcttataatagaaagctagtgagcacttacttggggccaggttctgtgctaaaagcacgacatacactctatctcattcaatcctcgcaaccatcttaaaaagccagtactgttgtccacaatttaccaatgaggaaacagcatttagaaagttaagtgacttgttcaagggtccgctggtgggagatgaggggtgcggtctgggagctgcattctgactactgctgccctcaaggcagtgtctaagctcttgtccagctggagcatccctccctcagggggcgcagatggaccagaggaagcagggttttctgagtctacctatttacacttcaaaacaaaacaacgtaagcatagcatgcacagtaagcactagtccacgttcagcaagagcttccttcaacagttgaatccttcactctccatttatagacacatgggagttctgggccctctatccttttttttttttttttttttctttatttgagacagtctcactctgtcgcccaggttggagtgcagtggtgtgatctcagctcaccacaacctccgcctcccgggttcaagcgattctcctgctcagcctcccgtgtagctgggattatgggcgtgcgccaccacactcggctaattttttgtatttttagtagagatggggtttcacgatgttggccaggctggtctcgaactcctggcctcaagtgatccgcccgcctcagcctcccaaagtactgggattacaggggtgagccactgctcccggcccctctatcccttttcttatcctgtgagcccgggggcagccttcagcagaaaggccgttcacctcagagaccagagcagaggactctacctgagtcctctgcactcaaaattagcagagcatggtggtgtgtgcctgtaattccagtcactgggaggctgaggcagaattgcttgaacctgggaggcagaagttgcagtgagctgagatcaggccactgcactccagcctgggcaacagagtgagactcttgtctcgaaacaaaacaaacaaaatcagagtcctctgcactgggaggaggcatgtggggggacccatgcctgcacttggtagtgaagaagaaagggagacaccaggcccatgtacccttgggcatactaagaaactggcatgtgtgggcagcagccctctctctgcgcatgcccaaaggtggaggtctttttggaaaatgttgaaaggacaggtgggtaggggtgtggatgacaaatggaatctggagcatgatatgggagagaccacagcagaaggaagatccccgccggggggagctccatggtgtgcattttggctttcagggtataaagggggaaacaatagggaaagacttggtgcaaaagggaaggaacagaaacagacagatgagaaaaggaagatgacagcattgcaagtgtttctttcaatccttgccaggccaggctttgtttagctaccctggtctcttcctgcataccccagcccccgtttatagtacctggggaatggggagcaaagaacaggatcagagcatgatctgaaaagaacactgagccttctccctgctggaacccccaccccacaaaaaaggttgatggattgatggtccagttgtttatttagaracctgattgttcaaraacatggtgggtgcttcacacctttttcactgggattgtgctggaggtgataggcagcattctaccatttcctcagcaacagaggtgaaggctcctcaactcagaagcacaaattgtaggggacagggtgggcagggaaagggagaaggaawtcccaaggcaattcaatagaagagggtaaaacgactccaaacatcactaagggcaggkgggggcctgcttgctcagtgcctgctaagtgtcctgccctccttgctctctctacccacctccactcaaaagatcctactgaatctccaggtaggcagcagggaatatcctatcattaggggacaataacaggaaaagccacagaggagaggaagaggattgagtgagagttcaggagagcaaatatcacaggcccggtgaggtctcaaggtggctgccagcaggggcagcagcattcacccagggcccccacacccacagagttgcccgagaggtccacagctcagctccactctgctgtttggccctcaggggttccagggtggggaggtggggaggaggcaagccagtccaggaagagtctggattccgtgaagggtcaagtgtagtgttggtctcagaagtcaaattcgtccaggtcccctgtgccctccccacctggagagccccacacccggcggtaattgctctccagctctttctgccgctggcgttccttctgggcctcttcagctcccggcacctggtgggagagggtagaggtgggctggagctactggccgttgagcccagggaagtcctgggccaggcagctgggggaaggcagggaatgaggacacccatgtcctgaggggctcttcctgcatggcagcactctgagccactggaaccccagccttgtcttacagatcaggaaatggaagctcagcaatggcgtggctggggcaagcccgcacctccactccaggagggctgggggccaggactcgggggtagaagcctcttaccaagatattgaagaagatctccttgaggtttctcgtgtcctcatcagtcagccaacgtgcaccctcttcagtcccttcagcccatgggcggacaattttgatctcaattttccctggaaaggagcagtatgcagtgagaggagaggatggttgggagcctcagggcaggccccctgccccactggtcccagcccctccacttccggcagcttgcccttccgacagcactgggtccagccgccctccagggcccacctgcagctgtgagtccctccctctccagcagctccttcaccagcccctcgatttgtttcagctgtgggttttcccgtttcatctcgaggacagtcagatcctgattagggcctccgagacggagcttggtgacccggacccggactctgtgctcaggatcctcctcttagagggggagacacacagggaaacacaaagcagaggcgtgactccagggttaggggtgtgggggtcatctccccctaaaacatcagttggctttggcagctcttccatctcaacatgtatatgagccagggctcaaaaaaatgtgtgccccgcccctcccagttcagcctgtagagctccctccaccaattgcagccttccatcttcccgccctacccaataattctgcccgtcacctataggaaaacaaatgttttctaaagccaaaatcaggccacctgcaccaacaaagttctgtttgaagaagcaggttggaaaagtgtggtctcctcctccatatgttgggactttaaagacatttcaatgtttatagagagagtgggaatggaaggtttgaaactggaacattccatttagaatatctgatgtccacacccataggacactatgaaatggacacaaggggatacaagaagaagaaataatttaaagtctatccaagctattggctcatgtgcagctgggctctcctattcatgccctgacagctggggcctctcttggtgcaaagtcctaaagtggttttcagcatatagactcacaagcattcaattactagctactgatcatccattgtgtgccaggcagagtgctaggcactgggtgtacaggagcaaaccagaaaaccagcagatatgctctaaaagctgcttcccagagggatgaataggaggtaaacacgcaaagggatgacggtgttgggaagcaggcgcaagtgaggacagtgttccagaaagtggggagagaatgagcaccctcagaagggaaggaacagggtcccctctgggaacagaaccagctgagggatgaaaacaacagactgggctactctttcttgtctgactgctctcacctgtaggttggggtgatgggggaggctttttggggacaaccctctttttcttgtgcttcttcaccagctctggactctgtttttcctccagtcttttgatgagtttgttgagagtggatgtgagagccagcattgcccgatcccgctctgactccttcttcagcccatctgggtccagctctttctctgtctggaatacccaagagaagagagtgagtcaagggtctggggtgtggaggcagccagcgggctgggctctgtaggagagtctgatattttgaaatggagttttgcttatcacccaggctggagtacagtggtgccgtctcggctcactgcaacctccgcctcccgggttcgagcgattctcttgcctcagccttccaaagagctgggattacaggtacccactgccatgcctggccaatttgtttgcatttttagtagagagggtttcgccatgttggccaggctggtcttgaactcctgacctcaggtgatccgctcacctcggcctcccaaagtgctgggattacaggcgtgagccaccgcgcctggccagagagtctgatatttaagtcttgtccctctctctggtcccccttccccaacagccccgattaattagggaaacagctaccacttccaagtgccccgtccttgccctgtgctgtgccctctgtttcttttagcccgtcagcctgtcctgctccacgggaccaggcggctgtggaagcaacaggaggaagagctgggcttgcctcctggatgatgttytccagttcccgctccatgccagccttcacctccraacggagccggtctcggtctgacggaagcaggatcccttccagttccttctcaaattctcccagtaactgccgttcatcctcatcttcatcctcatcctcatcctcatcctcctcttcttccatctctctctgccgttctggatcacccctttccttctctggttcccwctgagggacttctgcagcatcatccacaggctgctcttggcctatatttggcttcccctgggtgggtagggagtggggagaaagacagttggggtttcaacagagacacatggtcgggggcagacaaacagtagcaggtgtgtggtactgggggacccaggagttgagtcccaggtcagggtagtttttcaaatgctcgcagttgggaggtgggttctacccattccctaagcacggcctataccttttttgttccacctttcagctcctctatgaatcgaatcaaatccgcagggcttcgaatgactttgacctgcacgttgttctgaaaatctgagatgaaagaataataatcatgaacctgttctgttgtgtttaaattcttttttttttttttttttttttttttgagacagagtcttgcactgtcacccaagctggagcacagtggtgcaatctctgctcactgcaacctctgcctcccgggttcaagagattctcctgcctcagcctcccaagtagctgggattacaggcgcctgccaccacacccagctaatttttgtatttttagtagagatggggtttcaccatgttggccaggtttgtcttgaactcttgacctcaggtgatccacctgcctcagcctcccaaagtgctggk

SEQ ID NO: 6889 - DNA, 13110 bp, Homo sapiens
tgacactgttaagagtattcatgggatgccctgattccattacacactctttcagctgaaagtgattcgaaacgcaacattaaactgcacatttccagaatggaggagaaaatctggtacaaggtgacaaagagaaaccattcggaaaaccctttttgacagtgtatatcaatttcaaggcacagggaggaaacatccattttgttcaaaagcatcagactttgtggattctgtttggatgcagcagaagtgttcttctctttcaaaagtattagaaacgcattgttgggaaagaaagcagggcagctgagggacaagccagggttaccttaccatcgtcagaggatggctactctgtagatgctaattaatggtatcaaaaaatagctgaaaggaaaaaagtaagcttaacagcctggaatcagtttgggtgtatttcttgtcattcaattttcagaatggaaactactaaataagtctgcaaatacgatgattcatttaacaagaccccaactatgcaattaagctcctaagcaaaaatattcacaaatgatggtcaagggaaaaatatttcagatctttaagtagcagcaaaaataagtgaccactcatagagccatagctgagtcccatgttccttgctttcttcacaaccagcccagtctgtactcataccacccagaataatttctcagtgtcatattcagccactttctgtagaaacatcttagtctaccattttgctataccagcaacactcatgaaacccagtgcgccagcgcaaaattttccagatcagctaaatgcctcagtcattaatgaaaggttttcaaggtgcatatcatttctcaaaaaaaaaaaaaaagaggtctatgtgtttgttttctgtttttgaattatagtctgcataccataaaatataccctcttaaagtgatacaattcagtgttttttggtacattctcagggttgtgcaaccatcaccattatccaattccaggacattttcaaaatctgaaaaaggactccctataccctgtactttttagtagccactccccatctctccttcgttctaagcccttgcaaatactaatctactttgtctctatggattaatctattctggacatttaatatgaatggcatcatacaatacatggtctttatgactggtttcatttgctaaacagatgttttcaaggttcatccatgttacagcatgcatcaatacttcattccttcttgtggctaaataatattccatcacatgaacacattttgtttatccattcattagttggcagacatttgtgtttccattttttttgaaacagtgaataatgctgctatgaacatttgtgtacaagtttttgtgtaaatatatgttttcagttctcttgggcatatacccaggagtgaaattattgagccatatggtaaccttaactttctgaagaactaccagttagctttccaaagtgactgtacaattttatattcccaattggtaggttttagaactttctcttaaaggactctagagttcaaactagattcagatctgaaaatctcagtgatttcttattcagcacccttttaaaggcaccttgctgaaaaagttttgcctgcatgtttagatttcaatgtgtacatcacacaatgctttatttttcatctgcatcagaggatatgtattctgcttctctctagtgcagggtcaatatctaaaattcacaataccgtacggttccccagcacaaatgtatacaaccatttgttaagtgccaaatcaagcattttcttcctcatggcaagtagccagactgggtgaagccaccaaaggcatttatttttctctctactgcagtctatttatgagtaggacgaacttttctcttctttttaaagatgactgttgactacaatggctcactatttgtgtgccaagacaggtaggacttgcagagcccaggaagcaatttcttcactaataccctgcattggtcacacccttgtttgatttgtgtctgattcggacctctttacttaaaaaacagcaatgtgacggaacaactgagcagggtcccaagaagaggagtaaacacaattcaaggggtggaaaatagaagctttgaagaggctaaaggaaaagtggtattttagcctgagggaaagaatgaggaacaatctcatcacactcgccttcacgcatttaaaatgggtttattcagagaacagtgggtgaccagttcttcatgctcagagtgaaacagacaggaggaaatcacatcaaatcagtaaaattctatggttggaaaagggaaaataatttcttgatcttcacattatacatctgacgaaagctcatggatctccatccctggaattctttaaaaagatgtaaaggagctttgtctatatttgcctgccaagaatcttgaggcgtccttcactgtaatttctttatggtgctataaatcaggaactacgtctgctacatgagggcaaaaccagacccataaacaatgagatctagactgtataatgtactgagaatgtcttgcagtgtgcactgtggaagtaaacaggacctcttctttgctacatgctcctgttcaaaataagttatattacttcatgtggcagggcagggaggctcatctgtggttcatggttaggttatatgggctagatgctgcacaccagccctacctgtaaggcctctctggctctgcctggtaacagttacccggtgtcagttccttacaagcaaaggcctgggaagcccatctctcattcgttgaacataacccattaagttgggtttgggagctggctgtggtgaaatgaaaagtaatcaaagtttgcagtccaaagtcaatttcaagctatgaattaagtatactgggaaagtgagttagccactctgagaatcaattttccccacttgataaataccactttcttcagactaaatgagtatatgtatgaagggactttatagattattagtgatgctgaatgaataaattaaactcacatataagagtcagtagaatagtaatttacttggaacttcgttatttttgtgtaatgataaatgtctacaaatgggatcttaaggaactgtatgaaagaaaaaaaaattttgtgacctcacttaggctttaagaataaagtggttatctcacattttatcattaaataaaaatttaacattttgaagatttctcattgtcatttccattcatgtgttcagatccccccaacattccacagaaaagaaggaagattgacagggggattgggggcattcttgcttctcttgctcaatagctttgaaacctcactctgttcattaatattagagtctccttaacatttttccaagcatatccataatttttaattttattgtgacaaagagatacatataaaggagtcccatgccaaatccccttttcctgcaaaaattctactcaacccataatttatccaaggctcttacaactgtccaagtaaaaaatgagtctgaactatgtctgtggaaacagaaaattcttagagataacatacataatttaaaaaaattatgtgggaattaaaggagaagaaaatgcctgcaaatctgctgaggttcccagcttggacaacgaaggacgatgatgctattaacacaggagagacgagcagaagagttggtctggagaagacactgcattttgggcatttgaatttggggcatatgtgtgatgtcaggtggaggggctggtgaagacacagttggaaatgtgggagtggtgctcaggaatgaggtcagggctaaaaaagatttgtgaatagtcatgtctatatgctagttaaattataaaattgaaacaagtgttctagggaatgcatacagaaaaaggggagaaaaacaaagccgagaactgaactaacatattaagtgaaaacacagaaaaataggtctgttctctcatctaccttctaacctcagctgcctggcaaactcctcttcactgaataaatcagttaatttaggttggcctctacaacatttcctatggaacccacttctgaatgaaaacaggggacgaccaaatgaagattcctcatgctcgaaagagttcaggaaacactcttctttgtcacaggacttttctgaatctttaatatactcacgtggattgttgttctccaaaaccaggttcctttgtaacaatgcccaaatctaactaagggatgaacatctaacatctttccacctttctaccatgtgtgggtcagattcagggacggaagcatttgactgagctatagcttagggatacagtgggcttcactcttgcatcctcaccccctactcttgaagccttgttggatgtaaaatcggaactgttctgttccctcttggaaaaaggccatgacagaccatctctctctgcttccattttcttttttgagatgcacaggcagagataaagaggctgagactggtgggggcttgcctgggagaatgccaggttctctccccctctctctggctttctccattctggttattcccttaaatagttttccagataagggggatcagggcgggctcccactaacctcatttccactagttctgccttggagcttgggctttcttgttctgattcttacttgatttttgtttttgctgcttctctggaataaccttccctcatcaccaggattagaagtattattttccctctcacattgagaaggtggagaaaaaccacaggaaaaactaagtctccaaaacagataaaaatattacagaagagaatcttgctgcaataaaagggatcaaatcctctgacttcaatggattatattttagggccccaaaagtcctcaaaaatgaggctgtcacagtactgttagggatctggaaggaagggcattgaagaagagatgtggctgtggccaaagattagagataggcaaatcaggtataattttttttaacatagaagactatggattctgcactgtgagaaggagagagttggtatccagtcttgataagattctagagtaggctgaggacagtgtaatcccagcactttaggaggctgagacgggaggatcacttgagtgcaggagttcatgaccaacctggacaacatgatgagaccccgtctctagcaaaaacacaaaatattagccaggcttggtgacacatgcctgcagtcccaattactcaggaggctgaggtgagagaatggtttgagcccaggaggtagaggttgcagtgagccaagatcaagccaccactgtactctagcccaggtgagagacagacactgtccaaaaacagatactagagtagatcatgaaaggaagccttatgagggctagtgaaagaaagcagcagtcactggtggtctacctgggttccttaagagagtaagtcacctcattcccaatgcttctctcccaaaccccttccttgtccagctaaaagaaatgttaagccatagtctttacttggactttagaaatcaacagtctttcatgatcttttggttgacagtgaagaggaagggttagcacaagtaaaaataaacaaattaaaaacagtcgaaatgtaacaaaatggaagggtttccatccatgagacacttgttgtgattcagctctgtggcatggctgtcgggagagtgagggtaggttttaaggatgttatctttacaagatgggtggccttcagctctctaccacgcaggtcaattcagttctgagagatgccacatgtgaacagggaaatcacacaagaacaggccaaggagcgacctggatgatgagaggctcaagccagtgatcgtctttggatggtgagaatatcatgtctttcttttcttaatcttatttgtatatttaaattgtacataagtagctctctgctcctcccatttgacagacagccgcctcttctctctcattgacagctgcatccctgagacactacggtgaaggtgaagatcaaagtcaatggatttggttgtattgggtgcctagtcaccagggcggtttttaactctggtaaagtggatattgttgccatcaatgaccccttcattgacctcaactacatggtctgtgtgttccagtatgattttgtctgtgrcaaattccatggcactgccaaggctgagaatgggaagcttgtcatcaaygaaaatcctatcaccatcttccaggagcgagatccctccaaaatcagatggggcaatgctggtgctgagtatatcatggaatccaccggtgtcttcaccaccatggagaaggctgggactcacttgcagcrgggagccaaaagggtcatcatctctgccccttctgctgacacccccatgtctgtgatgggcatgaagcatgagaagtaatgacaacagcctcaagatcatcagcatgcctcctgtatcaccaactgcttagtgcctctggccaaggttatccatgacaactccggtatcgtggaaggactcatgaatgaccacagtccatgccatcactgccacccagaagactgtggatggcccctctgggaaactgtggtgtgacagccacggcgctctccagaacatcatccctgcctctactggtgctgctaaggttgtgggcaaggtcatccctgagctaaatgggaagttcactggcatggccttctgtgtccctactgccaatgtgtcagttgtgggcctgaactgctgtctggaaaaactgccaaatatgatgacatcaagaaggtggtgaagcaggcgtccgagaccccctcaagggcatcctgggctacactgagcaccaggttgtctcctctgattttaacagcgacatccactcttcaacctttgatgctggggatggcattgacctcaacgaccactttgtcaagctcatttcctggtatgacaatgaatttggctacagcaacagggtggtggacctcatggcccacatgacttccaaggagtaagacccctggactaccaaccccagcgagagcgagagaggaagagagaggccctcactgctgggaagtccctgccatactcagtcccccacaacactgagaatctccctttctcaagtttccatgtagaccccctgaaaagggaggggcctagagagccccaccttgtcgtgtgccattaataaagtcccctgcactcagccaaaaaaaaaaaaattgtacataagtaacatatactgcatatgtaatcacagtttttttaaacaaatgtttcatgaaggaaacatgtacatgaacgtattttgtatatttataaatatacaaaataaattcctgagggaggagagtcatcatctacaaagaggtggtccaggccagggaatactaagactcaggtgagctggtgacatttgggaatgtggtcctgaaaaggtgaagagtacttactgagaaatacaaggaaaaagtaggggaggggaaaagaaggagggcactgaatctcggaggagccaattgaacggccgaagatgacggcacgtgaaagcctaaagaactgtgggagcagcctctatagtaagctgcagagatgagagggaaagagaaagcaggatatctaaccaggaaccagttggacctaggaaagctgacttgagaggcacctgtgatgtcagcaaagatttaaccaaagccaaagacagcatctccaagggctcaaaggggaaaactctccttccagagttcacaagggacactcaatgctatgactggtccagctggaaaatgaggttggggaaagggtggatgaccagaaaatggcacccccaatgatgagactctgcagacagaaacccatggccaaagaggcactgagaggcactgtttggtcctcgtgagaagcctcagtgggttggcttttatccccatactccctcatgctctcgtagggctgggttatgaatctgaattatctgagtgtagacagtagggaacaggaaaggaggaagaacatcatggataaaatcaggagtgtgatttttgatagataaactgtttcctgtttttgctgggattagttatgccaaaagtggaaactcagcttcctgagacacctcccatttcaacacaagaaataggagaaatatttataccatggcctagtaaggctgaaaaaatcttcaggtgtgtaaaaaatattttaagttctagagaaactattatagttgcttagggtttaacttctttctcaaactgtaaaatgaaaatagaccagttcacccttagatcacaggaatgaataaaatcaatgaagagataaattcactagaagaaaacacactctagtaaattcaccagaaatgtaccatcatagatctactattttcaagtgtctttcttggggcaagtttcaagttgtaaggttgtctttacaatagaattattgaaaggcacttcctaccataacaccactccagaaaacactcggaagcagctctatcatttaagacccatgtttctgtgtcccaatttctatggacttatccaaatttacaatttcaaatgtttagcatcagtcagtaagtcacacactccacagaacaagaggctcttagaacacaattattatcttattcccattggctggtctcattcacaaccacctctcaaagaagaaaagcagatggaggcttcccacatgcaaccctttatggctccagcctggtgcaatttaggagtgaggtttagaaggaattagaaagcgcagtaatagagacagtcattgtaatttgaaacatgaatttgctgttcaaaaggctaaactggagtgcttaaagctaagtgcttaaaactaccccagaaccctaaagtaatgtaccataattacaattactttccttcaataatagatttaaaaagttaatactttcttgtgtttggctggaatcactcagtcatccattgtagttgtgagatctctttcttggaaatcaacatcttcatttggtttccacatgaataattcttggaagctacaaagtctttgaagggtatttatttttgccttgaggtctggtggcctcaaagttcacatgaacctcacagatgcaaactatctcagcatgattcatctatgcctatagcgttctcaccaaagggaggtccctgcctgtgtggggtttccatatttatactgctttgtgtgtttatttgtagttaaaattgttttcacaagtcaaataaatttaaagatgacctacaatgcacatgcatgagaaattaagccaaaactcagattcttgactgaatcactgtttgttttatcttggtggtgggacatgtgctttgcctaaacttcaaacttcttatccttctgcctccataattgcaatcatctcactctccacactggctacattttatttaaaccttccaactgtggaggaaaaaaaaggagcatctaacccaagacaggtgtcacctagacaggaactatctgagagctaagagaatttcttttctccatgaaatgctgtggtggttagtgtcaggcctctgagcccaagctaagccatcatattccctgtgacctgcacttttacatccagatggcctgaagcaactgaagatccacaaaagaagtgaaaatagccttaactgatgacattccaccattgtgatttgtttctgccccaccctaaccgatcaatgtactttgtaatctcccccacccttaagaaggttctttgtaattctccctacccttgagaatatactttgtgagatccacccactgcccgcaaaacattgctcctaactccactgcctatcccaaaacctttaagaactaacgataatccaccaccctttgctgactctcttttcggactcagcccgcctgcacccaggtgaaataaacagccatgttgctcacacaaagcctgtttggtggtctcttcacacgaacacgtgagacatttggtgccgaagactcgggtaagtgggactccttcgggagaccagtcccctgtcctcacctcactctcactccatgaagagatccacctatgacatcaggtcctcagaccaaccagcccaatgaacatctcactgattttaaatcgggtaagcggtctatttttactctcttctccaacctctctcactatccctcaacctctttctcctttcaatcttggcaccacccttcaatctctcccttctcttaagttcaattcctttcattatctggtagagacaaaggagacacattttatccgtggacccaaaattctggcactggtcacggactcgggaagacagccttcccttggtgattaatcattgcggggacgcctgcctgattattcacccacgtttcagaggtgtctgaccactcggggatgcctgccttggtctttcacccttagcagcaagcaccgcttttctggggggcaagcacccctgactccttctctccgtgtctctaccccttctccactttcctggggggcaagcacctcccactccttttccactttcctggggggtaagcacctcccaccccatttccactttcctggggggcaagcacctcccaccctgtttccactttcctggggggcaagcatctcccaccctgtttccactttcctggggggcaagcacctctcaccccttcttcactttcctggggggcaagcaccccccatcccttctctccatgtctctacccttctctttaaacttgcctccttcactatgggcaaccttccaccctccattcttccttcttctcccttagcctgtgttctcaagaacttaaaacctcttcaactctagcctgacctaaaatctaagcatcttattttcttctgcaatactgtttggccccagtacaaactcgacaatggttctaaatagccagaaaatggcacttttgatttctctgttttacaagatctagataatttttgtcgaaaaatgggcaaatggtctgaggtgcctgacgtccaggcattcttttacacattggttcctccctagtctctgctcccagtgagactcgtcccaaatctttcttctttccctcccacctgtcccttcagtcccaaccccaagtgtcactgagtcttgtgaatcttccctttctactaacccatctgacctctcacctcctccccaggctgctcctcctccggtcgctccctgccaggttgaatcaggctccaactcttcttcagcctttgctcccccaccctataacccttctattacctcccctcacacccagtctggtttacagtttcattctgcaactagctctcccccacctgctcaacaatttccgcttagagaggtggctggagctgaaggcatagtcagggtacatgtgcctttttctctatcagacctttcccaaatcagccagtgtttaggctctttctcatcagaccccactaaatatatacaggaattccaatatctaactctgtcctacaatttaacctggagcgacttaaatgtcatcctaatagttaggccaattcccagaatgactaaagaaaaataacttttcctataaaaggtgagtaaatggccaaatgacctagactagctctgaagggtaagcactgagtcccaggttaaagattacattctaaccacacaccagtcatactctgctccgggaaaaaccttaagtacttgtgaccttctgtccctaacttagatgttgtttactttcagtttacatacagtgcaaacaccagggtgtacatgattttcaagtcaaaaaagataaggactaatccagaaaggagaaggaattctgtttcatgcaggctccttgacagcagcaagagataacaaaaccacaacacaggaggctttagaaaaaaactaaataaaaagccgtaatctcaaagaagactacagccaacaataaatattaatactataaagtaaggtcctaaggactccacagttacggaggaataagggatcagaagttcatatccattatttggaagcattaagaaatgtttagattattttccattactctgtatttgaggaggaaggggaaaagctgtttcaaacctgtatgcagagtgtaatttccctggggggaaaatgggattatgtatgaaaaaaggctggaaagatatacccctaattggtaacagtggttggggaggggaggagattataggcaatttttcttttttgcctgtttatattttctacaagaaacatgacatatatctacagcaaaaactgtgtaaaaaatccttgaattttcctgctaaaattggtctatgttttgtactaaggtagagatctctaccacaaaacaccaggtggagataggcctgtttagtgcttctcattgccccagccttataggccctcatttccccataaaaaaagggatggagaagggtactgagaatctctataaaaggtagccacttataggagcgttttgcaagagtttagggagtccacacagtggagctggctggcttagtgtaataaataggctgcggtaagagtcattctaggccacagcactcatgggggcatgatctgccttaattttacccatggggaatgacacagcaaggagctggaaggcttagacatgaagactgacctctgcagactggtgtgagggaaatggacgtggctcccagaagcggctcttcccactctcaggacctgccatctgtggcctaagaccagagacccacagccaggcagagggtctcccagcacaggcccagtcagtgctccgtctgcagctcctgtcttggtagcactgccttgctgtgtgccaacaacttgggagtccctgttttagagaatctgccaagccccaagtttgcctttgggttaacccctaactacgtatggcccattttaggagttccttagagaggtttctgtcttgcacaggtggtcaggtgagtgtgcacaaagctctgtgattagaccctgtggtgaccacacctgatgtgtgcttgtccagagggggctcactgccatggagtctgtagcagtgcctggccatgagcgtcagaggcctcagcaaaggcctt

SEQ ID NO: 6890 - DNA, 303172 bp, Homo sapiens
  misc_feature (1)...(303172): n = A,T,C or G, or insertion/deletion polymorphism (see Tables 1-2)
aaaaacctcactgaaaagtaattgctttagaatttggaacaatttccaaatgacaggattatacttaaaacaatccatctaaggttgccaagggattgttttaatttcagaatcacagaggcctttaaaaacaaccataactgaggttaccagatctttgcttgaaaaaggtagggaaaaaatattttgtgatgtaaactttctatatgttgtaatgttaaagaaagtacctaatgggactgcattgctttgttactgctgtgttgtcttgggcaagtcatttataaacctcccagctgtcttcaatagtaaagtggtagtgttgtttaagagcaataaaaacaatgtttaccttggtgttgatagagcattggaaacaatgtatgtaaattcactcatcacccacagtgcagagtgctgtcattgtgcttattacctgtttattgatcatctattctgtaccaagaagaatattaagaatatacatgttattccattaattatcaagataatccaatgaggtagggattgttatcctggttgttataagcaaagaacagagaaaagaaatggcttaaaatttagatattaaaaattgatctctaaggaaaaacagatttaactagagaagagtgataataccagcccaacattagttataacatatttacaactattatctcactgaamcttgcagctattctgtgagataaggataactattttttttctacaattcgcacatcagttacaaaacagtagtttcagtataggacaatgtggacagcgtaggacatttccaaatgtttctaaattaggtgtttataatctagggaatgactgcatttcatggatgtaaaatctgtgaatactctataactctgtgctcaggaatttggtataaatttcttggttcataagaaactgtcacttacaagtaaatggttttgtttactgaagagaaatacatgtatcccccgacccccaataaatcaggtgtttccaatcagtacattcctgcatacaaaactggaatccaaactatctctgaagcaaaacaaattagtgttaactgttgtaacttcatatcctggttatgacatatatatatatcaggctatcagttttgtgtgaaggaaagacccacatgacttggtatccatattattaccaatatggatattgactgaagttagctaagccttatcagataccataggttaagaaagttggccgggcgcggtgactcatgcctgtaatcccagcactttgggaggccgaggcgggtggatcacgaggtcaggagatcgagaccatcctggctaacacagttaaaccccgtctctactaaaaatacaaacaattagccgggcgtggtggcgggcacctgtagtcccagctactcgggaggctgaggcaggagaaaggcgtgaacccgggaggtggagcttgcagtgagccgagattgcgccactgcactctagcctgggtgacagagcgagactccatctcaaaaaaaaaaaaaaaaaaaaaaagaaagaaaagaaagttctgtgtatagacaacacagattttaagggattaagtgagaaagatcttaaagaaaacggaataaaaacaacagatttggtgattcaaacagaatagtctttcttctctgaatgggatttttaaaaaggattaattgcccaccaaaccctgttacttgttaaggattaggcaaagtgctggaaatacaaagatgaataagaatattctttccctgcaggatttcactgtctaatgggaagatatatgtactaattagaatacaaggaaactagcaccataacggaggtatgagtctctagctgtgggagggatgagtcctggaaaggcatcatttgtctttcttctggactgatttccaaaggaacatttgctccctacttaaacccaaaatctctctggtgtgtgtttgtattttaatgtttttttcctgtataccctttacccagctttcctaatgttaatgtcaaaactaagaaaataacattggtactacattgcagttgttgtagctccattgtcttcaatctgtgacagttccttagtcttttttgcctttcgggaccttgacacttctaaccatatctggtatttggtcaggtactttctagaacatcttcagtttgtgtgtgacccatattttcccatgagcatactgaggtataggatttgggggaagaagacccatgtcagggggtacttaatgactagtgatgtcaaccttggtcattgcattaaggtgatttctgccaagttttttcactgtaatttattgtttcatcttttataattaataaacattttgagaggatacctgatgttttgactgaagaaattatccagagctgctgcttcccttttttttttttttttttttttttgagactgattctcactctattgcccaggttggagtgcagtggtgcgatctcagctcactgcaagctccgcctcccgggctcaagcgattctcctgcctcagcctccgagtagctgggactacaggggcccgccaccacgcctggctaatttttttgtatttttagtatagagggggtttcatcatgctggttaggctggtcgaactcctgacctcaaatgatccgcccacctcggcctcccaaagtgctgggattacaggcgtgagccaccgcgcccagccaccgccaccctcccctcccccagccccctgttcctttttttttttttttttctttgagacggagtcttgctgtgtcacccaggcgggagtgcagtggcgcgatctcggctcactgaaagcttcgcctcccgggttcatgccattctcctgcctcagcctcccaagtagctgggactacaggcgcccgccaccatgcccggctaattttttgtatttttagtagagatggggtttcaccgtgttagccaggatggtctcgatctcctggcctcgtgatctgcccgcctcggcctcccaaagtgctgggattacaggcgtgagccaccgcgcccggccctctttttttaagtcttactaatggcatagtgttatttaatattcaaaactatagtattatagacctagaaatgagattatgttgatatacagagcatctaaatataaggtctatgtatctatctcttaaatgaataagtcttcaaacccacattttccaagagaaaaaaaaacacaagagaaaatgaagggtatctattgatgtctaacaaacacattgagggtctctcagtacctgatcaatgccccttttgaatttagtaacacagatactctcagaacctatgagtacaataggtgtgaaaagcatataattttagaggtccctctaagagggatgaccacccccattttaatcagaaatttcatttccgtcttttactatagaagtatttgaaagagaacaggtatagaatttctgtttttctactgtttgcagggcaacgtttgctagcaaagctaatgacataccaagactttctcattacaggtaataattaggttatggaaaaatagtagaataatttcttacagaacactagttctgtaagtgttacagttcacaagtcttgctaatgttgccaaatttaatcttgctaaatatcctatttgagaaaaattttagaagcctaccaaaaatactaacagtagttatcccctggggaattcttttggagtcttttacatttttatttacagttctgtatatttgaattttatatattaattatttaccatgaactgttaccatgtttaaattgaaaataaatcacacaagaacaatttcaaattcctatttcaaataaatactaaagctttccaataaagtgaaatgaatggaagaccatattaaatgcaactaaaatggtcgggcgcaggtggctcacgcctctaatccctgcactttgggaggctgaggcgggcggatcacgaggtcagcagttcgagaccagtctggccaacatggtgaaaccccatctctactaaaaatacaaaaaattagctgggcgtggtggtggatgcctataatcccagctattcgggaggctgaggcaggagaattgtttgaaccgagaggcagaggttgcagtaagccgagatcacgccactgcactccagcctgggtgataagagcgaaactccatttcaaaaaaaatcaactaaaaaaatgtttatttactggaatatctgagagacaattataaaggtagttgttctacaacaaaagttttcttaaaaagacgattctaagcttatattagactcaatggataccagagaatgtggtatgttcgatgtttcaccaccacccatataatcagagatttcccattcaggagtttgcggtttaaccaagcaaaggataagaagacatatcttgcatcatttaaaacactgcacaaaataagaagaaaaggagctaagataaaattacatttatattttgtaaaaagtgatttaaaaacttcattgataggagtggcatttcactgaaagtttaaaatactgccatcttttacataattatttggtacctagtaaattagaatatctatacatgaaaaagttaaagggggaaatgtcttttaaaaagaatattatagatactgaagaaaagacatctgtgaggcttatccaggcctcacctaacagcaagaactccttgactcacaattcctcttcaaagaattggcttctccttcaacacctgggccactctccttcccaaacactgactgagaagaacgagggcctgtattctccgttgaattcagagcaagctgtttggtgcataactgcgtaagtaacaccgaattctggcaaattaaataggtaaacatgaacaggatacacgttctattgcaaagtttcccctcccccyaaaaagccaatatttaagaaatgttagccttgatgaagtattcagtttttaagatgtgttttctaacatatgatcaccaaaaatgttttatcattataagtatttattcatttttactttagcatttgagttgctatgttctacttaagcttctttcgttttataagtgcccttagataattttgcaacaatgttctgaattaaaaaaaattcaaatacgactgcatttaagtgtctagatagtaaacaaggtaagctttgaaaagatacttttgttcctaagttggaggaaaatgcatttatttgtctagatagtaaacgaggtaagctttgaaaagatacttttgttgctacgttggaggataatgcttgtataaatttatttaacaattaaatactaatggtccctgtttctttttcttttaggctagtcaagtgaagcagcgggagtggagaaagaacaaagaaatctgtaactggttgtgatcaattaattgtaaataccactgccctcagaccagcctctgatttcttaagagatcttttttcttgtgtattaagcttattctgggttcgaaataaggtttgctccatagataatgatgcatatagtggtaataaaaagaaaagtaaatcgacaaatacctagggaaaaacttttaataattctcatgcaatccgtataggcttgtttatttttaagccctggaaagtctcttacacccagtgactgctggtttccaccgcaggacttagaagcttcccaccctgattgcacctgtctcccctttcccctcctgctcccaaagtttcctttctggagggtgaaggcagcattcctcaggagtggattcttcaatccttttcccggctgcccggctccacgtgacagccgctaacacctgtaccgcctccagctcacagcgcccccatcccctccgccaggtaccgactcagccggtctccccctcccccaggaggtyacgatcccggtgcgagtctcgcttgggccggcaggggaggggctgagcaacggccaccgcagcagcctgagcccttgcagcctgattatcacatgacccggcggcagtagccgtggcagcagccgcggcggctccgcgagctcgccgggtgggctcagttcagcgcacgccggagccgagcgcagggggcggggaagggacctgctgcagctgcagccgcctgggcgctcctggagcgcgcggtgactcccccggtcggcccgctccatgcagctccgttgcggaagtgtagcggggggaggcggcggccaccgcggcactaagcacgagaggccggggctcggccccctgcagcactaggctctgggagccgcgcgcggcgcgtcccagtggcccgactcgccgtgcgcccggcgcccaccgcagcctgcatgccccgcgctgcgccttgcccggcccccgcmgcctcctgctcgcaccgctgcagccgggcgccggagtaatatgctcactcgagtgaaatctgccgtggccaatttcatgggcggcatcatggctggcagctcaggctccgagcacggcggcggcagctgcggaggctcggacctgcccctgcgtttcccctacgggcggccagagttcctggggctgtctcaggacgaggtggagtgcagcgccgaccacatcgcccgccccrtcctcatcctcaaggagactcggcggctgccctgggccactggctacgcagagtgagtgcagcgacaccggcggcgcccctgctctcctcgcggcccttccccgcacggttccagccctcttctctccctgcttctcggcctcagggctctcactagctgccggcgtccaggcctcggcggggagctctttacttacactggcyatttccctcttctccccactccctcttcccccagcccaaggacgcggcgtctccagccccggtatgggtggtggaggggtgggtggcagcgctggagcgtgggaaagctaaggtgagacaggtctgtgaatccggggtctctgtcacttggggaaaaaaaacgggcagaaaagctctgaagtttgaaacacataaggaaaatctgctatctgtacccccaccctcccaaaatatagttgacgcccccgcgtgatgaagagtttatgggggtggaggcttggaggagatgtcactgcgcctgggagcttgtgtccgattccgggaggtggccgtgtccgagtgcgtggttgtacatttccgaaggtctcagtttctctcactttcagcccgcgagttcctccgcttctcctttagcaggtagtaaaatgctgcgctttcggtaaatgccagtactatttccctcagcccttggggagggggaaacttattccaactgtctaatataacattttggtaatccgctttggtgattaagcttgcgtttgactgatcagctatttcaggaaccgactgagttaggytgacgacccagagtggaatcgggaaaggagaggtggaggattttattgcccttcccccagctccatggccacttttccactgactattaataaccatcttatgaatggtaagataagtaacgttttcccttctatctactacctcagctgtacgaaacgggaaaactaggagacatttagaatagaattcaaggttattaatgaaccagggagtgcaaaagtgcacgcaaaacctggtggctggcacacctgcgccttttcctttaaccccatcccctcggtagttttggccctcccctatccgtgcacggcctcgctggttgattggttcgtccgggaaccaatcagctcttccaatgcctgggcgccttgatgctgaccctgttctggtggcccggataccccggggcaggcttggttcccgaccctaagggttccggtgggagagactgcttggaatctgctctgcttattatctctaattctcctttccttctcccatcatcctataaagcgtttctccatgggctgaaatggaaaacgtgtataaatggggctagacgattggagtgtgaaagtgaggaggcagaaatgcgctttgatgggagctcagacagtaaaaattaacacatcataaaagatgagcacggaagagaacgttgtgggtggcgaaggtacaaaatagcattgtaacttccaagagaaagccaaagcaaaaataaacacctgtgtaaggaaagacctaaaggagaaaaaagagcctgccaaacataccaaacactatttcttgactgaaataaaaacgttatttaaaagcccatttaggccgggcgcggtggttcacgcctgtaatcgcagcactttgggaggccgaggcgggcggatcacgtgaggtcaggagttcgagaccagcctgaataacatggagaaaccctgtctctactaaaaatacaaaaattagccgggcgtggtggcgcatgcctgtaatcccagctactcgggaggctgaggcgggagaatcgcttgaacccgggaggcagagatggcagtgagccaagatcgcgccattgcactccagcctgggcaacaagagcgaaactccttctcaaaaaaaaaaaaaaaaaaaaaaagcccatttggaccctttacgagacagcaacttggaggcataccctgtggtataattgtgtagatgggggtccttgtgactgccaaacgcctgagatctgtccccactccagtgagtttcccagggcgagggcgcctgtcaaggcgagaaggaaaagcaggcaatggtgagaaagttatgagaggtaggaaagaagatactgaaacactgaaggtggaagccgtttggacacagtaaaaggaaagcctcagataagcatgagggaaaggaaagaacgaatttcagagtgtttgcatgcctatggtaggcacaggatgcaatgagacacgcatgagagagtgcttagagggctccccccatcctctctgggcctccatttccgcatccctaaaaagttaatttttttttcctagaataaaacrtgagagatattcaacttgaagcctaggaaggccactgtaaaatgttayaaattttaaagttagtggcaaaaataatacatgtgtgataattcaagcaaagacctatttaaaaaaaaaaaaaaaaagtcagcccctcttccccagccctcacctactccctaggagtaatgagggttcaatgtttgggtgatatttggctttcagacttctttggatgccctcataaatacatatcatgcgtttcttttttcttctcaaaatagactcatactaagcatattattctgtagcattttcacaaaacactatgtcattaacagtattcataagtaaacacagaattacctcattcttcttaaatatatactattggtaatggctaacatagttaatgcttactctttagtgcttatactgttttatatcatctgattttcataaaagcctaatgaggtaggcactatcatttccatattatagttgagaatacagaagcactgagtgattaagcaacttgcccagggtcaagcctgtgtgtgaacccaggcagtctgactccagagctcgcaacaccaaactcgttctctacagtagattaaattatgatgtattcatctgtacccaggaatagccactaaagtcttggccatctctctcttctcacctttaaccctgtcagataatatactgtaccgcttccttatatcttgaactgttagtttatcttcctgcaaaaatgcatcctgaatgatcaaaatggctgaaatagggaaggaaagagaaagacaagtagggactgtggctgtgatcagaagctgccaccagtaatgctgccctttcctacaggatttactgggagaagaaattctgttctctttgtactagaaggtacctgagaggggttgaataggtaggaagattgctcaaattgtggtgataagaactgtactaaggagctaatgcctgaatcagaagtgatctgtttacctctctagaaagtgagtcacgttccaagccttccttgggaggaaaaattgacatcttttggtcaatgagttaatgttgatgactgaccctttgagatggtagaaaaattaaggagaaatggtctaatcttttgccacttactgttaatccctttcaagaagagagactctataggctatagaactagagaattagccgtaagcaatccctgctagacttgaggttgcagaaactgaagattttcgttcatttcagtattcattggcattgtcctagatggaatttcccagctcttgaaaagcttcctattacagctgaaaagtttagccacttggctaaggggtatttgcaaggttgtaaagctctgtaaagcattgtagttatagataacatctactaagctaaaatctttctaaaaacatgcattagcaagttttaagtttggctttgaaatcagtggctgagcctgtttggtttgctcatttgataaagcccttggggagcaacagtctgacccagagaccaggcggcagctacttcctttctctcaaataccacccaagtggaggttggttcatttttataatgggttgggaacccattttggctttttttctttttttacctgtttgcccratttttatcctgttgatgaaacagttggtcttagagatgccagcaggcatggaatttgtgcctgaaactacagacgtagggaatgccaaagaatgtgttgtggttttgagcaacaatattgtgtatgttaatgcatcatattcaggtttttatcagtgatacatttgtttacttgtacagaaagaatacattaagtatagctaattttacttcggttatagctataactataaattttttttcctatttcttataaaagtacccctggacataagtagaaacaaaagctactttgagagtgtctgttaaatgtatatcatataagtgtatgtctcacagagttgaaaattatgaaatttttgatggaataaccttatttaaatccagccagctgcctacaggtatttggatttgttttggactctgcaggctgtctgtctccttggtcattggcactaattgcttattaccaataaatggcattagttggctgggtggtggtgaagacacaaaaaccgctatttctttcttgccccaaagctcggaaatcccctggcctttctttttcccttctaacttttcctggcatacctgcccctcttactgactgatacctctttgcagaactcctgcttggaaacttcctgtttgacttttgcaactgaagaaacttgaggttctctactcttatgtaaggataaaaaggagtgggtgagggtatctgcagatgagttacaagtccagagtagcctgagctatttcagctacctttctggtgacttgcaaaaggtattaatttcctattttaaagcagacagctaagcgttccttcatatttcagatatagcattataaagaaatcatcccccttaggtggagctcctggggatgtctcttttcttaggaaaatgcatcagcttctttcaaggactggtgatgcttcaggcaaagggtttaaccatgcaggggggtgtttactatatgtttcagtcccagtttaggtagacatccgcatctctgctatgaccccactatacagtgctttyaattaaggttacagcagtactagttgaaaatgtaaaactgcatactggaattgttgtctaaaaatacattaatgttcaagagttatttttaattctcaatgtttggtagaaataaactctggtgcctttatagttctgtgatttgcctaatttaaagggaggattagttagcttgtccccttgaatttttgctatcatttttcaggaaataatcattcatctgcttccattatttctctcaattgatgaaatcattgcactcctactatgtgtccagcattggtcccatgctggattcataatataataagacatagtcattatcctcaagaaaattttatagcataatctttccccttttgtactttctttgaaattaaattaaaatgaaatagactattaaggttcaaagggaccagcaccaggagttttgttttgattttaatgtcttaatgcttctgggtaattttaaatctcagtatttggagcctttaagtcacattagggaagcaaacttgttttttccaaccagcttatgattagctttgtacctgaaggcccaagaccttccctgctgttagagaaaaaaaattattctgacacttrttacaatgctggggaagactttactcaagtctgttgcaatataggaaaacaacccagctcaataccacgttgacagctggtacttgtaggcaaagagtagagtgtgaggggtcagtggaatggaaagttactcagcggggacattaaaccaaactcaactgacctagcaggattcttgctgaaagcagaccaaagacttgtaacatcaaaggtggggaatgaggaacttgagcaggtatcaagtttgggggattcttgctaacctgacttaacaggattcttgcttaaggaacaggattggcgccaacgttgtgacttagtagagaagagaggcctgactcaagtttggtggaggagagaatctttgtcatccttgcagatgggggagaagggggagagagtaggtgggactgcagttatttaactgtgattttcattctgacttatctgcattacttctgtgaccctccataattgactgtgtttcctactgaycatgtaaggagagcagatgcccttaattatggtgcaaaagatgcaggattgaacctaattatacaacataatgttatggcaaagagttgaggagcctttcccaagttgtttttttagataagtggttttcactagctttccagtttggtactacagtagatactttgcaaattattagcttaagaayggtatagcatttgatttgtttggcccatctcccatataccatatagtgataggattatccctatttatactttattagaggcattaaaaattgctaaatgcaatagtcatttgttgagctagtcctgtgtgtaggttctctattaagcactttatgtataaggatttaatgagatgaatgcaacgtaggtaagttatttgttcaaagtaacaaagctttttaagtggcagatcttggattcatatccagttctgtggaacgcctacctttggtggtttttcactgtgtctaatgaaatacttaaaacatttttaaccatgagatactcattataggaaattcagataatatagactagtaaaagatatgaagaacagagtgaaaaatgtttgttaattcattagccactgttagtattttagatttggtctctcagattttttatataggtatttttttaaaaaaaataaaagctgatcatatgtttacatgtcttataacatgtctccttcacttaagaatataaaatggtcccctcttcaacgtatattattttcttttttctttttcttttctttttttttttttgagacggagtttcgctcttgttgcccaggctggagtgcagtggtacgatctcggcttactgcaacctctgcctcctgggttcaagtgattctcctgcctcagcctcctgagaagctgggattacaggcgcccaccaccacacccaggtaatttttttgtatttttagtagagatgaggtttcctcatgttggccacactggtcttaaactcctgacctcaggtgatccacctgcctcagcctcccaaaatgtagggatgacaggcgtgagccaccgcacccggcctccaacatatattcttatatgtcgactgcctaatattccattgaagggcttcccattcatgaatctcccattgaacatttagrtttacttttaggcttttagtgaatatcttcatatgttttcttcagctcattcagttgtttccttatgattaatttctagacatggaaagcttggttagaagctatgcacattcacaactgtgatacatatcagattggttgtatcaattcacactgcagccagcagtgtctaccactttagtattaagcctttaatatttgtcagtgatctgatagatgaaatatacttcattgtaatctgtttgattattgaagaaaatgaataaacagatgtatatacttatatgtyatagatatttattagccatttaaatatctttttgttgttgttgttgttttttgagacagagtcttgctctgtcctgcaggctggagtgcaatggcacaatcttggctcactgcaacctccgcctcccgggtgcaagcagttctcctgcctctgcctcctgagtagctgggattacaggcatgcgccaccatgcctggctaattttgtatttttagtacagatggggtttctccatgttggtcaggctggtctcaagctcccaacctcaggtgatccgcccacctcggcctcccaaagtgctgggattacaggagtgagccaccrcacctgacccatttagagatctttttacggttttcctgtttatattcatttttctgttgagataatgtttcatatttataagagctctttatattttaaggctgttcacccttggcctattatgttktgatattttttctaacatgttcattttttaacttcattttttttctttgcaatgcaaaatttaatatttgggtggtcatacctaatctcctctatggcttctatttcatatcaggcttagaacatgtaaagtactagaataaccatcctactccttttagctacttactgcccttggttgcaactcatagaaatgcctttgagctaactttggggtggtggggggaaggaaatggtgattagataccaactgtcttatagaacccaagtataggaataacttggattttacaagggactggaaccctgaactagaaagctattcagcaacaaagtggccattctttcagtctttcaccagggcacgggtgacttctccatgccaccaacaagcaaccagaccacatcaactgtggcttcaattccaattttgaatttttgggagagagactccaatwggttcagtttgtctcagatgtccaccttctccacaggtgattatggctgccaggacccacccctgaaaatgggcagttctttaaaaaggaggtggtggtagttagggctgggcagatagtttcgaagattctactactatagataactcagtcaacaaatatttgagtaccttatttgtttcaggcacatattagaagacagatgaaatgaccaaatagacaaatgtgtcaacaggcaaatagtgtttgtgtctgaatgtgcctgctgccctgccttgcagaccttggggagctgtctaggctaggaattcaaaactgccccaaaaatgccatagaagggataaagactcaggccagctttggaactaratatggctatatggcttgaaggtttgtaccaataaatgagtattacatgttaatataagatgatgtagctcttcagccacaggggtataaacctggctagcatgacacaccagagctctgctcattgttgtttgttcatttgtttgtttttttgagatagtctcgctctgtcacccaggttgaagtgcagtggcacaatcttggctcactacaacacctgcctccccagttccagcaattctcatgcctcagcctccygagtagctatgactacaggcacatgccaccacgcctggctaatttttgtatttttagtagggacgagtttcctcatgttgcccaggctggtcttgaactcctggcctcaagtaatgcacccaccttggcctcccaaaatgctgggattgcaggtgtgagtcactgtaccccacctgctccctgttattttatttcttttgctcatctcatttgtctaggcaggtagggtaatgacagacatatttggtgaatggatgtttattttataaaacaaaagttcaacttctatagtttccccttttttaattagtctaagatatttacctttttccctttattagacatggttttaatttgatattcatctatttatattatttttgtagtttaaatgcaggtttattgagtgcatttcctttttttgagacagagtcgaatcttgctctgtcgctcaggctggagtgcagtggtgtgatccaggttcaaygcagcctctgcctcctgggttcaagcgattcctgtgcctctgcctccctagtagctgcgaccacaggcatgcgccaccacacctggctaattttttgtatttttggtagagatggggttttgccatgttggctaggctggtctcgaactcctgggctcaagtgatccacctgcctttgcctcccaaagcgctgggagtgcaggcgtgagccaccacacccggctaattgcatttcttcaatcagttgaaatctcacgttttgtagtctgctacttgtattgttatcaaatgtcatctcgggtttccctgaatattagcttacaaagaaaatgtattctgttttttcacaatattctacataaaattctgtgccggccatttggctatgagaaaagcttagaaaaaataagaccagtggatgatagtctcgaatgtagtaaattcgcatctccttatgcacttgkattatgtcactgttcacctatgtttgtgcaagcatggctgaaggactaacatcaaaattcagaaactggtttctgtaagaaatttrmtctaaatgctgagctgacagagattatgttcagaagaccagtggcagcactgaaaagtcagccatgtgggtgattcttacaagaggcttccatccctgtatgtgtaacctgggatttgttccttggataggcatcccacctatgattaagtgagtcacctttttaaccctttgagttggtgaactgcctacagttgtcgagttggctactgccccccccactctgggcctcagtttcgtcttacaaaatggggtcattgaactgcattggtagttctcagaatttttattttattctgtaaccttttatcatttcagaaatattgagaagactgacatgaggttattaactttattttgtcaagtgtggacataatcaaatctgtcatctaccatcaccagtgtttcatgaaataaaggatttttaaaaccagaagcatagaggcatataacctcagcaaaacaacagtttttaaatcaaatstagttttatgaaaatattgtttctatttttctaaattttcatggactcataaaaccatgtatttaacctgccctagaggattgccaatgccctttggggttctaaactctgtgagttcctggggttgggccaggaaccaagtgtcttgccctcagggctgaggtttttcacagtggggcctgctgcctcctttattttgattataactcggaattattttctcccccagcattttactatgaaaattttcggccaggctcagtggctcatgccagtaatcccagcactttgggagaccgaggtgggcgaatcacctgaggtcaggagctcgagaccagcttggccgatgtggtgaaacctcgtcactacttaaaatacaaaaattagccagacttggtggtacacacctgtaatcccagctactcgagaggctgaggcaggagaatcrcttgaacccgggaggcagaggttgcagtgagccgagatcsckccattgcactccagcctgggggccaagagggagactttgtcttgttaaagaaaaaacaaaaaaagaaaaaaaaattttcaaatgtgcagaaaagttgaaaccaktgtagacttaayacccatatgactgccatctagattctgtaattcacattttgttagatttgctttatcatttatctgtgtgtgtacccatttctgtgtccatccatcagtccattcttgagttatctctaagcttgtttttcctttagtgcagtggccttaatttatgcttttaagttcttttccatagaaaaatwaaaaaataagtttgagtgactttgacatcctcagttgagaaaaacagcagcaattgggtccttgtgcatggaagggccacctcagacttcagttttataacattggcccctgcaaatgctcactcagttgataagcttcccataacttagcatccacatagttgagcttcacatggggtcaaactggaaagtatctctttgctatgctcccatttaattaaattaggaaatctgcctaaaacttgaatcactcctcttttcagctggtggccaggcaggaatgctccctgaagagtactctttcaatagacttcagaatgtgttacctgaaaagtgctcatgatgaatcaagacatcactgtgttttccatacttctgaaktagagattgtccactaacagcttagggaaagcagagtacccgctcagctgctctttttctggtgtggtcagaccagctgggtcctctgaaacatgaatccatagtgcttcctttgttatactatttctgactcmgttttctctaaacggctgtaaaatttaactgcctagctgtattttctttctgtggactttatgctctcatatttaggagaaagaataagagaacaccaacttacatctctgtagctctggatgattattaaggccctggtctaatgcttaaaggtaagcatctgttatctatattcaataaaagaggaaaatgaaccccagagagaaatcaagttactttagaatcgcaggctgtcccatgaccctggtgaccatcactgaattattaaacctgaccattcattgtgtgaaattattaaaaaaaaaaaaaagacatcctatccccataaacaaaatgccacataagggaattaaatgcattttattaactcaaaggaaactaattttcaagaggctttacatkgaataaaggcatgttggcacatcaagttttgtataaaaggatacatttaacagtactttaaaatagttctattgagtatagtagtctcttaaaattatacttccttactatatgtgcgttcctaagtataacagtccaaaccttgtcaaaattactatatttttggactacaactgctattttaaaatattttaatgtttttggaaagcctgtatgtcttaaaaaccaatctgtacattttatgtagtgatgtttcttttttctaaagttaataaatacagcatgtgttttaacatcagtagctacttagaagtaaggaaatgtacttaggaattctgaataatggggcttaaatygtaagtgaggttttatgtgagtcccctgtaaaatttaatttgggagatttttttacctaagttttacttaagcagagtcaagttttttgtttgcttgtttgtcttagagatggcgtctcactgtgttgccctggctggagtgcaatagctgttcacaggcacaatcatatcaccctatgggctcaagtgatcttcccacctgaacctcccaggcagcagggaattgtgagtgggcaccaccacacttgcttcagagtcaagttttaatgggaatctttcaagttagtgaactttggggccaaaaagtgtgacagcattcagtgtagcatttatacctttgtctttggcagcatggtctcttgcggtggccatcttgagtgtgtgcatctacattgctggcttgcacaagccaggcctaatggagccttgctggatgcatggtgtaattaatcatcccagggatgtgggcagacagatcaattacttgcccagctgagaggaccaaagtggcttgtgtgctctactgtactttcagggagttgataaatagacatttaagctattaaaaaatggtgcatctttaccctgtgatcttttttgtataagtataggaaggaaaaaaatcttgtgataaattgattttttttaaaatgaaaatatkaacgggcgtggtggctcatgcctgtaatcctaggactttgggaggccgaggcgggcgggtggatcacctgagatcaggagtttgagaccagcctggccaacatggcaaaaccccatctctactaaaaatacaaaaactagctgggtgtggtagcaggtgcctgtaatcccagctacttgggaggctgaggcaggagaattgcttgaacccgggaagtggaggttgcagtgaatcaggatcactctactccactccagcctgggcgacagagtgagactctgtctcaatacataaataaataaataaatwaattaattacataaaaatgctatagattattgagtttctatatttaagtggtctgctatggtgtactaatagtcattatatgcctttttgaaaaggtgaatgttgacaaattatgttacacgcagtcagtaaaaataaaagatggagtgtaaatgttcagtaggaagcaaattgtaaggtacagtgactatgaatagcctataagagggtgccagtgaaagcaggaatgggaaaccaaactgacattaataaagaagggactattaagaattttttctttcttttttttttttttgatgccgggtgccatggctcatgcctataatcccagcactttgggaggccaatgcaggtggatcacttgagattaggagttcaagaccagcctgagcaacatagcaagacccagtctccacaaaaaaaaaaaaamaaacctcattcaggtgcacctgtggtaccagctacttgggaggctgaggtgggaggatcacctgaactaggcaggtcaaggctgcagtgagctgtgatcacactaccacactccagcttgggtgacagagtgagaccctgtctcaacaacaaaaaaaagcaattttaaaaagaggattttttgtaacataaaagaggaaatagctataatattttgttgtaaataagtaaccgaggaggatggactctaaaagatacatttgggacaaacagtaattttatcagccttttaggacagtgtttccccataaggtatggtttggagtggagccaaagagtgcgattagatgccctcttggcaattctccctgtgattattaacaatgaggctatgccacagaggaccatgctgctctgttgttagaaccaggtgtccagaactgggctggtgactcagtgcagcagcaaatgggaagaagagaagaattggcaactctgactacagcagctggtgtttatttatgtatttttttttaatcttggtgttcagctgggaatcacatgggccccatacttgaagccctgcctgtcctcttctccccattcccctgtcatcagtttagtgctgacagagactacctggccacgctgcccttttgccccttgcacaccacctgaagccttgccacctgccttgccatcctcagagggaccaccagatgtgatttgtatctggttctgggctccatgaggacttgtgctgtaaattcctcaagtcctggttcccaaccttctcaacatcatgagcccttttattatttcattttcttggatgaattccttgtgaaaaattttgtccagcaagctgtattaaataagcattaaattactyctattaaaaaaaattaaccagatacatcatatctcctaatcatgaaggtgtagtgaaaatcatattgaactgataacatttcagccaaaagcaaaggattaacctttgttaaccttgagtacttcttgcccacaatgttagtcattagcttctcccccagcccccaccccscaacatttaaaacaggttagatctcctatttctacctttccaggtcttcaaggagcctggaccacaggctaggactctctgctcacaggtttggattttttatcacctgagttaccaacaaactatactcagatgagtgtcaagatcattttgtttgggtttcagaagtgtagcmccttcctcagraacactattttaacgtccctgatgtcctctttcttgttgaaaaacagtcttttaatagttttattttcttgcyttccaaagtgctacaagttgcccgagaggcacaatgcatgtcagctgcaagtttaattaaactcatgctgagactattatttttctagcagagtttgaccctttggcaaaagtttctcttgtaaaaatttctatctccactgactgtggatgagaagaacttcaaattatctttagatgtttactaacctgtcaaagtggaggaaggcattggttagtcaggaacttasaacataaactatccatatattctatcacctgtaattagcttcgattgataatttgtgtgcacctattagtacatatctattttccaactgcgataattctacatactgatgagttttttcacttcaaatggagtcactgtcttcccatgtaaacaaatattttactctatcatttttaatagctgcattgtattctatttatggttgtaacacacattttttttccttgatgttagccaagtttttactattgaaagcagtcctgggatgaacctccttgtaggtaaatctttgctaagctataatttgaaaagtgacatttttctgggaaaaatactcaaaatggactttcctaatatttcttgtgacattatttaatagttagaaaagatcaatgtttagattgaaaattgttttgggaagtgttagctatatactttaatgtactttaccaaagtagtgttttggtgagctggacatactgattaaaaagcattattgcttcacyttaatatttaggtttcaattgcccctattttggtaccatcatgcatttactgtatgcttcacatgtcttaagaggcaaaagatacagaggttttaaccttgggaggctcacactcttcttgggaaaataagttaatgaaaaattgagaacccatgcacagcatgacagaggagtagcatggtgctggggtggcaccatgatcaataacttgaaggggcagcttgaggtagtcttggctctttcyctagccagtctgtggcttcagcaagcagcctcactttttaaatcctcagtttgcatattcataaagttaggtcatcgacttagcccttcccagctgtacagtgctgtgggagtaagtgtcataagagaagttgggtacttcttaatttctactgacttttcagtgggatatttgtatacaytacaaattaacattttttcatctgccttgtctgctttatcttaaaatctctgaatatgcattttaacaaaaagtggaagtgaattgaaaatctagttacatttgattttatgaaacaaatgtctaaatctaacagcacgaaaaaccaagtatggtgtagtggaaactaatccccttgcttagaggacagtatcctgctctccccaccctttacagcatgaagaatgagcaccaagcacaggttataatatcgtctccagaaaaaaaaatcaaaaaataaaaataaacttcagtagcctatcctgaattaaaagagactaaatgtttaggcttttctcccctaattcttttaaagtaatgtgatatgttactatattgtccagaaaggatgatttgaaatatttgcctggaagggggatatgcttcaaaatcttatcagtgaagcaaacaaaatcatggtggtgatgacaagcttttccttccactttggaatgtccattttgagacatggttctgttacagccaaattataatttgtaaggtatgtagatatctaattagggtcgactaaaagttgaaaaaatgtaaaattgaaagctcttactgacccttccaggaaaaaaagaaatgaagatcacnactagatctgatttcagccttttcatttagccccaagttgtctgtaggtgggtgacctgaggacatctacatggctgtcagaattgtgctgccacttggcacagagctaatgttctcccactttggccgttaaattgccgcagaaagcagctgcacttgatgtaattttaatcaatactttgtacttatacgtggccctgcagccacgtgtcactgtactgctctcagcatctctgacctgagtaaaggacgcagaggcttgcttgaggtttggttttgaaaattcacataagtcaaattatattttaaaagcaccaggaagcttgctttgtgacctatgtcagtgcaagacattttcataatgttcagaatggtactgttaatcagtattggttctttgtaagttgaactttcacatgctaccttttttttttttttttaagtagagggtaactagtggtctgttcatttcagatgttaagcgaccgacagctagcatcaatagctccttgaaggtcatcagggttaagtggctaaggatgaatgactgggactctgcctacatcagcttcctccctaatgtgcttttgaatattcttcaaggattgatttattacttttcagtaactccatttataccagaactgcttcagcatccatttctatagtagagttcttctgatttaagtacaattcatttaaaacagtatgctcaagtaatttttttgtcaccaaaaaaaaaaatactcttggtgtttgcacttaagtacatatcttttcctgagatatatttatttttactatatctcaaagcagtgatttacctcatcagtaaagccagttttgcagctctgttaggaatctaaatagtttattctattcagtaaatatcattggttaggtacttatagacttaaagatgaaccatctctacctaacattcacacttttcagactatattatgagacagataccaaaacagaagatgtttagattgtgttatgttattaaatggtttgatagttaagattgtttattaaagaagatgatgtatgatcaacaatgcccatatttagcaagccatattagttacaagtaaaacttaagactatttcagctcggttgacagaaaaccattcagttaactcagttttcagtcagctaacatttattaaacctcctcatggagtgtaaggaaggctctgaaggttaaaaaatatattttctattttcaaggggctcacaagttagcaggggagacattgtgtgtataactataatataataagctactgtgatgaaggcattgatcacatgtgctgggaacccagcaaatgggcacaggctggttaattctaagtttggagaaaatgggaaggggtgagcaaagctgactgactgttcgaaccctggaagaacaggttttgtgtagaggaggcacatgagggagacagcagcatgaggaaggtcatgacggtttgaaagcggctatttctgggaattagaaaaatcttttgtgactatttgtaggcctgtcagaatccccacgtggagcctgaaccacctgacactagacatacaatggttcttccttcttacagaaagagtgggtgctggtaacatttgactgctctttaggtctgccaggcatgtcctctggaacctctctgtaggattggtgattcccttcaatcatgtctgaatgatgcctctgtatttaggactcttgctgggctgctcttgggtacgcctgtatgcaatgtatccaggattgaaggggaagtgggagggactttccttctcaggtaaaacctgggatttgtcatggatggaggtcccaggtgaattcactaaggaccacaatttttgctacagaaaaggtaataatccctcatttgctggtttgatcacctggaygtttcctgcacaaactctgctgcagctgtgcccaaagccctccaaccattcctgattgaaccacgcagggagcagagccagtgctggagcagacagcagaactcctgaaggtcgcgcgtgaggcagagggctgcaggcgctgcaggcactcaccacatatgccaagaaataaagagccactgaaaccctaagccaagtttcttttgtcctgagatttctaactcattgcagttaaaaatcatccaagtaagagtccagaaggcactaactcttaacaacaacaacaaaaaacaaaaactgcatagaggcagggacagggctsaagaggtaggtttgcataagattgtgaacgcccttgtatgtcatcaaaaggaactttatttacatcataagcagtgagcagccacaaagaattttttttagtaagcaagtattgggaatgacatgaggtttatgtttgggaaaagtagcagatatgggagtgaaacagatgaagggtgaagtacaatggtgagttggagaagaggccttgttggaggctttctagatagtaaagctaatagattgtgggactgtttgggaataaggaagagagatgttagcgacatctagcgcatacccttctttctccgtgtgggcacatgggaggcttacacttctctgctccctttgtaggtagatgagtccatgtgactmgttctggccagtatatttgagcataaatgaagtgtcacttctaggctgatgcatataattgtcattggaagaccttccagtattgtcttcctcttgaatgataatggagaaggctaaatgttaacactccacacagcacgcttgtgtcttccatttctttcatttgttgtcctagcgtcctgtgtctttaaccctccatcaccttccctctcccacagatgtgctaagtcattgctattgggtaaaacaacacacttccttttccaggctgcatcaccccttcaagttactgtgtgtactattgctccctttttaagaaaatcttcccctccttgtcttagtttgtgttgctgtwaaggaataccaaaggctaggtaatttctaaagaaaaaacatttatttggctcatgattcttctggctggaagattgggcatctggcgaaagcctctggctgcttccactcatggttgaaggcaaaggacagccagcatgtgcagaggtcacatggcaagagaggaaaggaggtgccaagctccttawaacaaccagctctcaggaactaatagagtcagaactcactcattgccatgaagatgcaccaagccattcttgagagatttgactccgtgacccaaacacctcccactaggctccaatttcaacattggggatcagatttcaacctgagacttggtggggacaaaccaaactacagcactcctttatttccttccttatagaaatgtatattgggccaggcatggttgctcaygcctgtaatcccagcactttgggaggctgaggccagcgggtcacttgaggtcagaagttcgagaccagcctggccaacatggtaaaatcccatctctactaaaaatacaaagttagccaggcatggtggcgcatgcgtataatcccagctactcaggaggctggggcaggagaatcgcttgaacccgggaggcggaggttgcagtgagccgagattaaaccactgcacgccagcctggacaactgagtgaggctctgtcccaccaaaaaagaaccccccaaaaaaccagtatattgaatgcttactttgtcaaaaacttgtctgggtgccaagtacacaaagacaagacaaacctcttttcctgaagttgtctagcaggagtcccatccagccgaacaagccactgtaggaagscttccccaggacatgagtcrggagctgaaccataaagcagccagccagacagtggagagctggaaaggaaagcgagtgtgggtgcatggaagggcagrgtaggatgcgcctgggaaactgtggggtgctctccatgcattgcttccacttcagtgctacttaggaaaacgctcacctgtagtgaccttctaggtgcagatggtcactttgaaaatgtgcgcatcttccacatcctcaccgcaacagtaattgtcgctgctcactctctagtccacgaagtcttttatcctgtaacttctggggactccttcaggttctttttctagttttctcaccacattcccttttcttctcaaatctcccttaaatactgatgttccccaagctttctagaacatttcctccctttcttccccatcttcattaacaattttatccatatcactttctttggaacttgaagaatttacctatagccttgcttctcccttargctctccatggggtcccttctgctgtgatctttccttcactctgcctgcccataccatatgctttgcatgagcctgcatttatatttgttcaaaatgtgagtataaattatagtagcygtaaaggacatggtggatactccgtgcctgtggaatcatctacaaactaatggtttttgacagtgccaggtggaagcagttggataatgctgaggcttcactgtgtcaatacctaggaacagctggggaacaaatctgcttttagtttctagagctacgtcagtctgttaataaaattctcttgtaggtactctgggagtatggatatgttcccttgtccaattacattgtggtggattctttttttggttaattgccctgtagtgagttaatacctgcgtttgtcttattagctttgaaaaacaaaaaacagattgagtctgtatattgattcagacttaccttctgggatrtcatagtagaaggttaactactcttgtacattctgtacatttctgccaaatctcgtgtgatggccattaagatgctgctcaccaattctcaacttcaagtctcctcctsctgggcacactgctcttcccctcctattccttctgcctcagcaaggggtgaccctccagattgtggaagccctgtccttcctgagagaagagacacggagccaacctgaaatggacgcgtagagtgaatgaaaaataaacmtctgttactgccaccataatgtagcccgcaagttttatcagtacttagaaaagtaaagttaatggttgtttggggaatgaaggtggttctagattttactgtcctaggcagtaagttgggactgtgaagaaataattttttctgctaaatgaatrttgttagcttcataagtagtttttcactatgttatctgaatttctaattagagtcctttcatataatcaccacttttttgcgttgtaggctcaagagtattgtgaaatggatgccatctttttctkttttaattgaaagggggaaacaggtgagttcctcaaagatttaataaggaatatcagcaaatgttgccaactgttgtgaagactctgggatttaacaagaaccaagacaagacctgaggctttgagaattaaatctagcaaaggagataagcaacctaaggatcaggmgataaggggtgtcattggagtacacatgtgtgagggacaggatgagagggctamcyaaccagtgttctggtttgggggaagttttcttggggagatgacagtggttcatttcttcaaacaaaatttgttagacatctrtcctactttgtgacaggtgatggagtagatgatgggcatgcagtagagggaaagcgtggtgcctgcccttgcagagtgcacaggcaaagctaggacctgaaggatgagtgattagcaggaatcagccaacccattctctgaaagtagaaactgatgtgcaaagrctcagaaataagtaaatgctggggttgaaagatgaggctcaagaggagctggggactggaggatgggtgccctcacacactgtaagatctccaaacggacttgtcaggtaatgctgactcgtacatttaggtaattaaggtcagtaaatgaattgtacaagataacaaacatatttcttggaaatctgatatgcaagaaaaactaacagttttgagctctacctttaayttaaaaatgtgttaaagtaaaaattgccttttgggacattaaggagaacttttacatcgtagggtttaaaaatttgacaaactcgtataatttcagatcttgtcatattgttgggggaaatatctttctgatgatcacagtgccactctgctcaatttttgctagccccactcagactttggagtgccktgtagggaccacatatctgatacagatatcattagaccccctgaagaataccagtaatttacattacttctagcttttcaggtttttagctgatytgctttctaggccttgggaagtaggtagtggtggtgagatttcatggccactggagatttyctgtcccacattctcttgtttttgttcccagtttgcggagcctgccacaytgtaggtgctcaaatatttacataatttttttagtttttatcatggatctttatttaaaccttccattattatttaacagttcacctgtgagtactttgtattctgaactagagtaagcttccttgcsggcagctgctttgtatacctcagatttgctggctggtgctccaayggcttggtctgattcttcagataaaatgagtattgctagagggagataacagttgttaatgcatgggacaggcaggaggtggtgaccgtttttcttatcaagagatatcgctaagcaactgctaagcccttccttcrtcagctaattctctcagtcatggtgtgttagcctggataaagtgccataagtcaaaaggatatagacataaaaggaattttctctaaaaattgtcatcacaggcatcagatttctgaatccaatgtgctaaattatttttatacaattgacttaaatatattgyttcattaaaaaaaaagaaatagagaaaatgtccaaagaattagtatctttctctctttgaatgccctcctgccaatacctgcccctggttatgttactgaaaagttcttttgagggactgataatctttaggttattcaaacttttcctgaactacaaaagaatatgaataggcacatcttaaactgattaatataaatagacataagcatcccaatgtattcacttaatcacaatttgataatgtggcccacagcacctcgtatggtcttgtctctttctgattcccttccatcctcccctctctcctgtgctccatccacactcattcttttgcattttctccaacctgctgtcatgtttcttctccactccaggcttttcgtgcatactggttcatctgtggagaatggcctccccaccactctacctggttaactcctgcttagcctcaggtttcaacttcaatagcccttcctcgaggccatttctgaaccccaggataaattaccacctstctgcaattaatgttattaaaacctccgtaatcttcagcacaatagttggtattataattatgtcattcttcaattccacaatggtattcattataatacacactactgacttgctttaataatactttgagacrcattcttttgttcactgccacgtgcgaaggtgatgttttaagtgctggggaaatggtgagcaaagcagtctctgcccacagacarcctctattctagtgggtgaagcagataatttgcaaataaatatgtagtgtgatgacagctacctgtaagtgcagggaagagtccaaagaatgagacagacaaaaaagagggccatgctccttcacagagagtgtcagagaagagccctctagggaggttagttgttgacctgagtgaaatcagagagtgacatacatcaacagatgggggcttaagagtgtgctggccagcagaaatcagatgtgcaaggacaccaagattgggatatgcttgttgtgtttgaggaccagcagggaggtgagggtggctggggagaagggaacaaaggagagggagataggaaatgagggtccagaggagatyagatggctgaggccagtggctgctgagatggaaggtcagtgggagattttgcgcagaggaacatgggaaattgttttagaacgatggctttggccaccatgtgggaggtaaattgtagctagcaggggcaaaagcaggaaaagcagttgaaagcttttgcattactccgggtataagatgatgtcagtttgggccaggatgatagtagtggaaggaataaaatgcagtaggattctggatatagtttgaaaggaaagatgacaggattgattggtgaactgagtgagaaaaagaggagtcaaagataattccggattttcagcctgagaaactgggtgaatagtggttccattttctaatasttaagaagcccaggggatagggtggggtgggggactggtgggaactggtgtagtgttgtccttaaaggaatggtctccagagtccrttggcccaagttccaatcccaaatccacccctttaagcagatagttaatgccagttttctcatctgtaagccagggattagtcataactgataagatgcatgtgaggattaaatagataagggaaaatgtttttcttagagttgagaaaacgtggtccatagtaatttgtaattatttgtttaatatctacycactctactggaggctccttcggggtgtggtctgcatctcttttgttacccatttattccttgccatagcataaacttggcacttaagaggagtccattccttcgggtggttgcagcccctactatgatacaaaccacactttggcccctcagccagcatatttgtgccgtggacttctactcaaccttatgtgccattcttggttagttttctccacttgcataacattcagagtgcagatrgtaaataacttttggttagtaaaaatatgctttccttgggtaggattttaaaaataaaataaaaatragcaaaactcaatttctttctttctttctttyttttttttttttttgagacggagtctcgctcttgtcacccaggctggagtgcagtggcaygacctcagctcactgcaacctccatctccagggttcaagcgattctcctgcctcagcctcctaagtagctgggattacaggcgcccaccatcacgcctagctaatttttgtacttttagtagagatggggtttcaccatggctggtctcgaactcctggcctcaggtgatccgcccaccctcggcttcccaaagtgctgggattataggcatgagccaccgcacccagctgcaaaactcaatttctaatgacctgtcatgcatgcacgattttgattgtaaacaagtcaataaggagattgtcctgtactcatcgtcaatactttttaatcttrtgtactacattttaaaataaagggaatgttaatttcttttctgccttgagcttttaaaaattatcttaattgatgttgccctgatagcttcagaggctggttttaaagcctttacactctgttctgaatgtagagagagcattacaaggacagccatgagggggagaagggtactctttctgtcagcctctgggagctgcattggttgttaggcacctttttccagatctgaaactgaagtgcaggctggtatggagagcttgtcacacgtgtgtgactagtagaaaacttaggatgagttcctctttttggtacaggtacacgtttaaattctccaggtcacacagagcactattgagattcaggctggaatgatacagccttctgtgtaacaagtacttactggataaacaraggagacttagactagaacatttttatgttgcttttttgggaactgagtttcagagttgaggtttttgacttggcaattcatttgagaaagaacckctgacaggyagtcccagtaaaaagagtggggcagagaacccaaaggcagcatgggacagtggaagagcctgcagggtttggtggcaaacctgaacacaggtctgaacactcaaactgcactgatgtccttgtgcaatttgctcatttctgcagaactccattttctccattactaaaagtagggtaataatatccagctcccaagactcgtgatgatgaaatgtaatgatcatgggaatctccctctgcagtgcctggcacatgctggtgctcagtgagtgccatttgctttgttgcctttctcccatgagtgagcatttagattgcatgtcttagatggrgggtgggaagaacagggagaaagaattgtagaaataataatatcagcctttcaaaaagaaaaacattaaatttgccaggagagtagttgtcaggtataaayccaaagatttggaggtgatcgatcttgtttgatttaatccctgtaggggaaatgggtcagtggaatcttgagagtatttctcagctccattttcacccctctccacatctgaaacttcaccattgtatttcattgttctagacacatttatattcttcatcatttcagattcattttatttcaaagctataacagaaggaacgtgttgttacgctatacatgtctgattggatttatacaacaaactgaagccaggttctattgtagttcatttcccattatccccctgtcctacttttaatayggaagaactcttatcaactgtgtagcatttttatctcatatcttcttctwttgttgcctctaccttttgtttcccttggggtcatggtgatggaagaagtggataactgtgcttctgaatagtcttttatgtggagaaatacagtttactcctctggacatcatgktggtgacccactttatgtattctttaatattctaggggtttttgttcatagagagaagcacctgctactatttgtaatttagcgctcaaactattaaatttgtatctaaaatcaaactttgaaaattaatttctgaaatctgtttgaacatggattaccgacttaactcttttaacaacttaaactgcaatgttgattcttttgagccccctgacactggaaacagcacacaaagatccagtgattatgaaacataaaacatacttaaagctgttgtaaaataccaatgccatggtggttcatttgttgttcttaaacttgtctgtttactttcctaagtttgtagcaacatatattttgatagtgtccagtgttagagcaatgtgcattttgagacttttctacagtaatatagtactagtacatttccacaattacagaaactttattggagccagaaagatagtctgaccagctgataactgatctagttatttttggccatctctagcttcatcaaatccaagccactggtcatctggctaggctccattttatatttgtccacaatttgttacagcagtaagattttggagttatactttccacacaagttctagtttttttgaarcatggtgcttctcccagaatgttttcttttccaagttttgcttggctggcatctcatagtccattgtcctgtcctcctaatctttgcctggttctttgcatcatcatatggaagctaccatatgatctattactatctccattagtaagacatggaaggggtattatctcctaggatatgagggatgaagtctgtggttaatrcacctcttagaacatttagcgaattcatcatcttgacacacttcgattttctttccccctggtttttaagtatgttaaagccttcctgttattggtctactctgtcttaccgaggactagtattactaagttcctgatgttcattcttctctacttaaacggataaatatttaatagaagaaacaaaacacctagcactcttccatttattaaaataaagtggaatggatactctcttcctttcttttgtatgataacacctcattgtgtgctttatattaactttttcatgtgtgggatatcatgaaatcatgtctttcacatttagatggccttactatttttgatgcccacattgtcccatcttggctagtgatttgtcttttcatcactacccctgagctccatgaacatcttctatcttcctactagccacacgtkgagccttgccaatccytaactttccccgccccaagatatggaactaccctctaagaaaccctggcttctttctctggagaacagtttgacaccaaaatctaggtgctagttttatttaacaattacttacatgatgctcactgtgtgagatactgttctgagctctctaccaatactgtctcatttaattgttgtaacaaccctatgagatgggtactgttatctttgtcacagatgaagaaattgaagcccaggagagagaactagcttgtttagggtcacaccatgagtaagtggcagagctggaattttaacctagagggactggctctgaagccccctcttagccactatccctgttattaggagtgaatgctgctggcgtgggaaaaggctgctgtggctgttaggctacatctaggtcagagctgaaaaaaaaatggcctttaaagcttataggtttgcattgattttttctaagaaattaatatttcatatactaagatactgattttgggcacgctactattttatatactaataaggaaaagaagacattgcagacttaactgtgacacagtccacatgctgatggtcctggtgacctctgaatagctcacaccaacctccgtagctttaaaatgtctttatttcacttcaagggtggaaattcctcctgcctttactttcattgcctggcatctgacagcaatccttttgcccatatctcataacaaaacatatggcaccgttctgtctactggtcagtttcttcgtttcttagaagggcccatgaagccgtcgggtgcagcattgtaagaaaatatggcattgtgttcactgatctataagaaatatttacagggagttcgaggtcagcctgggcaatatggagaaagcccatctctacaaaaaataaaagaaaattagccaagcatcatgatgtgtgcctacggtccctgctactcagaggctgaggtgggaggattgcttgagcctgggaggtggaggttgcagtgagccaagatcatgccactgcactccagcctgggcaacagagtgagactctttctcaaagaaaaaaaaaaatttatgaagaactaattttgtaccccacagctctgtttgtgggcctttttgttactagattacttttttgttttaatgctttatgtaatgtagcctttttgaaggcttcttcaatggtatctcggttccctacaagaaataccaacagtgaatgtaattcctttgaagtgaaggcaatatgacagccttaaccatttcgacttcgtattacgtttctctatcctgttctttttatggtatgaggtttcatcagtcactaagatttgctattacagggtgactctaaaaaaataaatcgaccctttcagaaatgtattacccattaattagattaaatatgaacatcagtgtacaccaaattttgcagctgcctttctatttctcagttctcttctagaaactgaagcctcccttacaaatatattttgactgaatgttcatatataacctagttattgaataacatttattgaaatgttcaattcttttagacccccaccccactcccccaccccatggcaactagacacagtactggttacttagtacacataaggtttgcaaatcttaagtaaagttgattattcgtgtcttatgttttctgccattgaaggaattggcggtgggtggatattttccatgattttctgtctgagtgtatctaaaatcacagagttcttgtgctcagtggttaagggacacctggccctcaggcctagttgttacttaaccagaattaattttattcatcattgttattttcctgtcccttccttcaaatatcacaaaagcattaaaatatggaggatgagattgcatcgcgggtggaagtcttaaaataacatttcagggtatttctggacggtgcatgtgcttgacttcctgttgctttgtctttagccaagctctgtgttctccttttagagtttttgccactgacacgcttccaccccttcaccagctgttttatcttaatcttaaaagcattaaagaagctttcakacttgatgtggatggaggcatgtctaaagaaatgaactgcaccagctacttcaaatgggaaaaacttggaatctggtaatgtctgaatgcagtggccataaagctggactcttgccagtgtattatattttctgtccatgtgtctcaggagggggtgacaactcacatagtgagttgtccatattgggcaatataattgtgtcctccaaaaaccagcaatttgagtactaccttagtaccttgtaaaaaagcagtgatcaaatacttagtctagtggtattagttcaacccatttgatggggcagtattccatttgccataggagataggcctgtatgattgcctaaactgtggctggatgtttcaaatcacaagtgggccctccatctagagtagggcctcactgcaactatttccactatctttcttagtactactcataattattacagtcatgagagcctcaacctattattgagtccttcagtatatgccaggcattgggccaagggttatacatrtattattttaattaatccttgaagtaattcaaagtcaggattgtcaccatgtagaagaagaatggacccttagagattaaatgacttgtccaaggcctcagccaacaaggggaagagtcaggattttgactcaggtaggctacccccaggggcggggggaccccatgagagccttatcaggctgtgctgaagaaggctgagtcctgggatccagagctttgtctggaaaatgttccagtgttgggcagtcacaaacagtgctaaagtatctcaactttgtaaactgttttaaaaatcctaaatttttttaaaaagcttttatttttattatttttttattttattattattattattattattttgagttggagtcttgctcttttgcccaggctgcagtgcaatggtgcgatctcggctcactgcaacctccgcctcccgggtttaagtgattctcctgcctcagcttcccaagtagctgggatgcccaccaccacgaccggctaatttttgtatttttagtagagacggggtttcgccatgttggacaggctggtctcgaactcctgacctcgtgatctgcccacctcagtgtcccaaagtgctgggattacaggcatgggccaccgcgcctggccaaaaagcttttattttaaagtgtttcatatattggttagtcatccctctgaatcggttttagaggaaccctttaaagtaggcaaaccatgtttcagatggattatttcgtatttgttttctgttttattatcccattttattctaatcttagaagctaatgtcagaagtagtagctggtagaacttgaaggcaaggaggcttgccttcatttgaaaccaagtcctccttgcacttccctcctgcaggttcaaggacaaatggcattcaggagccccagggatgcctggagcagaggatctttctgctcaaagctacctgtcagggacttcctaccatggcacctaaaagcattttaatagtcattaattggctatcatgtataggaaggattttctttacctgttaggagtgttaagaatgtgtcccacttagagaatagctctgcttcttaaatttaacttgatagccttaacagcaagtgtgtgtgtattaatatgattgcacttttgtagaggcaatttctataaagacgtatataattttagaacaagtactattgacagtccccctcagcacaaaaacataattttacccaaaaggcctctgttgcctgaaggcacaaactgccaacatttctctttggcttgcctcagatttcatctgtgaagtggcaagcttttaatgaaactagacagtaagttccattattaatgatattcaatcttttcctccaattcaagaaacttaaaaatagaaatctgagaattaattggatttggttgatgataattgtcatttcttcattgtaaatgtaagctcacctcccaagggttttgaaaaagtgattggctgttgcccactgggaacatatggtatcagtgaatactaatattcattgtgcaacagaatgctctttgctgtgattagaaggcaccaaacttgcaggactagaatctctgctgtgttctgagcaaactacatgatgcaaaaatgtatccggytacatggaaatagaggcggmtgactctccaagttctctatgttcccagagcttgtctgggtttaagtggtggtggcagtaagggggaaagaccagagagtttagagagggtgagatctcagatgtgactcggaaattatatcatagcacatggaartagaaatatgtaggggcattgagaaaggcatgctcaaattagtccttgaactctggaaacagaatgtgtaaggtcagcatagcaattgggtatagccttgaaaccagacaccggggcttaagtcctatctgtactatgtcccctgtgacactgagcagtttcctcccctggcctggcttccctttttgtaaaatcaggaattagtatgtggattaggttagatggtataaggacaatgttggcctgtaggagatgctcagaagatattagtacctcctccayccgcattcgtttccacgtagtcctttccttttytttttttttaactactggtaagcaaattcccatttcttcttcccttctttctttattattattattattattattwcattttaagttctagggtacatgtgcacaatgtgcaggtttgttacatatgtatacatgtgccatgtcggtgtgctgcacccattaactcatcatttacattaggtatatctcctaatactatccctcccccctaccccaccccacaacaggcccctgtgtgtgaggtcccccttcctgtgtccaagggttcatgtcctttgtagggacatggatgaagctggaaacgatcattctcagcaaactatcacaaggacagaaaaccaaacaccgcatgttctcactcataggtgggaattgaacaatgagtcctttccttcttatccaaacgaggaagtcagtattcagagaaactaaatggcttgcctgagtggcagaactgagactacagctcggtgttagtccatttgagctggtataacaaaatatcacagactgggtgcttataaacaacagaaatttctcacagtattggaggctgacagtctgtgatcagggtgctggcatgggccttctcccaggttgtaaactgcagacttcctattgtgtcctacatggctgaaagagggtgaaggagctctctagggtctcttttatgagggcagtaaccccatttgtgagggcaccaccctcacctcaccttcgtaataccattgcattggaggttaggatttcaacatatcaatttggagtgaacataaacattgcctgttgcaagcctagactactttagtcctactctccaaagttactgtaatgctttacaaacgtatggggttgggctggcatgaaaccctagtgaggactgaggctgtttgagctttgttgtctttacagttgagttcagttgtgtttctttgcaaacaaataaagcctgtgtatctgtctcagcaaagctggcctgtccctgcggttctctgctgttagttaaggggcccatataaaagctctttaataactatgcacatagatattttaaaatgtcaaagtgcatcctttttaaagagaggggtgcgtctctgaggtttgtcagtcagacttttgtaaacttagccatttcctcattgatttaccatctagtttcagttatattgagtttaaatttttaattttttttagtgtttttagggatgggggtctctctrtgttgcctaggctgatctcaaactcctggcctcaagtggtcctcccaccttggcctcccaagtgtctggtattacaggtgtgagccaccacgcccagcttttgttgggctttttgatcaccagttgtcatgggcacctatcgcctttttgtgtctttccccaggctgtcagatagctaataaaaaaatacatacaaaagtgcacctaggagttttaagggaaaaagtagtcttttgtgataccattatgctatgatatatctgtttaataacatactgtataaattaaggaactagaatatgactgtaataacacgtattactgttaatatatgctattgttcccggcttcacatactgatctttgattacagtttatccctaagagtgatcaacatcccctaaccactcatgagaaatcttgatgtacacgagcctttcagtggccttcccagtgtctgaacccagtggayggctgcttctctttcagtggaaggttgactttcctgttttccttcagtaaggagtagagggtacacaaactttaatgtatgtaaattaagaaagcagattgccacagagccagagatgatcaattttgaagtttccatgagtcatacaggcattcagtaatatgtttcaggaagttgtttggagaaatgtgggttggtaattaccaaataaatttctacctctaactggctgcctttttgaggcttctttgcaagtatgcctattttctaaatttggaaaaaatctgtgtatttgagccctgaaaaagacagtctcttagcaacacgtgacaacaaagwggaacaaattaagaagtgtgttgtgatttgtgtatgtttgcactgttttgaaaaccaccctaaaggtaagtatttttaaagctgtttataacatttggtaaatttaacctaaaaagtatcaaaaccaggagtggtgtctgttctcttttcagtgcgttttttcctttgtcgccccacactgaatatttttggccacttggaggacatacgtgggcattcataattaagaattaattaaaagtgtctgcttggaggactttctgctccgtacttaattaacttaaaaacttattgccttgataaacagatggatcattttaaaagaaaaaacagagttcaccctcactttagacatctacaataattcatttagttaaccttggaagtattttgcatctattatgcatccattgacaatgaaatgcagaagtgtttattgccaccatttaaggatgattatgtgctatagtttaactcatttatgaggtgtgggtggcagcagaaggagaggacctatagtgactgttccccaagctgggctgggctggactatacagttggtaccctggcttctttaggctaagggtcagtttctttgtccagtccttcctgctggtgataggctgtttctttctgcatctctgcactattccccacttgtgatggactggcttttccccactccattacaccttctgttccccacatcacttcagtttggcagtagcccatcatggcttctcatggtgctccccgagaattcactgctctcttggtttagttcccatagttagttggcaagaccctcctgtatttcttggtttagagtcttgaaagagatcttctgcttgacccagctgaaatctttcagccaagccacaaagtcataggtagattgccatgccaaggctgggtgtccttcattgggatcccacaccattccagctattggggctgtcacacacaaggtgtacccatacatgcttcatcagrggctgaagtgtggacaaggttcttacagggtatggacacctgcttgataggtcattgtagacattgtattgtcttaatcaaaggctccaataactgtctatttcagactgttcaccaaaatcattaagtggtgtgtcttaaagatttggtgttgaattttcctttattcttccacgaaaataaaatttaaatgagtcccacagatactgcttgcctgaggctgttattagtgtatgtggcgtgaattgcaaagggctgtggttttattttatttgatttttataatgggggagggcacaagggagtagggaaaaaacactggcaatttttttttattatactttaagttctagggtacatgtgcacaatgtgcaggtttgtcacatatgtatacatgtgccatgtttgtgtgctgcacccattaactcgtcatttacattaggtatttttcctaatgttatccctcccccctccccccaccccgcaacaggccccggtgtgtgatgttccccaccctgtgtccaagtgttctcattgttcaattcccacctgcgagtgagaatatgtgatacttggttttctgtccttgtgatagtttgctcaaaatgatggtttccagcttcatccatgtccctacaaaggacatgaactcatccttttttatgactgcatagtattccatagtgtatrtgtgccacattttcttaatccagtctatcattgatggacatttgggttggttccaagtctttgctattgtgaatagtgccgcaataaacatatgtgagcatgtgtctttatagcagcatgatttataagcctttgggtatatacccggtaatrggatggctgggtcaaatggtatttctagttctagatccttgaggaatcgccacactgtcttccacaatggytgaactagtttacagtcccaccaacagtgtaaaagygttcctatttctccacatcctttccagcacctgttgtttcctgactttttaacgatctccattctaactggtgtgagatggtacctcactgtggttttgatttgcatttctctgatggccagtgatgatgagcattttttcatatgtctgttggctgcataaatgtcttcttttgagaagtgtctgttcatrtccttcrcccactttttgatggggttgtttgattttttcttgtaaatttgtttaagttctttgtaggttctggatattagccctttgtcagatgggtagattgcaaaaattttctcccattctgtaggttgcctgttcactctgatggtagtttcttttgctgtgcagaagctctttagtttacttagatcccatttgtctattttggcttttcttgccattgcttttggtgttgtagtcatgaagtccttgcccataacactggcaatttttttaatgcttggaagcaaacatcgttgcaataattagccggtattcacatcatctgaataagctagtttgtgaaacacaaagggaatagacattttgttaccaaatgtagctgataatagaaatgcatttccctaggctactgattctctaatgtgtatcagaatcacctatagggcttattaaactattatttgcttggtagttctgggtgggtctcttagtctatttattttgttataaaggaatacctgaggctgggtaatttataaagaaaggaggtttagttggctcatggttctgcaggctgtacaagaagcatggctccagcacctgctccacttctgatgagggcctcaggctgcttccactcatggtggaaggcaaaggggagcctgcatatgcacagatcagatggcgtgagaggaagagagtaagtgagtgcaagtgcagaggaggcccccaggctcttttcaacaaccagttattrcaggaatgaagagaagtcactcactcccttgagaattccaccaatctatttgtgagggatctgctcccatggcccaaacacctcccaccatgccccacattcaacattggggatcaratttcaatatgagacttggtggggtcaaacaaacaaaccctatgcaaaccgtagcagtagggcagtagaatttgctttctaatgagtcccaggtgctgctgctgctgttggtctaagcactacacattgagaaccactaccctgtgcccctggccttcaaacataggcacttataggtttgggcagtgattgtcattgaacttgtccatttagggtcatctttccaaaatgaaccaataccaccattgagttgcatgtaaaaatcacattaaaggggatatctccttaattctttctgagactattggcttgccctctcttctatgttcagtaaatattcagtatctcttktataccaagcccagtgctaagtcccgctggtgataaagaggacacatagtggaactgctctggggatgccccgctaaatagacgggggtgttgctgaaacacaaaaaaagaatggagttatgaagttcctcctatcttcattttccttcttcagatcctgtgctgaccttcctttctgaagatggagatgaataactagaataaacaactgatgctggtaactttaacagtaactatataaaaacaattatgcagatatacttaagttttacaaagttgccatgcagcccccaacaataaaaattgtattttaatatattgcaatcrtattatttggtagggcttaatacctttcaaaccatttttgtgtgttttattgaatctgaactcctgggctcaattgagccttcctctttggcctcccaacatgtggagattaaaggcgtgagccayggcgcctagcaaatttgaacttatgaataagcctttcaaataggataggcattacatcttttggaaagactgaaacacagacaaggtggtatgcctaccatttrtccagtgctatgctaaggactgcatacttttatgtctaatatttttaaatctgggaggtaggttgtattgtccctgttttatagatgaggacayggaacagctaagagtataagtatcttaccaaagctaatttgaggcagaacctggatgtttcctgggatttgttttggggcktttgtccttttcactgcagccatctactctctgatacaaccctactttcaatatacatactaggagagttccttgttaacacgaggagcaacgttctcatctaaatacctttttgggtcttggctactgtatattcttgcccttgccttttatcccaactcttcctttgctgtcacccctataaaaagcccttctcccttttggttccatgcctgggagctcctatcctggggcctctgccacggaagttattcccgtcatctattgctgagtttaaaacactcccaacttagtgacttaaacacaaccatttatttgatcatgagcctgcagttttgatggggttcaatgagatggcttgtctctgctctacattgtattgtcaggagtcgcttaggtggctgcatttagctgagagcttggctgtggctggaccatccaagggggctttattcgcacgtctagctagtgtgaagctgtaatggctgatgtctggctgagcctctctctccacctggtctcttctcattcaatagtgtggcccagagattgggaacattttctgaaaaagaccagtgttaaaggctgaattgtgtcccccaaaattcatatgttgaagtcctaacccctagtacctcagaatgtgactatatttggagatagggcctttaaagaggtaattcagattaaatgaacgcggggtgtggtggttcacacctgtaatcctagcactttgggaggctgaggcaggtggatcacttgaggccagaagctcaagaccaacctgggcaacatggtaaaccttgtctttacctgaaaaagaaaaaccacaccccctcccccccgcacacacacatattagccaggcatggtggcatgcatctgtagtcccagctacctgggaggctgaagtggcaggattgcttgagcccaggaaatagaggctgcagtgagccatgatcatgtcattgcacttcagctagggcaacagagtgaaaccctgtctcagaaaaaaaaaggttaaatgaggtcaagtgggccctaattcattatgactcaatatgactgatatccttataagaaaaggagattagtacacagacatgcagacagggaagaccaccttcaaggagagaggcctcagaagaaataaactctgctgacatcttgatgttggacttttagcctccagaactgtgaaggtacaaatttatgttgttgaagccactgagtctgtggtattttgttaaggcaaccctagcaaataaatacagccagttagtaaatactttaggcctcatagctttggggcccatacgatctctgtcacatattttcttattttaaaactcttttaaaatatgaaagctatccttagctcagaggcagtataaaaacagaccagatttgacccactggaccatagttcaccaaccccttctctagactgtagcccaagcttcttaatacttgagcttaaagtctcagaatctcacttctgccatgttctgttgctgaaagcaagtcacaagtgagggaccaggactttgtttcttgatgggaggaatggcatgtctatacagagatgggaggaatttctgatgtccatttttggaaatgatttttttacataaattaaaggagtatccacttatgccttacttttgaaatgtacatttgcccccacattttaatttctctgaaatcaggatgtatttactgttgatagcatcttatcaccattgactagatggcaatgataagtcattgtcattatgtgagcttgtgcaaatttggacataacaattgtgttgatgtatactgttggtaaacacatattgagtttagttgcatataaaatatcttcaaatattttaaattgtgactcaaaatttaaaaacgggtttatatgtgtagaaagttatagaagtagagcaacaggatgtaaatttgggattagtgaagcaaatttttgtacaagaatgacctcagttgctatttttgcaaagaagcaaccaggaactgtggagggcctgaggcagaagacaagtagctgaagctgtgttacagagttatggcaaaagtattgcgtcctaggtgacaaattatgcaactgaaagcaggaaaaattggtagatctcttcaaagagatgaaaggaatttcaaagcagtaagaggctggtatgtccaattcataggttacacaggactgttgttgaagcgtagaacatcaatttatcaaacttcctgctgactttgaactgtagctacttattttctagtgatttaactgggaaaaaaagttgaatttagacagataggaaatgctgataaaaactcagtgtgctttaaaaggctgtaaattttttttgaaatgttaaaggtactacagagatcaaaggcatgagcagaggctgtgaaaagtttctgtgatactttgcacaattggtggtggctgaaagttgtagccataagttaatcataaactgcaaaacaattcctaagagttcttacccaaagatgttatcgtttatctacacgcctgcacatacacatgcacacacacacttcagccaaactgaagaagaaatgactcagtagtctggaacagatgtcccagagcccccatataactcacccagtatataggttcttgatcgctttcacagatgtgtatctgaacagtaaaraatatattcactgaagagtatagtgatccacttgtaattctttcggcaagactcgacaactgmtaaccttgtggcacttttagtcaccaaagatatgagtcttagttattctaaaggccctctgtcgtgatactaggtaagaacaaaaaagcaccagcctcaaaactggcatattgagtataggacagctagaaaaatgtcccagagacaatagtggagcatatgatggaagaaatggacattagcatctgagttaaaatgattgagaagaggcaaactgggcaggtgaagatgtgttaagaaaatcttggccaacttattttaattttcatgtaggtacatggttgacacatggaaaaatctaattatctaaaagcttcttcaataattgtaaatgaaaagaaagcattgtatcagtttacttggctttcttagcagtctgtaaactaatggttcatcttattggttgatcttagactggataaatgtaccaggcactgagccttttatgattgctgcttttatggagtttcccatataggtrtgatatgagtatttccattcgtatatggaatgcattttcccagagagagtgtgtaacaagattatgaagaacttacatcacttttaaggaaaaatatgctctagaattcaaacagccaagtctttttttttttttttttttttgagagtcttgctctgttgcccagactggagtgcaatggcgtgatcttggctcactgcaacctccacctcctgggatcaagcgattctcctgtctcagcatcccaagtagctgggattacaggcgcccaccaccacgcccggctaattttgatattttgagtagagatgggatttcamcatgttagtcaggctggtcctgaactcctgcctcaggtgagccgcctgccttggcctcccaaagtgctggggttacaggcatgagtcaccacgcctggccttcaaacagtcaagtcttaaaggagttaagtgttagacatgttttcttgctgtttcattcatatatatatatrtgtgtgtgtgtgtgtgtgtgtgtgtgtgtgtgtgtgtatacacacacacgaaatgatattatatatattcccaatcaataagtgttgactccattaatcacttattgaaagatttcaaaataacgtgatgtttttcagttgctaatagctgtttacctttcggggctgctaaaacttaccctcaattctttcataacaatgtctacagatggtaaatgttcaggaacccttttatttttcaaatagactttattttttagaacagatttaggttcacaacaaaattgagcagaaagcacagagatttcccatattcactcaacccacacacaaaattggcacgatcattgktcactgcagtcttgaccttccaggctcaagcgttcctcccacttcrgcctcctgagtagttgagactacaggtgtgcacaaccacacctggcttatttttttgtttgtaagatggggttgcaccaatgttgcccaggctggtctcaaatacctgggmtcaagcgatccttcyacttcagcctcctaaagtgctgggattacaggcatgagccaccggcatgtccaacctggaacactttttaatatgtttatttgccttctgtttatctttggtgagatgcctgataargtctttggcccattttctaatcaggctgtttttttattgttgagttttaagagttcttagtatgttttcaataataatcctttaccagatatgtctttggcaaatattttctgccagtctgtggtttgtctctccattttcttgacagtgtctattgcagagcagaaatcttaattttaataaagtctagcttatcaattwtttctttcagagatcgtacctttgacattgtattttaaaactcattgccaaactcaaggccacgtagattttctactacgttattttctagaagttttatagttttgtgttttaaatttaggtttgcgattcatttcaaattaatttttgtgaaatgtgtaaaatctgtgtctagagtcatttttttgcatgtggatttctagttgttccagcacggtttgttgaaaagattatctgtgctccattgtattgctcttgctcctttgtcaaagatcagttgactgtatttatgtgggtctatttctgggctctgtcttctgttccgttggtctactggtatttgttcatttgccaacactagacgttcttgataaatgyaactttacattatatttttatatatatattttttaaatttttttagagacaggatcttgctatgttaccccagatggacttgaactcctgggctcaagtaatctctcgcctcagccttgtgagtagttaggactatagcaagtacacaccacagtgcccagctataagtcttgaagtcaggtagtgtcagccctctttgttcttcttcttccttcagtattgtattgattattctgggtcttttgccttcccatttaaactttaggatcagtttgtcagtatccacaaaataatgtgctgaaattttgattggaattgcattgagtatgtagatcaagttgggaatatctgatatcatgacaatattgggtcttccaagaacctcttgattttgattttgaaattctgactgtggaatggaagtgggttaagactgcaggtggacaggcagctaactcttgggcctggtttctaatcagtttgggccacagtttctaaagagtcattgctagggattctaggtagtttagtttgacaaccatgggcatagtttaccacaaaccctcctttatgtcatacgcaactttttgaagttccacattagtgttaaagaatgcgagctctggaatctctctggaggttcctaattctggcttcgtcaccttgcatcactcacaagactttagccaagtatcctctcaattgtaaaatggacttaattgtggggatcaaatgggaaaatctgggtaaatgcctgtaaagttgcttgtatatccttgttttaccttatattccattctctcctctccccgacccttatccagacttcctccctaacttgcccttgaaactgttttttataatgtcaccagtgacttccgtgttacaaaatacaggggttccttgcaagattatttatttagcagtattatagctccatggcccacttcctccttgaaacacccttttcttaygttggcatctctgacgatagtttcttggttttcttctgtcttcctgggatgctgtgtctgaagtttcctttgctggctcttcctttgtctgaacaaccagggcttgtttctcggttccagtcttttttattccagtgtctctaaataccattcataggtagatggtgaccaaatgtgtgtccccagccctgagttccagacccttgactgaaacaactactggacgactccccttggcttcttcctcatgggcagagctctgaattttcaatgcctttgttccctttcctgtaaytcctgcctctccctccattttataaatttcagcaaatggtgccaccatccacctagttgatgaagtggatactcaggctctgttctttgtctcatcatcatccccctcatcagcgtgttcttttgtctccacctctgaaacatatgccataatcatcctcttctctccatcttcactacagcctcttctggactcctaactgcttttcctgcatccattcataccacattcagctcccagaatgatcttgaaaaatgtcagatcatgtcgctcatgcttgmatgcccttctgtggcttctaggtccttgaccaccttgaggagcattgccacccagctccagtcaccctggcttcatttctgttctctaaccatgcaaacttgcctccacttcagacctttgcagttgctctcccctcagcctggaacactgccattgcctttgccagtgggtacctccttgtcttacaggtctgagttcagatgtgctctttgtggccctccatgaccatcacctatatttagtacaagtctacccttcccccaatgcagtcgtatcttcctccttgtcttccctgtgcataccactatttgaaatcacctcgctcattatttacttatttattgtctggtttcccacaaataaaataagcaccatgagagcagggtccttggctgtctgattcagtataatattcttagaatctaaaacagcctagcacttagtatagtgcttaataaatatgtcaagtgaataaacaaatgcaattaaggctcctagcatcatgcctggtacattaataactgctcaataagcattggcaattgtcacttgaacatgaaaacgtgttttacatgtccgtcattaggctggctagattcctaaggagcagcaaggtccacatcttagatatctttgtattccaaagtctagtactgtaactgacacatggtagatgtttaagaaagatttgtttcatacatgaacttttggaagctgcacttttgttaattggacacactctatgcaactctgtgaccacttctcttaccctgtactaccagtgtattttctgccttcatctcacttggcctgtctgtggaaatgtctactgtccctctgtctcagccggtgagaaacatggcacctccctctttctccacatccagtctactggccggagtccttgtatacagcttcttaatggagtccccattcattcttcggccagttctctgtctcacttcctgtccccctgtacagcagtgcttcctcatttctggcttagatagccacttttaggtaggcaggctggtcttcccatcgctttcccctccagcctacctgccaccgggttttgctttctaaatgccaacatgattccatcctttactgagttaaaaccgcagtggcaaaccctttgtttcagcagttctggcccttaccaggctttctcatgcctttctctctgcataaattgagtttttaaagatttgaaaagtcccaaatattctgtatgtgacaactatttaaagacattcctgtgatgaaataattgtgttgagctgcttaccctgatttgtcacttctgataatgaaatactttggagtgaaattttagaagttttgtgaattagttaaatttcttctgattgattgacatttctggtaacatcttgcagccagcaaggttagaaaataaggtcttatgcattcatagatattctctgaggaggtgtagacattcctaacagagtgactagatgctttcagtgctactgttcagtttctgctgtttattgttaaaaaaaaaatacagcacttttccaaccatagaattttaatcggataatccagttatatgagattgtacacatccaaaatgcacaaaataacttggattaacaccttattctttgagagcatagtacatagttttgtaaattacctataacagagggtatctccaattaacagagatttggtactcagaagttatatagagactgtgtgtgcacatgtgtctgatgtgatgcttgcttactaaagatagtcatggcgtagagtgtcagaaaccatatgagatataaaggcccaaagacaatagtgatgaaacgtttaaaaagcaactgggctaaccaaaggcagtgcactggtgagaaactttatacttgaaaaaatattgactgtagatgtatagtagcctttcacatagcctttttgtaagggttatcttgaattctggactattcacctttatttaaggtaaagcagtagcactgtggtgttctgtaagrcttatctcactaatttgatttgatgtgtgactttagagaagttttatagccctgatgttactataagcaggtgaaatgatacctgakatttcatgaactggcaaattcaacatagcaacataagccagaagagaagatggcacagatatgcaaattattgtgttaattcacagcacatgagtattccatgttttaaaatttttcagtttgagatacagaaaaatgacaaaaatcattcagtattttcctgtttccacagttgttaacgtcttacataaacatagtataatgatcaaaactaagaaattgacatgagtacctatggtaggcagaattataagttgacccccaagattccagccctctactgtgtgtgccctgtgtaatccccttgagtgtgggcaggacttgtgaatatgatggactagcacactgtgattgtggtacattatatggtagaagggattttgctgtgtaactaaggtttctcatcagtagactctgagtattcaaaagggagtttatcccaggtgggcctgacctaatcagatgagcccttatgagagacaagaagcagcagccaaccctcttttgctgtcctagcaacagggaagagccctgttgtgaactgcctaaggaaggagccaggtgtcctctaggagctgagaccaatagccaacaagaaaacagggccctctgatatggtttggctgtgtccccacccaaatctcaacttgaattgtatctcctagaattcccatgtgttgtgggagggacccagggggagatcattgaaccatgggggctggtcttgcctgtgctattctcgtgatagtgaataagtctcatgagatctgatgggtttatcaggggtttctacttttgcttcttccctattttcttttgtcgccaccatgtaagaagtgcctttcacctcccgccatgattctgaggcctccccagccatgtggaactgtaagtccaattaaacctctttttcttcccagactcgggtgtgtctttatcagcagcatgaaaatagactaatacaccctcaatactgcagctgcaaggaactgagttctgccagcagccaggatgaacttgaaagtgaacctcaatctccaaatgagaaccttgatgtgccgacaccttaattttagttttgtgagattcaactctaccatgcccaaatttctgacctacagaaacaagataataaacatgtgttgtaagtttgtgtaaattgttacctagtagtagaaaaccaatacacaataccrtataactactattaactaaagtatgagctttgttcagaaccagcttttccactgtcttgtcttctgttccaggatccacccattcctaataggtctyttatttttaataaatcaaggtgaaattacacctgatatttcttttttttcttttctctctttctttctttctttttttttttttttttgatayggagtttcattcttgttgcccaggctggagtgcagtggcatgatctcagctcaccrcagcctctgcctctggggttcaagygattctcctacctcagcttcccaaatagctgggattacaggcacctgccactatgcctgactattttttttttttttcwttttggtgcttttgtcaagacaggatttcaccatgtcggccaggctggtctcgaactcttgacctcaggtgatctgtctgcctcagcctctcaagtgctgggattacaggtttgagtcaccgtgcccagyctatacttcatatttcgtgataagcaatcaactagtacaaattcagtatctgtaagagatttcatctcactgatttgccagggacgggggtcaccaggcagtgtaatctgaacatttgagttcaagtttggtcacattaatagtgtgtggtgtgattccctctgggacttttgtctgtttgttctcatctcttttgtctgtttgttctcatctctgtckaaggggcctctccaggtgacttgtcacgtgcatgcgaagctgtaacagaatactgagaatctaagaaatagacctyagactctgttgtcttttttcttcttctaatgacacagaatccagctgtctgagaagratgcaattatgtgaggaaatgcctcctgctggcactaattcctgagctttgaattgttggtttgggtcctggcaaggtatttttgaaaactcaaactgccatataatcaggatagttgactctatcctcagtgcattcattttacaagtgacaaagtggagactgttratggtgcacaggttttccacgatcagaatctaggctttcttgcttctagtatgttcttactacaagcaggttagtcttttcaaacatggtttgccgtattgctcatgttagagatcratggtcaggtttgggtgctatgttgatgtaatttatccaagggtcatgaatatttatattgtgccctgccaatacttcatgccctgctttgaggttctgggaggctttctaacttgggactcagaatctacttcatgagaagcttcaaaagcatctagtactgcaccctaactcagattaaaggccactgagtccattgatccactcatggagcccgggggtaatgggtgggggcagtactggttcagctgggagtcccgagttcctgcttcataagaccccactactccatggctggttacggtggcctgtcagcatccygtgttcagaggaagcagattagcaacttctccccatcccttgtatgtctgagaggtgagctgcaggtaggcagaagtgagcaggatggaggagggtggtatgagaagctcctttcttctrtaataccagattcagggctaggtgctgggctagyaaaaacagtttctgacctcaagaagtatacattttagtggaggttactcacagaaataaataaatatactacagtgattctttctgaggagtgaaacatttcacaggagagctatttaggctgagtttcagaggttgaataggcctttgctaaacagatggggctggggagtggcggtgggggtggagggtggccataccaagcagaagcagctgcacgtgcaaaggcactgaggcatgaaaccgcactgggggtatatgtgagacagtttggaaaattgctcagtatttctaaggaatttttaaacagaagtgacatcagacttgcatttctgaaataaagcaatatttctattataaaaataccagaaagcacagaaaacaacaaagaagaaatacttgacccgggtttgggtttgcccttctgttgactcccttagggaccctgcaggacctagcttaccattttggaacgtggagcaaggagaatggtgctttgtccttgcaacgaaagggatacaagtgggacagccccactctgcccctgtttccaaggactcttgggctgcgtctgatccaagtctctagctctgtccattcctagaagctgctagaggtgcatctgggactggaggggctttaaatatgtggtttttacaattacatgttatctggctttggggttctcgaaaggtcagtgccctggggcaaagccttggctgcctgccccagctctagcacctgttatacctctcaccacacaggatagactttgcgtagctactcaatctggtatgtaaagcctctgtagggtggcaaaacagggactgtccagtctacaatctccagactctagcagggcacctggcacatagtgtatagatgcttagcaatcatttattgaatgagttgaagagtttcaatacacagagttcatcaccatagcttaatatattccctcatcttttgcatatgtatagatttactttcattttatttattagtattgttggacagtttccagtatttgacttactttgtttttgagaaatgtctgaattatttggcatgtttcttggatttttttaggacaaaaccctgatagtctagaattgtgctgttaaatatgtagctggtagctactagattggacaggacagatctagaacatgtccatcatagaagcttctgttgaacaaggctgatctggagagtggattggtgaagagggaaaccagaggcagggagaccagtgtaggtgggttttgcattatgccaagcaagcgatggcagctggaactaaggcattgaccctgtttctggagaggagggattraatcagagaactattgaagagatggaatcaacttgatttgagctgaggtgaggagggaagaggaaacattgatgtcagggtttgtcagggttcaaccagagaaacagaacaagtagctacaaagtgartatgtgggtatctagatatgtatgaattaaagggatgcattgcaaggaattggcttatgcaattgagaactggctaggcaatttggaatcccataggctgaatcttgttgcccacaggtaggaagcaattctttttcctccctttctcctgcaacattctttctctttctttttcttcccccctcccccttccttcctgtcttctttcccttttctctttttatctctctctcctctctgccttccactgattatcagcttatttagcataatctcctataaagtcacctgattagggactttaattacatctgcaaaatcccttcacagcagcacctagattcatgttggattgcatatttgagtgagtgtatgtgggtgctacagacggccayatctcccttccatctaccaactttcaggagaaggtcttccttgtagcccaccctaatcagaaacatactagaaagggaattatggggatattgtttagcctggccaaaatgacaccacaaagccatcacagatgactcccagttttcttaactagggcaactttgtgccttcttatgttagatcactgagattggagttacaaggggacaccattcgagggtggaggggagtaactgatgagttctgtggcttgctgaagttctgaagtgcctgtggaccatcatgtatcctgctcasgaacgtgggtccaagagctcattaggagtctgggctgcagacacagaggatggttccccaacatatgcatggtagttagaaccaggtgactccactcggtggatcwtctggggtagcagggcgagcacctggagaagggaatgttcacacataaggggttgaggaaggaagagagaaaaacaggctkagctacttagaaatgttttgaggtggagctgagcacgggacaagtgaaagaattgtggtggcataagtctgcagaatgacacaattttctcttcccagcctggggaggagcagatgaggccagctttacagctgattcccagtcagaggaagacacaaggagaatggaatcgggagtgctgatggagggtaatcacgacgtgcactgggggaaatcagattgtctcccctcaagtgtataagtgtgcatgcctttatggtgcagcttccaggctgggggttgcaaactcaagtgcctgctgggttctggcaggcaggggaagccccccgatctagtcttggggctcagcaagggttcacaaagaaataatggaagttacaatctctgagatgtgtagtaattggccaaatgaagagggcacctaataccctgccccmacaatcatcctggccaaacttgatctttgcaaattaattcattgactttgttagagcagtatttcacaatgcaggctgctctcaattgggaagatgtctgttttctactaaattacatctaaattatatcagagaggtatttatgtgtgtgtgtatatgcmtatgtatacatgtataattgttctattttaacaacttttttctctctctctcctttcaatgagcatgcttaagtcagagtaaaattcattttccaaaggtcagcttttaaagtttgtaggttttgaaaaataaagatcttcaataatataatttggcagacctgtagacatttgcctgtggcataaatgactttagaatagagtgtctaatccaggctgtctaccctagttgcccagcacaatcacctgaggcatatttcagaaatgctaaagctgacccaacttcccagagattccaatttaattagtgtgcagaggcgcctggccagcaataccagttttaagcactacagaayattctttttttatttttttaattttttattattattattatactttaagttctagggtacatgtgcacaacctgcaagtttgttacatagttatacatgtgccatgtcggtttgctgcacccatcaactcgtcatttacactaggtatttctcctaacgctatccctcccccaacctcccgtaccccaacaggccccagtgtgggatgttcccctccctgtgtccatgtgttctcattgttcaactcccacttatgactgagaacatgtggtgtttggttttctgtccttatgatattttgctgagaatgatggtttccagcttcatccgtgtccctaaaaagggcatgaactcatccttttttatggctgcatagtattccatggtatatatgtgccatattttctttatccagtctatctttggtggacatttgggttggttccaagtctttgctattgtgaatagtgctgcaataaacatacatgaagcactacagaatattctaatgtgcaaccagaattgaacccctggtttattcatatcgtttacatctattttgargaggagagaagatccaccacagcctccagaggaggatagagaaggaaaatagcgaaagaaacacttcctgctaaacggtgactcattgggacctcctgctctcgcccccacctagagggtaagacgttagtacaaattgactagaccaagcctatatggtgaaaatggattctgttcaaaatcagcttccaacagagcagaatccacttgccatcgcaggtgctctgaacgagggaaaatatttttatctcacagataccttcaatcagtagttttctttttttttctttttttgagacggagtcttgccctgtcacccaggctggagtgcagtggcgcgatctctgctcacagcaacctccgccttacggattcaagccattctcctgccttagcctcccgagtaattgggactacaggtgcgtgtcaccacatctggccaatttttgtatttttagtagagatggggtttcgccatgttggccaggctggtctcgaactcctgacctcaagtgatccacctgcctcggcctcccagagtgctgggattacaggcatgagccaccatgcctggcctcttttttttttttttttttttttttttttaagcrtaatcattgtttcaaacaaaatcttagaactccaacccctaccctscagccaccatcctcccatgggaccctttttaggactggtaggattccttaaaacacactttaaaaaccagaccatcaagtgttaaagctacttctgtcttgagtaaaaactaaaattagcaaaaaatagtatcaaattgaaaccagctgttctataagaggaatcaaaccatggtgtattatttcctcctgagattttcttctcagatagtgccctgggtagattctttccatctccatcgtgtgccacaccctgatgggggtcaaagcggggatgaagaacatgtttccttttcagtayaggtaacattttaaaaatagaaacaggcattgagaacaaagtagaatttagtattagacattaaaatagagggcttcaggctgggcgcggtggctcacgcctgtaatcccagcactttgggaggccgaggtgggtggatcacgaggtcaggagatcgagaccatcctggctaacatggtgaaacccccatctctactaaaaatacaaaaaattagccgggcgtggtggcgggcgcctgtagtctcagcaactcaggaggctgagacaggagaatggtgtgaaccctggaggcggagcttgcagtgagccgagaytgtgctactgcactccagcctggacgatagagcgagaccccgcctcaaaaaagaaaaaataaagagggcttctgccttacctctttcttctttatttaaaatgtctgggcaagctttcctgcaaatacaaaataatagtcattgactgggagttgaatgtctaatagtgcaaacctctgaatcattcctgtgtgttctcctggtttcactcagcaaatgtggatgtgaatcattcattcacccagtgtggctgtgccaggtggaacagaatgctttaagattgcaagcagtccggggtctgagaggggatatctgccgggccacttaacagccatatgacttttttggtttgcttcatctcaaaaatgaggaaaatcatatatatttcatggagagttcagagaatagagagagagagtacatcgagtgttcagcagagttggtaagctcaactgatgttaattactattaccgtatcgcgtggtaccttggaacaaaatgcttttgaaggagctcgggcagtgatgctagaagcagatgttgagcgctcagccgagagcactgactgctcygtaggtgaggggcccccaatctctgcagaaagtgcttagtgcctcactgcaggagcatgccttcatactatctcatggtctgtgttcaatatcaggaagcctttgcagatggccctggtgcatctgcggacacaacagccatgaaaacagcccataatagcaggctgctcacacagtataagtcctgggaggaggatactgccaagatttttaaagatctggccaagaatacgcctccagagtggctatctcagactgagcatagactgtatttctaattagagcaaaatatgcgtaccctaggtcagtgaacacaataacttttttttctgagattagagactgcaagaaataaattgggcaacagtgtgtttgtaggggcagaaagaactgaaacttgtacgtaagatgggcgcaagtgccgactggagcctgttccaattcttgctgaaggaaagccataatgtgggtgtgtgcttaaaaaatagtatgtggcagctacatcattggattcaacaccttcggcaactgggtacaatggagaaaactgatcactgaacttacataacgggatgttgggtttgtaagggactactaaggtggctaaattcagccagtcttttccacattatttctgtgaagtggcactcagcccccattggaagcctcaaatgatggtgaactcagacttttgggcaacactgtttcaccttgttcagctgrtttccgctcttggggccagttctacgtcctggggacctatactgtacataccctctcccatctgactgcatataatttcaaaacagctctcctgcccacttgtgttttcttttcctaagttgracatcctcgtgtgtcatggttttaagtctttttaccatcttgattacttgccttcataggttagtttttctctactccttttatgggtagcattaagcactgaatgcatcattaacaaatggcctgatttgccttgaatagagcaaaattatggatctccaccttcatcttcctaaatcaggcttccatcaatgaagcctaaggtttgctagagctctgggtgacagcatactaagcatacttgtctgctgacatctgtagagatggttttgttttgtctttctgatagtttaactagcatctcctaaatttctgctctccgtgtatttgtacactttgtttttagatctcaaatccatgccttttattgatccttattttaatttttcagcatgtacagattatcagatcctgatttggttggacaggaagttcactaccaccctgggcttcatcctaaccagagatgtgagaatcttgccttctgtgttaccattcaagttgcagcttgtgcctgccaggcaagagctgagtgaaggggtctttggcaaggcttgagccagcccccatcttcattagcatgctgtggacatgctcattattagaacagttctccaagttgttcaatcccaatataccatctagtcaacaggaatatcatgagaaccttcacagaggccttagtgatgcccagttctccctaattccttccttaaatttcaccaacagtggatcagtaataaaatttccaagttgttgaaaagaagcataaaaccatgccaggtgacatgaacccattttgaaccagcccagtgctcttttataatcttttgattaatcttggactttcgttctgccttaccaatgttcatttcttcctttctatctaaagaaaattttctttaaagaagctgaatggaagtttccttaaccccaagcaccagaaatactccatccttgatttgctatatagaaaaatattcatggtattttaacgagcccattcctaaagcctaattttgttgtctgaatgatttctgtaatcctcagttcattcttgtctttgggtttctgagtgaatgtacctttcctcgccatcctctttcttacattcaccctgtaagggtgaatcgaagtatttccttcaatttgccttcctaaggtytagtgtgaccttttaagatcagagcaagctcactggtttccatagcaacactcacttttcttctgattaggatttttggggggaattgcctagtaagaacttctaagcttcgtgaacactcttgttttagaatttcatgtcccagaaccatgtccctgttgcctgagaacttccaacctaagctttaccactcactggttgtgtgacccaagatggtttcctctaagcaaggaacaataagacttctcccaggcttgaatccatgtataaatataaaagagggtcctactaatgcttacgtactgaatggccatctgctgccctggaggcagtgcctgttggaactcagctttggccaagagaacccttgccctttggcagaagacaggcatcagaatagttgcaatttggtggtgagttttgcgactctctcctatgtgtcccttccactccttggttctcatgttatagaaacccaagggtgagtgttcagtgttacacaatttggtattgagactgaaaatggcgagacagtttgtttttcattcttacattaacataaagcacggaagctatataaacgtgtctgggctgttcttaagacaatgccatctgaatttcctttgaaagaaaaagacatttgaaatcatgcctatatggatgagaatgtttatcactttgggtcttggactttcctaagcagggaaaaatctctgaccttaggaaatggttctcagcagtcttgattcagctgtgtcctagtttcttagatcccaattcttggtaatagcttaggaaggttgttgcagtggtctttggggagtgccttctctatttggctcaaagtaatatggagacagctaaccattaaaaaaaaaaatggtagctggctgccacaacaagctggagaaacttactgtctcttgactttagatgtatgccctgtttttaaattttctttgagggtaagatgttaaaggtgtatcctgggcctcttggatcatgatgcagtccctggatcctttggatttaacaaccaagctttgttctcctttgaaagtcactcttatccatttatatttccactcttctgtgccagccttgcctgggacactgtcatggtctaagtgtcattcacctgtcactcttatctccctgcaatttatattctggactagacagtggctgaaatgcacttttaagaatgtaagtcagattataacattcccttgtgaaaagtcttcagtggcttcttgcatttcgggataaaaacattctttacagtctagggtggggctcatgatctgcctgtggaatatctcattagctgcatctcctagcacactgtccctctgccaagtgattttttttgcctcagggcctttgcatatatttccccctgcaaggaccctcctctccttcctcacttggttgactgcatgcctaagcttaaatgtaacctcctcagagaagttctatctaacgttctcatctaagttagggctccttgttacattctttagtagtcgttattttcccttaggcaattatcgtaatttgtaattatctccttaaactttgtcctcacaaactggcaaatttatagggctaaagaccgtttttatttattcccgtccccacaaacttttacacagcctgatgcatcatatataattaaatatttgctgaatgaatatataggtgaatgggttagtgcgagtcctctcaccaaatgtggtaaaatggaacctgctctgggatygcagtaatgacatggatctgggctctgatctgccattcagcaactttgtaactttcacctccctgtgtttcagttgtcttttgcttcagtgggggataattaccttgacttgccttgggagatgttgtaaagattaaatgagtcattttgtaggtgaacattctcgggactgcaaggtagagtgccttcttgtccttaacgtcattgctttgccctgtgatatcccagatcatgactagcagaaggtaacaggaactgaaggatctggaactaggctagcacagaagcttggagacagagcaggtgccagcacaaaaggtgcgcatgtgtgtagttgaggatgtacagagctgtggggttatcctaggcagtagcctgtgctaaggtcccatttggatgtaagacaggtactaatgcttagtcttaccaattattttaccatttccatgtggaggctatgtgacagagtaggaagacacccaactcagatgagttatatcaaaatagagtcctaaccctgccactaaccaggtctgtggccttagaaacacatttaacctctgtttttttgcttccttattataaaatagaaattaaaaaagtagtatttttcttgccagtcttaaagggttgttatggggaagtattgaatgaaatttatagtgaaatgtataaacatgctttgaaaatgtgtaaggtattatatgcagaaagtagtatttagattcaaaattgtggaagaatgcatttaactgtctaatgtgccttctttgcacatactttatatataaatttcctggaaatacattttagttgaataatttcatttgcagttagagtacttatgaatgtagtaaatattatatgttgatttgtaaaagaatttccacacatcctgattggtctaagggtagtatattttgatcaacatttgccagcaaaagagccactcttaccatgtttgcatggtgactgctaaaacatatgcaaatataattattctttcaacacagaaatcatgcatttagaatataaaatccattatagagagattgagctagaaaatgtgcctctagctaacaccatctgagtagactaccacctactgacatcaatcgattttaagccataccagaagttagtatcttagtgaaaaaaatgccatcatattccatctatgccatttgtaaaattcattgtgattttaggagaattgaaatgctagaagtagatcttagaatcaagaacacatcctgtcttgttcttytggttagtgttatatcttggttgctagagcatcacaggctgtaatgtagcatctagaaccatgggcacttcttactttcctcagaacaccactgttgtactctcacgatgctgtcaaccctgcagtacttctgtctcttgataggrattaaaatgctttccttagatatgtgagatttcaggctagaacagaaaatgattgaagttgtcttcttctaattaacatgtttatacctcatctcagaaattctgatgagattacaaaagccacacattaaactttaggtttatggagaaacatttggctagaaackgaatgctgtatttattttcatagatccaggtttcaaaagcttagtgagagcttagagcaggactttgtaaatcctgaaagttaatattctgtgacccactgtaagagttacagatgccacagacctgccctgtgcyatccatgtgttcttttttgtttttgtttttaattgagrtatgatttatatgccgtacagttcacccatttaagatatacaattttggccaggcatggtggctcacacctgtaatctcagcacttygggaggccaaggagggcrgattgcttgagcttatgagttcgacaccagcctgggcaacatggcaaaaccctgtctctaccaaaaatacaaaaaactagccagatgtggtgacacatgcctgtagtcccagctacttgggaggctgagatgggaggatggcttgaatccaggaggtggaggttgcagtgagccaagatggcaccagtaccctccagcatggacaacagagtgagaccctatctcaaaaaaaaaaaaaaaaaaaaagtaccacagttcggtggttttcaatatattcacaaggttgtctaaccactaccactaattctagaactttttatcaccccaaaaagaaacactgtatttattagcagtaactactccccattctctgcctcccctatgcactaaccactaatctacttgctgtctctatggatttgcctattctgaacatttcatataaatagactcatataacatcgttttttttgtctagcttctttcacttagcatagtattttcaagattcatccatgttgtagcatggatctgtacttcctttttatggctgaataatattccattgtatggatatatcacattttatttatccattcaccagttgatagatatttgggctgctgtcactctttggctgttatgaacattaatgtacaagtttttgtgtgaacatgttttcagttctcttgggtacatacctaggagtggaattgctagatcttatgatgtatatttaactttttcaggaattgccaaactgttttccaaagtggctgcaccattttaccttcccaccaccagtgataagggttctaatttctccacatccacascaacacttgttattgtatctttttttataatacccagcccagtgggtgtgaagtggtatttcattgtggttttgatatgcatttccctaatgactaaagatgttgagcatttttccmtgtgcttattggccatttgtatgtttctttgcaaaaacgtctattcacatcctttgtccgtatgttctataagagtctaatattagcattaagtccctgggtgttccagtctaagaacaaacctgtcatcctcccatattccctcctaatccattaagagaaccattctgtcctgtcgacaaagccagaaaccagagaatcttcttttctcccctattcagcatgtctaatctgtgattgtgtcccctaaattctttctctttagtatctttcaaatccattcttttctccatttccacccatttccgctgtcaccatgttgcttcaggctgtcctctcatttctcttgaaaaactgaaatgacctcttcattgatctccctacctacagtcagcctctcatctctcttctgctttgtctggagcaaaatctgattgctaaaaacccctctatggttacccaaattctgtagtctaatggccagcctcctaaaatgagctgcaaggccctggctccatcccttttcactagtgcacaatttcgtcaaattcgagtccaagattagattcttctctggatgccctccctgactcaaggcatctccaatctcagctttgcttcctctccgtttctcccacaatacctccccatatttttgtcatagagtttatttcactgcactatgtaattactgtggatgtcctaccctcccttctgcttttgatagttcctgggattagagtagcacttcaagtgtttgttcaacaagtatctrttgaacatctgcaatatgccaggccctgtgttgggtactgggagcatctaaacatggtcctgctcctcgatgaaggattgggaaggcctctctctgaggcactgtaaggcaacctgtaaaaagtgaacagaagtcagctgagaaaagagttgggggtaagagtgactcacacacatggtacagcatgtttgaaggccttgaagttaaaaatattatgatgtgtttgaagaaaaagaccagagagtagactcagaggaagcattcttgaggctgtgatggaggcaggggttagctcatacacggtttcaggccaggttacggaactttgaattttatcccaagtgcattgagaagtccttgcaaggactttgagcgggagatgggatgttgtcatgctcctgttttaagttagaatatccacagagagatcttttatgtggtagtggttttgaaggacagcaaggcttggaggcagggaaccagctaagaatgtagcatagaggcagtgtgtctagtggctaagttgtagtttctgaagtcacattgcctgcatccaaatcctccctctgttactctaggaccttgggcaagtgcttcagtttgcacatctataaaatggtaccattaatattacatgcccctttgaattctgaggattaagtgaatttatatgtgtaaakaatttagaataaatcttaaaatgaatgaagtgtcaaatataaaaacatttgaaagtaaaagattttaaatgactttaataagagtactaaaacattatttgtaatacataaataaatgataaaatgaaaatactgtgaaaacaaatccataagagaaactccaggaagatggttgttttcattgcaatgtacctttatacccttgttcttaatatctaaagccacatatagggtattgrtgaatcagtgtatgacatcatatacagcaaggtgtacctccagaggcacaagtcatgttgttatctgtgtgactgtgtgtacttcgcagcacrtagtgggtacagcacacagtgggtacagtgagtggttcagaccaggtctgggagtcatttacacctggtttttatccaggttcttctagttttggctgtgtaactctggacaagttttacaggcttagggaacctcagcttcttaagtgagaaattgggtatcctgaggaactcattggagattgagggtgttagatgacaatgcgcaaacagccctgtgcgtagtgtttgcaccatcgtgcgcacccatttgtgtgccagtggctgctgccatgtttttttatcatctctgaagcagttcttttccccattggcacttccgtatctcaagttatgcatcttctcctgtgcatatttgtacagggtattgtaatattcttgaggtaagtgtaaacagctcttaaaagtaaaaattaaaatttgagctcatttcctgctgagaattagttgctacagaaacagtgaatgtttcagtagcggtcaataagatggtgttcagtggatgccgtcctwgtttttaaaatccagctgtgggtttatctatttgggggaggggcaagtgtgggatctgctgctctttaacccaggttcttcactgccagagcagagacaattctgcctgagtcgccgaggcagggaaggctttgtggatggccctagcaggmagcgggctccagcttgcgacctacacgttgttcaggctcagatgttacatggtctttacagggaatctataacaaatccttaatttccagatgctattaagggggatgtagattgagcagaacagaccatggtgtcatacacctggcttctaagaagtctgattggccttgaactgttcttggtattaagaaaactgctttcaatccttggtagcacactgcaggtttaggacaagccagggsaggagggcagttatcatgcatttggcagccttttggtaacctacactgctctcaaccttgtcgaagtcccacagtcctattacatcttgttagacatggtgagacactgagacgatagtgacaaaatgaaaaacataaccaaccctctggaagcaccccagaacgtaatatgggcatttacaccagctgctgtgatgcccatgaaaaggcaatgcattttgctcctaacactggtttttgggcatcataagcaaattccaaaagaacatttgctttctttgctggataaatgtactcataagtcaagaccatcctggctaacacggtgaaaccccgtttytactaaaaatacagaaaaaaaaaaatagccaggtgtggtggcaggcacctgtagtcccagctatttgggaggctgaggcaggagaatggcgtgaatccgggaggcggagcttgcagtgagccgagatcgcgccactgcactccagcctgggtgacagagtgagactctgtctcaaaaaaaaaaaaaaaaaaaaaaaaaaaaaaatagtgctcataaratgtatttcaggagaggaagctactttaaagtcattgtatcagctatgatgaratcctagcgtgttttgtttccctgcggttatatttagcactaatatgggtctatgggaggaggcaggaaggtgaattcagaaggaaagtaggtaagagggcaaaacaatcaaaggggaaagtttaaagatacaaagtttgaaggaccattgctctggtgtaaaatagaattttcagcacttctaatgtgcagtaagtgactgataaagtaaatgactgattatctgaagtgaggaccatggagataaaggcattgaagctatgacttagcattagattagcacagacagatgaaagtgtcagccaaatttaatgctccaaatccagatcctgtattaataataaactcttcataatcaggagacaggttacaaattaccatgcactgtcttaagttctgtaagcattcgaggatcaactcagctttttggtacatttttctgggttgtgaatgagccacaggaaaggctggaactggaggtatttcttgaataaacatttgtggaatgcctgctgtatgtgaaaccttgaggcaggagggggaaagcatggggtgtggggtggaagggagcagggtagagaaatactgattaagactggccttgaaggagctcatccctagggatgagcgtcatggactcaattctaagtgacagaatggagaaaggggaacagtgctgtactagttatctattgctgtacaggttatcccagtctcagtggcctaaaacaagtatttattatgtcacactgtttctgtgggtcaggaatctgggagcggcttatctgggtatttctggctcagcctctcatgaggttcccatcctgatattagctggagtcataggcatctgaagatttgactggtgctggaggatcctatctgaaatggctcactcctgtggttggccagttagtgctagtttttggtaggaaacctcagttctttgccgtgtgccctcatgacatagtagctgacttcctcgtggtgaatgatccaaaagagcaaagaggaagccttgatgtcttttaccacctgtttacacactcttcctgccaccatattttataaactagatgcaagtcattaagtcttgcccacacttaggagggagggaattaggcttcactttttgaagggatggatgtcaaggaatttgtgaacaggctttaaaaccaccagaggggataagtgtagatgtcaggaagtaccaaagtcagtgctccaaaccctagtcctggaggaaytggacaggctctttacctcccagtgggatagcaagacatcaaaaggacagggtcggggagccctgctgagatcaagggacacaggaagaagagagtaaaaaaacagcttgacacaagtctcttggctttccctcttmgcagtttcttactccaatgacacccctcccacatctgacataactagactgcttggaagagaatgcttggagttcaccacagacgttggcttgtataaatgcatgctgagaaaaagctcttttgctgagctggaagtttagggaatttataaactgagctgggacccaatagtcgctgtggctacttatgcattaagtggttactactggtcaagaacaatttgggtgtttaactgggtcttatagggagtctgaaaaatatactttttaatattctctttacctagaaagagaaacctgttagaagtgagccctttaggccaggcatggtggctcaggcctgtaatcccagcactgtgggaggccaaggcaggtggatcatttgatcccagggttcgagaccagcctgggcaacatggcaaaaccccatctctactagaaataaaaaaaattagcaggacgtggtggcacatgcctgtagtcccagctactcaggaggctgagacatgagaatagcttgagcccgggagacggaggttaagtgagacctttaataatctagaagagattttaaaaaaatgacaaagggccagaaaaaatgatccagagagaatacagttggaattcaagtgagggtgaagttcctagtgggaaggtttgagagcagggaggtcaaaactaggagctgaaccctgaagggcatgtggagactagagagacagaggaggggaggatattacagacagtgacggtgatggggtggagggaaggaaccacatgaataaatgtgtctctggatggcagtttgtgggatggttggaagccagctgcttggacagagagttattctggggagctgaggagatctggtgacgtctttctgaaaagcttggaccagatccttgtcaggctactaaataaaatgaaaggacaccttcttaggaggggcttctttgcaatccctccctagtgacagacatagtcttcactcttaattggagagaatgagcaaaaggaaaaataattatccacaggatttggccagccagccaagtgctctttccctctgccgagagagaattcatttggccctaatgaggagtggacatttaagtattattggcagtttatcatttctcattgtgattgctcaaattatcatcttaaagcttcacctttaaaaagtaataatcctaaaatagtctattgaggccttttggacttcaaaagtattttcaaaggtcatgcaggggaaacagtttactcaaatttgtgccatttcttgtaggcttagcttaagggaacttgagttgcatattgaaagcaagtttctcataaaaacattttactcatattgtacctgtgtgtgtgaatctgttccactattattatgtgataattctagctttaagaatgactgctttgatttaagaagttctcagtgggaagataaagtggttaagggttaaagagaggtttggatttccaaatctaattttcctgcatgaatttcaatattaaaaaagttttcatatatctacgtatattttgttcctgcaacataaaagtaacttggttgttctaaactgacagcaatgctaaatatcctgcaatcctgcaaagctaaaattctatatagcagacaaaaccagcaagtgctcattgcacagttcacaaattctggtggcatgagaatgtcagctaagtggccagtcactctaggttcatgttatcttctttaaatataatgcctatttctgatttttttaaaccaatattagttcttaccttacaagttatgtaccatgcttcaacagtaatgccatacccaactttattactgcaaacttgctttgtagaagcgcccaccttcttactttacctgtagaccagccttttgtagccttggcactaatgacattttgggtgggctaatttttgttgtcgagggctgtcttgcacattacaggatgtttgccagcatccctgggctctgcccactagatgcctgtagcacccttacctggctgctgcaaccaaactgtcttcagacattgtcaaatatcccctgcagtagaaccagtrctctaaacttaaagtgttggtgctagcagataaatgtgcaaaatgagattataacaatgatgtggatgaatggagctagaaaagatccttatgtctcatggttagatttattgctttgccagtttttatcaagagcctcgataatggaaaaagcattgggaatgaaattaggatacctgaattctgctgacaaattgggcagtggtcttagwcatatttagtgactgtgtttcctgtgtctgtcaaatgagaaaatatccctgaacccttttccagctttaaaattaaacccacttttttcctgaaattcagttctcccttttcattcaccttgatggtacggtgtaagacaatagcaaccctatagtgcctatagtaagagtcagattaactcttacttaacaagcaaatttaaaaatttccaaacttaggcttatggagaatgacagtattgcctctacayatttgctttcttttggggaacactaattgttatattaccttatgtgtgaaagtgagtccattgaaaattcacttgtgggaaatggaatataggtratcaacaatttagccatagtattagayacccttttgcattttgaatgagtatctctgaataggaatatgtggcctataaagtccacatttgtgaataatggggtgtggttaaagttataatcatttttacttaaacagctctgggccaggcacagtcgctcatgcctgtaatcccaacactttgggaggtgagagcagggggattgcttgagcccaggagtttgagaccagtcttggcaacatggtgagacccccatctctacaaaaaaaaaaagtcagaaaaattagccaggtgtagtggcacgcacctgcggtcccagctatgctggaggctgaggtggaaggatcacytgggcccaggaggtggaggttgcagtgaattgagatcacgccactgcactccagcctgggtgatggagtgagcctctgtctaaaaacaaaaacaaacaaaaacagctctgtaagtggaagcaatgctgtataatataatttctgtgaatttaaaactttgagtgattcttagggttatttgatattattctaccttggagagcaaaaatctccatttaaaaatgtattgaattttcactaaagcatttttaaaagattgaaatgatgtctgttaaattagatgataaaggataaattggtgttttactatatctctgcctttcatatataaaagaatgattggaatctctgactaatggattttctcagcacattttttaaagttgattatgccatgagtcatatatttctaaatatgatattaaagtgctgcctctctttgctacttctaggtttgtttcatcagagaagatagatgtctgtacatatctgttaaagctgtacaccaaattcacaaagattcttttacatttctttttattccaagttttttcaatttcagccctctagaaatgacattcaaagaggcatgggttatgtcatcaaaacaaagtctttgaaagaggcctaaggatcatatatcattcatgcatctgaaagccttgaagactcgatagatgctcagaagtaytcaagtcagtttgcctctcgcagacattcaagtttatttaggtcacagccttatatgtagtgaaaagcccttatatctgttttttcatgcaaaaacctctctcaaaggccttgttttccagctaatcactctcactgtcatcttctgaccattagaactcttgcctctcctggggccagtagccatcttatatcctaacccccgacttctccatcttcctactttccagtggattctgtttaagatttcatcctttttaggtcagcagcccgctctctgggtctgtcatgatctttgctctctgcacaattttccaggtagaaaactctagggcagagtttctctgcaatttggtgtattagatctcagaaggctttagggtaacacaggaaatgttggtgaccagatttgcgcataagcattatttgcacataagcattatttggtttgggccagatttgcacataagcattattttgtttggcccacrttgtattttcaaaaatctagaaatttttcataatacagattcttggctttccttgaaatgcctggagacttggtaacactgagccatattcccaggcagctggagctgtgtacaagctgcccctttagaagggacacatgctctccagcttgctgcaagcaccacggtgccctagatacagcattctggcccaggaaatgtttgggtctatgccctgcttaagggaatgagacttactgattccttccaggaagtcttagcggtgagggttcgtttcctcacctgcctctttctctataaccatatggcttctgttctggaattaaacgatctattactgggagtaaaatggagaataagacatgtatttgaatatacaaagtgtgcaatgtgtctgacgaggagaaagcaacctgcaaaaagtcatagaaagtcaatagagccagaaatatttaaacaaatagaaaaggggatggctataaatgtcaactgaagctaatcatctgttgtcagctccatgtctgaagattctgtagtttaaatgaaactgttagtattaactacttactgtttccaggacttgaaacttgtgatttgttggaatgtttaattttagtgcttcctaatgctagccggcatttgctgagagactgctgctgtgccaggcattttgcagaatctctgtctaatcctcaaaaatgcctggaaggaaggtggttatggtagctccgattcagaggagagaaatgaggcccatagcttattttgctagtaaagaagcaagtgggattttaacctagtctagttcaatttttaagctgatgctaatctcaataaatctcactgcctgtcttagtttccaatatcgtcttactcgtattacattttgttgccattaggcaggtctgagactcagttttcttatctagaagaagggaggtgtaatgcctgctcttcctgccacataggagtgttgagtgttaaggaagatgatgcatctggaagtgctgggtaaatgataaaacacgaaataagagacagtgcagtttcattttcccacacccagtcagtgttaagccatgttcatccaacaaccccattgtttctgtggcgaggaaacttaatagcaacaattcaaactgctgtaaatcggagcaggggatattggaatatgattctttagaaggcagaggttatagtgatgttgtaaatttaatctttacgcttggaaggaggagcaccaaggcatgctgagcctttcaacactgagttgtaggagatgcgtcagggattcagtacgtcataatcagggttatcaccatatgaccttrgacaacttggagaattttctacagttcattttcttcatctgaaagatgaaacagtttatataaatcattttcaaagtctgacttctgcttttcccataattatcagtttagrtgacatagagctttgtgcctgttttgtttcttgattttttaaatggatatatattaagatctttaggcttgaaaggtatactttcaaggttttgattgttgattcttttcaacatcccctgtaatatggtttggctgtgtccccacccaaatctcatcttgaattgtagttcctataatccccatgtgtcatgagagggacccggtagggtaattgaatcgtgggggtggttacccccatgctgtctgcatgatagtgagttctcacgagatctaatggtaatggttttataagggactttcccccctttgctttgcactcctccttcccaccaccatgtgaagaaggatgtatttgcttctccttctgactcgattgtaggcttcctgaggcctccccagccatgtggaactgtgagtcaattaaacctgttttttaaataaattacccagtctcggatatttcttcatagcagcatgagaacagattatcctcacgtcttcacctccccagaagacaagcacacatgcctactttctctttcagcctcttgggtttataatgttctctgttagcgcatgctgtattcctttttaattctgtgcttctaactcttgaatgtctcttaagaagtgaaagagaagcctactgaggaaattctaggcagaaggtggcccccacagcaacaatggatgtgccctctccttaggttttttcaaggcaggggctttgtcccttgggatgtgaagggcctggtggcaagcactggtgtcagatgatagctttgtttcttctcattcaggtgatctatttcctaacttgacatttttgaatgcaaagccttgaaggctttgcatatgtgattgttccataagacaataagcagtataaatttggaagaggaattaggccattatttgactgactgatgtgaatgaatcactattcagagcttagattactagctgcagatgtgaaaggatcattttctgtcatttgctgagacagttaacttcctccaaaatgtggccagtgctattattaaagataatgcaccatgctgtttaaaatgcaagtcactgcagggttcattttgaaaacagacatttgggcatcttgctttacctgtggagccggaaaaggcacaaaaatgaacaaattactgattccagagctagatgtgaaaatgtaacatccacctgttttgagatctgaccttgctttttacacactatttcccccttgttttttggatgaatgttaatgaggaactagaattgaagatcgcatgcttcctagtggcttgtttcctaatacagccaccttaagctacccctcccctgtttcttccagggatagcatttgctgctgttactgaagctggatcaatgtatatggttatagaattcatatgtatccattatggtaattgtcagcctgttgctaccaagttagcttctgactttacggattttttagctcatttgtgtttgtacatagtatgaagcaaataatgagaaattaatgtgtgacaattagaataaaggaagaaatctttaaaatgggttttaggttgtattctcttgaaattctatgaattaaaacattttgtcccccatgactgttcatcttcctcatctggcagagagtgagaggtatttaaagctcctgtattgtaccaaagcagttaaattataaaggtgttatagctgaggaataaaactgacattgaataatagtcatgtttacccatatctccttatttgcttaaagccttaagaagattttgatgaccagcatttcagttttcctgtcaactgagtattagacacagwgtaaaatttgactaaaaaagtttgaggacagttttgaaagcttaggcagacctgccgggacactataggaatggcagtttactcacaatttctgccctgtggaggtgtggacagtaggggagacagattgcatgcttgcaagtggtttctgaaaagcaaacttttaggaaacctgtagagttatttatgaaaaaaacaatgaacaacaacaacaaaaaaagcatttcctctttgcagttacacttggcagggctraaaaatgagcctaaattagcttattaaactggctagaaaccctagggaaaggcttagccaatctcaattggtgcctgtaatcaataatagcataatataattatttgtaccccaatctctgggccacatcctgcaggcagcacaaagatgaatactactgagttctgactctggattcttgtcaatttaatagggtagaaagatacctgattatgtaattataatacaaggctctctgtggcagctactgaaagagatgtaaaatcaaatggaagtgaaagcaatggagagattatctggggagtggtagggggcgtggtggggtgatggggtggtggtggtggtggtaatggtccatttggggatccattgcaaatgtagactaggacttatttttgaaagatgggtcaaaggggagccataaaaagtctgaagmctcatgacaaatagataagggtatatacattaagtaattatcatataaaaatatatgcaaggcgctgacctgggtgcatgactgccctcatgaaaccctcacaaagaaaactaactgtgccttcaaatgagtacaataaaatataatgtgcacaatataataaatgtttaatataaagttcagagttatgaggggctagtataaagagcaagcaagggtggtctaatttggagaggtgaaggttgagtaggaccttcagtgacagcaatgtgataacatgaatttgagcttcagcatgaagggcttaaataaaatttaaaaacttgacattcagtggacttgaacccagacccaaaacakctgaatctgttcctgaggcatcatcatgaagactaaaagagaactttcaatttggacttataaagagcatgtgaggctgttttataagcagatgttatgtctttggagtgatttataatcttacctattatgtgaataaatacaataaattttttaaaaaactaggattagttgggtaacaactacaaaacccagttatctgtgttctcattgatcacaaccaccattcttccctttgcttctaaccaaaccaggaggacaaaggaggttatatatgtttcactcaagatgccttggaaccactgaatggagtttgagttcatgttacatatttaactggccaaaacagtagtaatctttccttccttccttcctttatttgtttgtkaaaatatttgagtgctgtctttgtgccagccctttgctgggtgctagggatgttgtggtaaataagttrcatccctcctttctccaccacacgcacacactgaaatctggtcttcactgaaggtgaagacagtagggaattatatgattccagaagatcctttcacacctttgagtctgattcataaactactataatgatcacatatacacattagacctatgtattacccaatttaagaaaagacaattcttaggtaaattaatatcctagcatagctaggaggtgaaatagattattgtgacaaaatgccaagtgtctggtaccctgtgaagccgtagggatctttcctgctcttgtgatcacccaaaaagccacaagatcccatccattgttataaatactgcttcactctctaaagtaaaattttcagtgcagtactagatacagtgtcagatcctgtttggcatcagttcatttttaaaacgttgacaaagattccctcttttaatttttaatttttaaaattgacacatagttgtacatatttatgggatacataatgatgttgcaatacatatagtgatcagatcagggcaattaccatatcatctcaaacatttatcattttgttgtattgggcacattcaatatccttcatctagcttgaaaatgagcctgggatatttctgcatctaaccaagatgaagtaacagtaatacattggatgtaccatctcatctgacaaaataaaaaaaagagacaacaaatacatgaaacaatggtttgtgggacactgggcatcaggcaacaaaagatagtgatctctgaaagatgggaaggaaatggggtgagccctgtgattgtccccactttgagagattgccccctctttaacttatgctcattwgagaggcccccacccaggcagaaccaagcaaaccctctgagttgaagaggagttgagagtctgaggagaccaagaaagctagatttcacagaacagtgtcctggagaagacatagttgtacagagggagagttctggagatctgcagagagtctacctcaagtattcaccaaggttctgatcagcacattcacatgaggaaaccagctggagaagaagccatccaaatgcattagagggaacagtacccagtgcttgcacagagccaagaatagtgcctcttccatcaaccaaatgggaaaacctcattcacagtgcatytggaagggtcttgccttaaatagtagtggataattagctgtacacttaacacagtctcatcccacataacacatcttaaagggaaaacctgaaaggatcaaactctttcaaagtaactatgtccctttgtttgagaacacagctcaagaatatttatggatatayaaaaatatccagtacccaataagctcaaaatcagtgtcaggaatctaattaaaaattgccagacatgcaaagaagcatgaaaattggactcagttgttgactcttcacttgacagttcattcacaggcccagagacctggaataacatgggtgctttagatgaaaaagtcttgaactttctactgattaccggaagattggattcatacaacttgaaatcccagggatccaaggaatcagccccaaatgtaacacattaacccaatgatgttgggtcctaagaagtcatcttttctcgctgctaattgaaaccttagcgcttttggcacygcagtgttcaaaatctgttgtgactcttgggcttcwttccatgacaacctgtttctgctcattgcctcagagataatcctctctgggttctgcgtgtgtctgaagtatagtttgcccctttctgccttcctcaactttagacttagtagtttgttggacgtactgtctgatatctatgtcagtttccaacttaaaaagtctccagtctgtgtcgcttggagcagtgttttacatgaagagcaaattagctttaaggagggttaccaacatcatggtttgccaggaagcgagagggtgggaaaactttcagcactaaaaccagaatagtgccaggcaaactgggatagctggtcaccctacatttggcctattattctactattactgggatcagtacattctttatcacatggggaaatttttcaagagcattctaacacagtggcttttgctgactctcctgtgtttgactctggaaagtggctggtttagaggaaactatattagttaccagatgtctaatccctgaagcttatactaagcctatactgtgggtgagggtcagggtcataggaagtatctcttgaccactagaagaaaattttggtctattctccctcttctttcccaaaacaaacatacttctaaattttttatttttatgtttttttttaatattgcttttgtgtcattctgccttccagaagagagtgacaaacatttacctatttctgatggctacaaaatgatttaagaggcatattctctcaatgtctgttaaataaaagtaaagctttgatgtgatactcgtgatttcatggcgattacttacgatgaatctacctaaaaaataagtgtgctgtaacatttttgaggccctacagtatgccaggctttcacaggttgttataaaactcatttgatcttcataaccctgagaggttaaatactaaattatcctcatttttaggtggagaaactgagctatcagtaacttgccaaggtcactcctgcccacccccacccctgtgactaccccaaataattagaagtagtgtgcacataaggcaaaagggtaaagcttgtggagagtgatcaaagtgtcagatgcgttacttttcagcattaaatgttaagattttctagactgtagatcattcctgagttgcagcagaccagagtaacttttaagaaaaactctggctatgtgcaggtggggtggccatccattgcggttaagagttgcctgagtgatctagtttttccagaagtaatttctacactgtttatacttgtcagagttcaacagtaaatgtgctgctcagctttaaagaaaaagctgatctcttttcaacaatacagaaatcaatcttgtttccgtatgtgagcaacaaacagaaaatgacggtttttgttgtttttttcatgttttgttttgttttgctttgttttgttttttggtctgctgcccagctttttatcagaagacttttttggagcagatggcatgtatggaagttaatttgaatgacgtgcagcttggccatctctgtagtactctgtgaattttgtctttattcttcatccctacctacctctcttcccaatagggctttcagtgcacttgactttggaactacccccttaccttctgtagagagatagacaatagaacttccttatcttctatagcaagacagacaatagaaaggagtaggctcccttccccttgcwtatattgtgggggtgatgatgaggatgttgttccctttatcaatgagtttttcccataggaaacccatgggaagaagcatttcctctgaaccagctctagtttccctacagaactagcagtgttggcctttggatgacggaaagttgcgacagtggccacagttctgcgtggcagccaggaaaccgagaactacatttgagtcttaatttttaataagtatctgaactgtggttagtatatgtgcattgaaactcctcccattcttgatattttcttttattcctttttctataattktgaattttacatatgttttcacattttattttatgcatctgtaaaaactttcatttcctcataggattaaagcaagatgtagattcttctctcaaccttttattaaacatttcaaacatgtagaagtgttgaaagaataatttaacgtgtacctgaatatctttcacctagattcatgttattaacatttcgctagtttgctttatctccctaaatacattttttcctttgaatccttttaaattatctaacccttaaatatttcagtctgaatcacctaagaacaagcacatttctcctgcagaagcacaaaccattattgcccccgagaaacttctcattgattcatgacatatggtccatatttgcatttccaccgcccccatcccagaaatgtctttttatggcctttttattataaggttgaccttttgaagaaaccaaactagttttytacagactatcataatgttttagttttttctagttgtttccttgtgatgtttagcccaattctctatctcctttgtttcccgtacactgggatttatgcttaaaggcttagttagattgggaagaatactttctagctgatgctgtgcatttcaagttgcgtcacatcaggagatgtatcccactcatgcagtgccgggtcatcccactcacaggacccatgtttgatcacttggtttcaccaccatatctttcccttgtaaaggtatgtttatctccatgaaattagcaagaaatctgtgaggtggcaccacgtaaccactcttttgacaataatctttcatctaagagatttagcatctgtggatgatctttgcccaaaccaattatgtcattgcagattgcagaatgattattttccaattatcaattcctctacatgatggcatttttctgtaaaaaataacatttctttattatttcttagtctgggctgctgtaacaaagtatcgcagactgagtggtacataaacaacaaatttacttttcacagttccggaggctggaagtcagatcagggtgccagcatggtcaggttccagtgagggccctcttcctggttatagactgccaccttcttgtagcctcacatgtaggaaagaaagccagagagctcccaggggtttctcttataaaggcaccaatcccattcaccagggctccaccttcatgacccaattacctcccaaaagccccatctctttttttttttttttttttttttgagacagagtctcgctctgtcacccaggctggagtgtggtggcacaatctcgcctcactgcaacctctgcctcccaggttcaagcaattctcctgcctcagcctcctgaatagctgggattacaggcgcccgccaccacgcccagctaatttttgtatttttagtagagacagggtttcaccatattggtcaggctggtctcgaacccctgacctcatccacccacctcagcctcccaaagtgctgggattacaggcgtgagccaccgcgcccggccatccaaaagccccatctcttaacagcatcctattaggggttaggatttcaacatatgaattttggcagagacacaaacattcagtccatagtactttattaactgggaaaaaactagtttttttctcagcaagataggtcagtgtttaatttctctcctttaattatcaattttcagaataagtaactagtataatagtcaccttcagttgtaacaatttagttttttgtttgtttgtttgtttgtttgagatggagtttcacacttgttgcccaggctggagggcaatggcacgatctcggctcatggcaaccttcaccccccgggttcaagtgattctcctgcctcagcctcccaagtagctgggattacaggtgcctgccaccatgcctggctaatttttgtatttttgatagagacaggatttcaccatgttggccaggcttgtcttgaactcctgacctcaggtgatccacccaccttggcctctgaaagtgttgggattacaggcgtgagccactgcgcccagccctagcaatttagttttatttttccttttaactagcactgtagatttagggatttcttttttctctgtgttaatatttgtttgtttttgatgttaattgactcagaattaaccagtgatagccccttcaaacatactcctgtgtccttctgaaatgccctattatctttgagtgcttttatgctttctggccctacaagctgcctctgcctcaccttacacttttactgtctcgtatctggaatcaccattttgccaagaaacgctggtttctttcagtggggagtagtatttggaaaccaaagtctgggtgtttagaatgctcacagtcctaggatgtccttgtttccaggccctttgagtagacagcattaaaaaatacatgtatttcaacagttgacttcatattgatatctccaattcaaatttaacattacaaggtttttcttcaatttaatttatatttattgccttacattaacaattatggctgttaataaataacatttattctatatcccattcttacctggcaggggagataacatgatcacgaaggtggttttcccagggcgaggtttatccattgcactctgggtgtgctgacccctgtgatttccccaaaagtgcgaaactcgactgcatgatttgtggtagtgggggactgcattcatgctttcccctaaaaaagaaaaaagaaaaaaatataaatatatatatattttacmtatatgttactagaatatatattttatataatatatattttaaaatatatctttatatatccatatatacatagtttcaacatgtcaataccaatatttctaacagtaaaactgccaaggacattttgggatttttttgctttttacagttttcctctttagatttttgtcctatagttgtttaaaagtcacttgcattttttgattactaatttgtattgttagattaccaatttgctatgcagttaagtttttaattattgggtgtgctttcaaaaatttttatttaattttcaggagtcaaaattatttttaaaaaataatttgaaagtttraaactaaattatcagtaaatctttaactacaaaaacatatatattaagttttgaaatgtccatggaatttgaagctaacttaaaaaaattgttgcccaggcacagtggctcacacctgtagtcccagcactttgggaggccaaggcaggttgattgcttgagcccaggagtttgagaccagcctgaacaacatggtgaaaccctgtatctacaaaaagtatagaaaaaaaattagccaggcatggtggctcacgtcagtagttccagctgcttggaggctgagggaggaggattgcttgagcctgggaggtttaggctgcagtgagccatgatcacacaccactgcactccagcctgggtggcagactgagaccctgtctcaaaaaaataaaaaagtaaaaaattgttatttaattactctgtaaattgctatttataatttctagaaagttgtgacagcattttagagcagttgtttaacagtgtcacctttggattagagctaaaatttgtgtagaggcatggatgctctttcaagtttttaacttattcataaaaaggaagcagacaagtgaaatacttccctggaaacgaatgcattccatctcagacttagtgcattttatcatcttaaaacttttcttcctctgggaggggagagtattttagtactttgaattttatagtccttaccagtggccactgataacctctttgccatatctagtgggcacttgaacttttcttagcacctggcacctttccctcttaaaacctcacacttggcttgtatgatactagtggacccttggttttccttctagatctgagagctgctcagcttcctttctctgctgcatagggtagtgggtgaataggctttggaatcaggtgggatatcagtctgatattaccacccaatggctatctgaccccaggtcaatcagctttctggattcagtttttatagaatgggacagataataccttccctatctatcttgttgttgggaggctcaactgagacaatatgcaattaaatcacaagtatttacaagtgttatttcagtcctttttctttctagtaaaagtgtgttgtaattgataatttagatagtgtatcattatctttgatataaaaagagttgtcccagatggttattcacctttcaggttggatgtgctgagcaatccagatgccctgtacccctttgtatggcagccacttccgccttgggaaacaagcttcctgtgtgtcccctgccctctcccaccctctgttaccatttcttttctattcccaaccatttcctaacaggaattccatgtgaggtagtctctcactcaccactattcccactcccttcccctgcagctaatgacctgccagtatttttgttcccaacttttttgggagtccccattatcctagtccccagtcccccttgtcccactcccagtgactgcccccccaaccccaccaggtttatgttcctattaccataattcaatgcctcactaggatcccctttccatctctaggagtctcttgagcttctgactctggtagtaccagccaccaccagtggattataaactaagggtatatcacgtacaattctctagctcagtggaatgaggctgaggttgcagggsaattccagtgcttggtgaaattaaaacgaccatgattcatccaggccagtgcaactcagtcatcatcagtaaacccaaagtgtcaccaccacttgggagctttgctcagatcctaccttagatctactgagtttgaatctctgagagtggggccctaaaatcaatgttttaagaagtcctccagatgactcataggcacatgaaaatctgagaaccattctacccaacagagcttggaattctaaatatagcttgccatggaaagtgtcctagattgcatttgtagtcatttagtattgtgttttattaagttgtggtttaataaaattttcaggtaagcctgaatctaacggtgatttggtgttggttttggttaattcatatatcaagtttatcagtcatcttattaatgaacttttgcaccttagttatttttggaataaattaatgagttaggagctattttgaaaatgtaggatgtaagaattttatgtatttactgattaatttatacttcatgtcaatacagaaaggatattttgcaaccagcatacaaaaatatatgcaatttagaaatgtaatgaaatgaaaattaacctcatggtcctttttatgaagaaaaatttttcctcatgatttcctctcttatgcttctggttccgctattaaaatttattctcagccattgagaactcatttcttaccataggcaggattctggaacaatgagatctattttaatctctagattaaaatgcaataaggaaggtaaacagttacctcattttgagtctgtggaatttccaacaatttctgagtccttccgcatcccaggccatgggagtgatgatttgtttttttttcagttgctagatttctgaacagcttactgtctactcttggtaagcttcagtaatagttatctatgtaagtttaacagctttttttttgaatccttaaaataaactttgatttactcaattgataataaatcaaagatattcagaagattaaatatgccygatcagtggctgtcagatgtttacctcactggcttgctctggtcataactggcaaaaatttgctacttcttgttgtcttttacctcttagcacaggatgttaggtagagatccttgagcttgtgatataaattttaaccctgaattataatttctcccctgaagtcaacaaacctttcatttagtaggtacttgactgcctgcagtatatcaggcactatgctaatctctgagaatacagaattaaataagtttctacccctaccttcacggcccttgcagtttaataatgatagtatagtgagggtgtattgagagttgggtcttgctatactctagcttgcaattgacagccattcaagggaaatttattagagaatattggggttacccagatattccaaagacaaatgggtcttgggaacacctagaactagggactctgttgagattctatttccaacatgtactcttctcacaaatatgtactcttctcctctttgtctctccctctcttccccttcttgccttctgctgcctttttctttctttcatttttcayagaagggccctaattggctcagctcagagatcaggtggccatccctaaaccagtcacctctggccatggaaaaaccatatgaatgggayggaggagggtgggaaggaaagatgatgtctaggagaaagggagtctgggcagataaaaacatctctgacaggtatatgcactttacatttatgcattctcttagtccacacagtagcccattaacctccccaagacacacaactagccagtggcagagctaggataccaatccaagtttctggtgatttccatactatgagcactgtgctacttactggttacactgcagtctttaagaacaataaagtgcatgcaaaatagccttaacaaactgaatactgaaggacaagggatgtttgtcagacaagaggaggttaggtcattgcagggggtggaaaaggcatgtgagaaggaatcgtggtatgtagcaactgggtgctttttgtaaaccacaaactgtttattatggctaaggatgagggggtgcgaggagaccagatgggggaagctgaggatattcagagggcccgtcaggaagacactgatatggtaagctaaaaagttaaaaaaaaaaaaawtttttttttttttgaggcggaatctcgctctgttgcccaggctggagtgcagtggcgcaatctcggctcactgcaacctccgcctcctgggttcaagagattctcctgtctcagcctccttagtagctgggactacaggtgcctgccaccatgcccagctaatttttgtattttttttagtaccgatggttttgccatgttggctaggctggtctcgaactccttacctcagatgatccgcctgccttggcctcccaaagtgctgggattacaggcgtgagccaccgcacctggcccaaaagtttaaattttatcctgaaatcttcagagcccatttggagatatttgagcatgggagagacatggccacattcacggttgagaaaggtcagtccgggcctgctgtgcaggatttactaagaagagacgacaggttaggaggtttaaatattggtgcctgctggatgtgacaagggcctggacaaggcmtggaaatggggatgtaagtcatagttatgacttagccccgcaggctgagaagctagatgtggggagagtagtaagctgggaggacaaggatgctccttggaattctttgtccactaagacaaagaacaccagaaggaggattgtatttgagacaggaaggagacagcagaaggaaggagaaatgaatatagggttgggcagcttgcatgttgtgcaacatgcaaaggcagatattctacaggtatttggaaacacaggccaggcacccccagagatctgtactgtagatatgattttggcagtgcttagtgtttggatcttaaatgaagccttgggaatagagacgatctcccagggaaagttgtctggggaggaagaacagcaagccacatttgcagccccaaggaacagcagcacttgaggttcccttgtacacccgtattaaaggtctagttggggataggaagtcaagtcaatgaaatttccatttttacaagactttccatacctcatatatggtctaccaggtgtcagagaattgcctcagcaagaagtaccactccccttttctaaaactatgttccatgtaaattttagctctgaaagaagtatagattttgtattaactacagatggaggcaagaagaggatggaggtataggctcaacagttagaaaagaagccttaggaacttcccattccatgcagagaycctcagagtatccctgggaggtcataagccagcttttggacatttccagtgaagggaattctactttttgaggtaactcattgcatggctgggtagcttcaaaccgatagtgtcagaattatctttctgctacttccaggtcctgtttagacctttggaatttccctcctttgcagtagtcttttgatgttgtaaaagagccatcctggccctccagggccttcttggtcggctctaactgttaatagggtgagaacttatttataaggcagaagccagaggtggaatttggatgaagaggtaccctaggctctgacatctatcagctacttctttgctggagaatgtttaggggtcactttaacatatcctactcccaagctcatttcctagtagaagtgcttataattaatttttttctatggaatgcagaaatcaaatgaggagaaactccaaatattgtaagctttaagaaatatataggcaggcttagaacaccktcattattctagtctctctcccatggggtgttatggcaaaatgagttcatttgtttattcattcaattaacatttatcgagtacctactccgtgctatgtgatttgagatagggagaacacaactgaaataaacacacaacattttggaacacatctacccttgactaattgaaatatattggtagtccaccttgtcctttttatttaaggatggtattaagcatctaatttaaaatcgcttacattcagcgcatttgtctccttcaaagtgtgaaattaaataatccaaacttaaagctgttggaactttaagttatcttgagccttgaggggaatgtggctacgtagcctgaatcatgtagcatgcagttgctatttctgctttttcctataaatgattagcaatgaagaagcagcatcagagataagacgccccccttgcccctcagaacattatttctcctcaggaatgctaaagcaatcttccttggaatgtagtaatccatactaagcaaatcactgtaatgttacatactggctttgtacagaaagtgctgaaccctgctaaaactgtttctgcctatataagtgaaaccttagcttccccactttggaacaccaaccccatccatttggagtgtgtgctgcccaggtggctgttcttaagctttgcactgcgctggaataaactcgatgcttaatcataatttctgaatctcgttatttaaggttgacaaaggcaaagtcttattgtactttctagcttccttagggtagagaaatcagtttgcctaaaatgaaactcagatgggttattctgagacctcaagggctaaattagcatgttctttcccttgtaaattagggagacttggattgctaactgagctttgccctgggtctggggacaaaggtaaaaatatttgatcagataacagctagttttcaaagggctacttgatgtattgttcagtctttaatctggaaacacactttctctgcaggttaattaacactagggtaaagatttttcaaagcagattgttttcagttaaaataaagtactttttttaaaaagtactttttaaaaaagactgaagtagtaaggggaaaattaattatcacttttaatgtacatttgcagtaatactgtgcttgccttggaaaaaatatattgaagtactgaaaccatgtgaagtgtcacaattccttcttgtgttacctgtgttttatttatagtctgttgtgcaactaattgcaagattatcatatgtgtgagcacaatacataatgtaaaacctcagttgctataagaagatatcagaatggctcacctaggacatttacctaaataartcatcatgcatatgacattgatttggccaataaaatgaggataataacaacacctttctcacgtttacagttgaaagcattaagttgttaagtataaaacacttgtggttttttgtttgtttgtttgtttgtttttttgagacagattctccctctgttgcctaggctggagtgcagtggcgccatctcggctcactgcatcctccacctccggggttccaagcaattctcgtgcctcagcctcccaagtagctgggactatacgcacgcaccaccatgcctggttaatttttgtatttttagtagagacagggtttcaccatgttggtcagactggtctcaaactcctgacctcaagcaatccgccggcctcagcctcccaaagtgctggaattacaagcgtgagccaccatgcccagcctatgaaacacttttaacatttctttttttacaacagtcagacagctaccatatgagaaaaatactgttcattatccccatcttatgagaaactgaggcacagggaaataacttgccaaaagtagtgcagttacctacttgcggatccaggattcaaacctagggagtctggttccagagtctctctgctcttaaaagctgtatgagactgcgtctccaatttctagcagagaaaaaacctgtctacctgcccctcccatgtttcctgctttgctgtatgtttaggtggagtggcctcctatgtgaaggtggatagcacctctttaaagataactcccaagttagggcttaaaaccctccttactacataacagtccccttctgtataactttattcctcttgtgttactttaaggtttaaagaaaaataccagaggcctagatagtccaataytttctttatccagcaacaaggagaaagcctaggtggtgtctgggatttttgaggacctgtcaattaaaaatgtatatgttttatctgaagtctgttgagattagaatacttctgtcttttggtttcatattttattagtttcaggctttttaaagtttgggtttttaaattacacatttgaaactgactttcaaaaaaaattttgtttaaattacacatttgaaactgactttcaaaaaaattttttgtttaaaaaaatttctcacattgccgatagtactgatacagctggtaaataaaacaaaatctgatctttagaaaagcagaactttgctttttttcccttaatcaccaacagatgcaaatagctatatacaaatgatattgttctaaacctgcaaaaagcattttttctgctttattttatgcaaaacttcaacacttcaatcttatttggattggcgtttattttgatttcagttggctccaacagagcagcactggggccttctacgggaattgttccagcatctgacagagcacagacttccttatttaaataaggaagttggacattggtggtattaatggttttgccaaggggacccagaggattattgaaaggaaatacacaaagatgactttctgattttcatttttactatgttaaatgttcatttctaaacaaccaatatgaagaagaaaacgctgatatttatggggggaaatctatgaggcaacattatatcttcttttgatctttattgtttgttttttcattctcagttatttaattatattggtgaaggggatagaagttagtgatggcctccaaatggtaaagcaaagtgtatccacagctaatgttactactaatgccaaactgcatgttaagttctacccaaacctgtatctctcttttgcttcacctatgtattacgtgtaactatgtgaaatcgtcagtattcaactgtttttgatctgcaaaaacaatttcagataattcaacctaataagttcaggggtcagtacacgttttctgtaaagacccaaatagtaagtaattttggctttgtgagccagatagtccctgttgcaactactaataactctgccattatagtatgaaaaccacaagagacaatatgtaaatgaacgaatgtggctgtgttccagcaaaactgaaatttgaattttacataatgttgacatgaaatattcttttttccccccagctacttaaaatataaaaatcattcttaacttgcaggctgtgtaaaaacaagcagtgtccagctttggcccatgggcaatagtttgccagccactgtttaagttgaacttggcagctactgactttgaaatttctggtaccttgtactctcttttcattgacctaaaaccaattgcattatctcacccctcagaactccccaccaccaagacttgtttcaccttctcacctcccttcattatcagtggcacctcattctcctcattctgccattttggaaacatgggattcatcctcttttctctcttctccataacccatgtccaacaggtttcatgggacttctcggttcattcgcctactctcttcccttccaccgagagccattgttcggttcacaacctctttgtcactaggactattgtaagagaccctgcctgagttcttcctttgtcatttgtcctctagaacccattttctactaagccacaagtgttatttttctaaagtaactgtgatcatatcagtccctagtttaaacagtcttagatttcttccattggttataggctgaatagaataaagctcctataaaatttcgtggtctagttctgatgtagctccctcaccaagccaatacttaggtcacaccctacacctctttataaacttcacaacatcttcagttttcacaggctgttcctctgctgggagagccttttcttaccttttctctgagtgttgatttccttcattccataacactgagctcagatgcctcttcatctgtgatacttcccctgactcttcttttgttgacttgcctcctctgtattctcagatcccttgygacataggcctygagtatggcattaattcaagcaaattgtagtttttgtgagaagggccaatggactaaatgtgtgcatccctcccctcccaatgcatatgttgaaatcctcaccgccagtgtgatggtttttggaggtggagccttttgaaattgttcaggtcatgaggatggagccctcatgaatgggattagtgcttttagaaaagaggccccagagagctgctttgtctcttctgccatgtgaggtcacagtgagaacacaaycatctatgaaccagaaagggggccctcactggacacaaaaacttgctgatatcttgaacttggatttctcagccttcaaaactgtgagaaatttacaagccacccagtttatgttgtgtgtgtttttgttttttatttctctcgctctctctctctctctctctctctctctctctctgtctctctagagaggcacggtcttattctatcatccagactrgagtayggtggcacaatcatagctcactgcagcatccaacttctcctaggctcaagcagtcctttcacctcagcctctcaagtacctgggactayaggcacgtgccaccacactgggtgttttttttttttttttgtagaaacaggatcacaccatgttgaccaggctggtctcaaactcctggcctcaaatgatcctcctgctttggcctcccaaagtgctgggattacaacaatgagtggtattttgtgtcagaaacccagaaggactaaaactaacataaatgactatagggtccttgagagtagaaaccatctccttgccatcttgactttttttttttttttggatttactcataaagtcacagagatctaattgcaaggttacagattcaaatgcccatgaggccaggctggtcacttcaatgacaaaagtggacagagtaagatctggggtaaactagcaaggacatgtcctatctcgcgggagtcagcctctcctcaggtccagctgattatagtcattcaagagtgtgatgtgtgtagctggatgtattaattttcaaaagaaattggaaaattaagattttaatgtaaatatcccaattttaaaatattggcaactaatttaccttttaatgaacactttgtggacaaaaattttaaaatatcaatctgattgtgggctgaatgtggcccttgagaccccagtttgcaacacctcgttggtcactgctcttagccacagacagagcctgggagccagaagatctaaggttgtgggggtacagaaggacctcttcctagcctgtgtttattctgcctttacatgtggcttcctccacaagatggcacttagactgcccagccacactaccacacaagtcatgagatgttacttagccaccttcaaaaacgtgaaagccaaacaccacagcaaattcattttataccatcctttcttctccctggtcatggattgtgaacaggctgagatgatctcctgtccccctgccacccggagccaggtgaaaccctctgggagaagctattattcttttttttttttttttttttttttttttttttgagacggagtctcgctctgtcgcccaggctggagtgcagtggcgcgatctcggctcactgcaagctccgcctcccgggttcacgccattctcctgcctcagcctcccgagtagctgggactacaggcgcccgccactacgcccggctaattttttgtatttttagtagagacggggtttcaccgtgttagccaggatggtctcgatctcctgacctcgtgatccgcccgcctcggcctcccaaagtgctgggattacaggcgtgagccaccgcgcccggccagagaagctattattcttgatggatgttttgactggccatccagctggatttgctgatggctgttaccaaatgcttaggttcctggtcagagctgtggtttcttttctcagtaccccaagaataagaggttattactgcagctaggaattaagttgtccttcttttccagcccatctgtgtggccagtaaccacttgagagaaccacatgagacattgcccaagaggttacctggaaaagagaattttcataattgatagctttatttggtcttccataagttattcatctccccccccccacacacacacacactgtattttactgtctacctcctagttatatataaatctcacttcacctgatggccctcaggagacacctgtccttaaacatttgtcaatactgtctgctaaccagtatgaacacttagtgtaaactttttagcctgaactgtcaaggctttgatatttccttgaaaacaaagcaagacaacaataaccacaaaagaagattctctatttggtctttttctgtagtcctgagacctgtgcttctgaggccaggagcttgggggcccagagccgatgtgggtgggcagatcggggtgggaatctggaagcagcatgttcagaaccatgtggatactctcctgtgtacagagcatgtggcttgagaagagggctcagaggaggtccctgttctgggaagtgtcatgccttgtccctgaaggctctggatgtctggccatgtgttcctgagggaggcagagggatgctgatggaaaggcgtagaaaggaggagatgctcctctaactcgcatggctggataacatccttgggtcctgacagaagaggcagctagctttgcatttggtgtattattattaaataacatattttaagtgcttactatgtaccaggcactcatcaaatacttttcatgctagagcatttaattctcataactcttttctgatgggaagtgactattcttattttaggggaaaaaagtaccttgcccaagtacccatagctggagatagtaattaacagagaccaagtttgaatcagttctctccaaccattgtccctgtgtctgccttctgcactatgctgaatgcctcatggtggggagggagagagagttggtgttgagtgactttgccacctgtgaagtatttagcaccatacatgccacatgggaaaccttcaaaaatgtccaatctgtcctttgttgattggctatcttttgtaaatctgttgaaaactattctggggccaatggcctttgtgacaggaccactatgtgagaatacttgaggtacttactttgtctgtgtttagtgatagggatgctttctaagtgtcatgtcatcagatgagtgtccttgaagtcaggtttataaggtgagaaggcagataacttgacaatttaacagttgcatgtaaaagcaagacttttctgctgaaattgaggtggtgatgattacaaaataaattgactagagtatttcacaaatagaagaaaaatgagttttccaagtgtgtgtatcatggtaacacagaatgaatcatttgctccttttaagtagattctgctattgctatgatctcatgcatgttcattcctgagatttaggttataatttcaaggtgtatctgatacacatacaggattttttactttcaagtttgtaaaggtctgtgtttacctacttttacaaagggaaaaatcttaggggttttggttcagttgaaggtaggctggtaggttaaagcagtatataaataaatttaactttgccatgtgtctctcccagggcagatgtgtcttgttcttctaagagttgaataaactgggtataaactttccatattgaggagacagtagctgtgcttcactttcaacctctaacatttttcctacttgaatttaaacctaacttcaaaattacccatgtgtttaattatgatgactaaaacacccctccccaacacacacacacacaatcttaataagtcatagaatttaatccatgaagtacagctaaggaactgagatttgcaaaagttaagtaacttgaccaaactactctgccagtcactagctgtgacttcgtttaaaaagggagtaacagtggcagctaccttatagagttgacaagaggatgaaatgagttaattactttctacaaaatattaacagcagtctctggctcatacatagttctcaacaaatgtgagatactgttatccacacctaggaagtagcagagttgatttctgtcagattcattcattcagtaaacatttgttgagcacctgctatgtgctgtattctagggagatagtttttgttaagaaccaccatgacttattacctccagtttaatttccagaaaaatactttccctctttgtaaactggaaaataatgtgaccaaaggtatgatgattcgtggtccaccagcatttctttaaagccttcaaaataagcatcatgcgtaagtattgtttaggccaagaatgtagatagcatagtcgtttttcctgttgacctcaaggtggtactgactttacgctggagcatacagcaatggagtggtgcccctggtccacctgcttgcctttaaggaatctgttgaatctgttaacagcatgctgctcctcagcttgtgaaacaaagtttttctcaattactttttataaaattaaagattttgttcacatatagttaacaaagcatttacctttgaagtgcaaaataaaatatttaagttgatactggtcaaacttgttagagccaaatgagattgagaagaatgaggcctttctactaaagctgtgtaaagtaggggagttgaaataatataaaataggggataagagttgtggcattttttttttaaacacagtgactttaaattgatatttaaaatttaatatttaaattaatattttatcatctgaatggtaatcaggtttctgacaaaacaggcttacataggtgggaccaccatcttcccattagattgacatttctgactgtctgatacttcattagtgctattcataagctacgttcaacatgaaatggcaaagtaagggcaccagtaattgttctttcacagttccctgggtttgagtcattgcaggacagacctctgaaccaggcaccgacaagaatagatgcacaataggaaaataaaacaacccaagagctgaagcagaaagctctcagaactcccaagtgtgttcgcatttagctgtgtgaccttgcgccagtcatgatcatccaggtcactggttttctcatatgcatgcaatgaagtttctaagacctcttgctgaagttaggtcaactttggagtttaataaccactcagggaaagacaggagacgaagcacgttaaggggacagggattcgtgatttatgtaattatagtagctttgttgtctgttggaaacggcagtggtggatgagtcaccttggcatgtagctgttggagatcagcgatgcttttttggttcaaaaaacgaaaccaaaggaaaaaacacctttctacagcccaagattaggtgccagtggtcagagtgatgccaagttctggaaatagcatccaggatcttgtacggatgacagtatggagggatggttgtcatgaacaggttttcccagctgaacccccacttgagctttccccagggaaggcgcacatttgggacaccatggtggtataacatcacccagtaaaaaatccaccccaaacatgttgcttgggaagtcaccaccagtgaccgagaggaggcaggtggtattttggacctccttcctctgcctggtttggttctctgaggagagatgtaaaaggcacgttccagacgaatgcatgttctgtactacgagcttcagcagcaggcccccccagtgacttggcctggatagcatgagcttctctagggacaggcagatctgagccacctgttctttcctctttcctgggccttttcccagactcctccaatagccagagatgctgggaaaggcccgccctctcaggcctggaccagaccttgcctgatttttttattctatgcttccccacagtccagctcaacctgtcacagactgatgtccccagggcacaataggaagaggttgggttaggggtcaagataggctcattctgaatcccagctgtgccacttcctggctgtggagcttctgataagttgcttagctcargcagtaaatgcggtaggattaaccatcatgcaggtagcctcattgtgtccctaatatttacattttatccttaagccatatgaaaatgtctttccttagaggaaagaggaaatgcatttccttgaaggtgggacaagaaaatagacattgaatcctccctttccccactgctcagcccctgagagtgtgtgataagcccccgaggccaatttgacaagccccaggacaacaattgtcaaactttgtaagcaacagtccacttaaagacaaatcttaggaaatactgtaatatgtgaaataagtaaacataggcttttgtttatagaaatatgctaaagttgaaattagtagtaaacccgataggaccagcgaagccctttttattgatacagaaatttgaaattgaggaaatagatgactgatatgatcttttcgttagaactttcagataagtaattgcaaatagtagttaaaaaaaaaattctccttccaatcaatgatatggtcaattgaaaagatagatggcttaatatgctaaagctgcccaaaatatgtcaacttgcatttatttgatcacatgtacagatgggaatgaacttttaaattattgcattttttaaaaatgtgtatacatttttaaaataaagaaaatgttaaaatttctgaaacacctccatagagttccagagtttggcagaagygtgctttgaaacacgctcgcttacatcttgcggcactcaaatctcaatttgctttccatttcctatttggttgtggcatgtgtgtgttggcttatggaaattgataccatttttagtactaaaagctatttgatgtaagaaatggtgaaatttgaataaggtcaggagtctgggtgagagtattgtatcaatgtcattttctcagttttgatattgtactgtcttatataagatgttaccgtttggggaattggtcaaaagctacatgggactctgtactatttttgcaatttactctgagcctataattattgtagaatgaaaaggtttttaaaaagtcatttgaaaataatgattttgaactgttaggaggctgtgcaactcaatcaatagagcagtgtacacaccacacttatagrgctaatttttatttagcttaccttaaaaagaaaaaacacaccttttctttccttgctactgagttccataaactccacactcactctgtcaggactgtgacactgttgaagctttagaaaggaaacgcagccagtggcagatcaaggagaactctttaagggaatctgttttagctgctgcttaattacttaagaagaaagcggtgcggaaacccaagagttgagtctatagtcacctgatagagaaaaaggtgcatgaatgatgcagcatgttttcctgaagcatttctatgcttaaaacatgtagtaattcgagcaaagcagtgtcaacatgccttattattatgtgtcttggtgtccaaatcagagtgcctatagcccagtgtgatgagtattattctacatgaaaaaagaccaagagttaaaaatagttttaaaagagtaaacctttgacccatttgcttgcctttgtgtaaagcaaaaatgggggggtatggccgtagtgaaatatggttctctgttctcttggatttttacgacatgctgtaagttactgccatgtaccttgataagattgatggtggttttgctgtttatcacttggagaagtgaaacagaattccctgagtcagattatctgtcttcattgtaattgccgaaacattcaggttccttaacctgaaagagtgattgcctcatgtgttttgactaaaatggattagtgtakttgatcacatctatcagacacctgtgggtgaacargtctcaaaacaacttctttagtaaatattttaatgggtgctaacataatgccattaaaaaattttcatttatttgggaacataaaataccaagaccataatgttcttagcattaagcagggctgtagttctgggccagttgtagagactgtcttggctgacccttgacaagggactgtgccctcagctttatcggtctgtctgaccagcttttccggcttcttctccagggttatcaatgccgggaagagcacacacaatgaagaccaagccagctgtgaggtgctcactgtgaagaagaaggcaggggccgtgacctcaaccccaaacaggaactcatccaagagacggtcctcccttcccaatggggaagggctgcagctgaaggagaactcggtaagacccttctcgatccttggttctcaggtgagaagaatggcacacactttggtcccactggaagacattagggcttcacctaaatctggaatggaagtgagaaagcagtgtccccagagttagtggggtggcgggcctatcgtcacgacatcacacataccaagctgaaggcgacacatgtatgaccagcttgtggttaggtttttaacacaaagtaaatgaaacacccacaccatatgtatctagctcttgttgcaataattgatatatttatgtgtgtgcatatatatatatacacatatatatgtgtgtgtgtgtgtatacgtatatatatgtgtgtatatatatatacacgaatatatatacgtatacacacacactcacacacacacacacacacacatacacacacaatgtttgacggtttcaaaggagccacttctaggtctttgtaaggaaatagtccgaaagcctctcatgaggggtggaagtaactctggctgttgctttgagccctgccatgactctgcccctttctcctccttgcctgctcatgatccatttgcagcctgtgcctgatgttcttccaaataaatatctatttcaattggcccaaaactcttgcagcccatggggtggccttgcagactgaacactgttgaaaaaccacaaaatatttmtcctgtctccagtttctggggaataaagcagtcatatcctcagaaagctctgaagaagctctcagcaaaggacggggagtcattgacactctgtctgccagcagatgatgtgctttagagagagatgtttcctgggaaaatcaggagacacagaatggactgacccaaatgtgactattcattctgatcatcttgaggatatttttgtgtaaaaattttcataggattttaaaagatctaggaatcttttcttagttttagaaatagtatctcattgcggctgggcatggtggctcacgcctgtaatcccagcactttgggaggccgagacaggcggatcatgaggtcaggagatccagaccatcctggctaacatggtgaaaccccatctctactaaaaatacaaaaaattagctgggcatggtggcgggcgcctgtaatcccagctactcaggaggctgaggcaggagaatggcgtgaacccaggaggcagagcttgcagtgagctgagatcacgccactgcactccagcctgggcgacagtgcagactccatctcaaaaagagaaaaagaaaaagaaatagtgtttcattgcgtctatgctcagggattgataagtattgatttattttgttagtcctagtttaatttaaagttgacttayggggatttatcaattgtacatattttctaggttgaaggaaggccttttccaaacaaccagagctgaggacccagatgggcagtatagaatggtgatggttaagtgcccaggccctggagtgagatgactgtgcagtctaccactttagctacttaattttgggatggttattctttgagcctcagttttgtctactctaaaaaggaataacaggctgggtgcggtggctcacgcctgtaatcccagcactttgggaggccaaggcgggcagatcacgaggtcaggagatcgagaccatcctggctaacacagtgacaccctgtctctactaaaaatacaaaaaattagccgggcatggtggcgggtgcctgtagtcccagctactcaggaggctgaggcagaagaatggcgtgaacccaggaggcrgagcttgcagtgagctgagatcacgccactgcactccagcctgggtgacagagcgagactccgtctcaaaaaaattaaataaataaataaataaataaaatataaaggaataacagcagtaactaccaaatggtagaaggaggctgattggaaatatgaactccagtagtccgtggaaaatgttgagcatgtgtcttaataaatctgtaataagcgttagtgattattatcctgaggttagtcccacttcgttattctctatgagtgaagtttgcatgtttcttcacttgtgaattagagattacacaattcctttcatacctactcgacaggattgttttgaggattgttattatgggaaagggcttggaaagygtgaagtgttcatgatcattgaataggggcgccagtgacttagtgttgctctttccactgatattttccccctgcccctgggatataaagtgatctctgtaaaaatcagtcagtgttgacatatggcccaaggccagttggtgatggcatttttcctttttactgagttccttctagaaatggagctggggtgactttttaacttcttgtccttaagaacagtgaaactggtgcataagcactttgggatggagctgtggccctcccctgtggtggttcccaatatctgtggggtccgtccttcaagagcaagggaccagcagagtggagacaccctggtgccccagtcctgctccgaccacagcagcttcatttctgtctgctttacctattaggcttcttactgagtttaagacaagagttgagcttcttttcctttttttaaattgtggtaaaatgtacataacataaaatttaccaattttaggcatatagttcagtggcattacgtatattcacatgtttgtacaaccatcaccctcatcatctccagaactttttcaggttctcaggctgaaactatgtattcattaaacactaactctccattctttcctcccttggtgcccaccattctatttcctgtctctgagttgaccactgcaggtacctcacataagtagaatcatacactatttgtccttttgtgcctggcttatttcacttagcataatgttctcaaggttttacccatgttgtaatgtgagccagaattttttacctttcagctattctgaataatgctgtcgtgaacataggtgaacaaatatctctttgagtccctgctttcaattcttttggctatatatctagaggaggatttgatgaattatgtgataattctgtttaattttttgagggactaccaccgtttttcacagtggctgctccattttacgttcctaccaacaatggagaggggttcctatttctccacgtcttcaccagcacttgctttctgttttctttttttaatagtaatcattctaatgggtatgaggtagtatttcactgtacttttggtttgcatttccctaatgattagtgatgttgagcattttttcattattggacctttgtatatgttcttcagagaaatgtctattcaagtcctttgcccattttaaaaattgggttgtctgttctgttgttatttttgtttgtgctgctttttaaaaatttgaaaaccattacctagtgaggaagataaatcactgagcacctgctatgtactgagaactggatgctggagatttggcagggaatgaaatagacaaaatccctacttagagggagcttccattcgtagagggagacaaaatatagtgtgccagatgatagacactatggagatacaaaacaaagtggggaacccagaatataggaagtctgagggtgccggggtagttaatgaaggcatcactgagaaggtgacatttgggcaaagatctgaaattgcagctatttgaaggaagagcatttatcgttctggacaattgaaagacaccaaggtgggagccggccctatgttctcagggtttaggaaggaggtctgtgtggttggagcagaaatactgtaaagcctggattgcaggaaatgttgtcagaaaagtcataggagtggagtgagccagtcgggaaggacattgaaggtcactgtcaagactttggcttccacttctataatttactagcagaggacactggacacactggttaaaagaggccagtgatttttcccatctagaagacatgcccttaatggtaaaactcaaatatggtagcacttaggaaaggatggtgatagtacagggcttagggcaagaaaacatccacagagataagtaaagcggattgtacccacccttcctgttccctcacccactgaacatattgaactctgagtctgcatgctgagctttgggataaggagacaaaacacaacatagttcccatcctcctaatgctgagtcgattggggagatcactggcagtggtactacaatggagtgagttttcagagacagatgaaaagcccaggttgtagggaagtctgactcattttggtcactgatgatttggggaacaaccaaggagaaggggatgggtaaggttaggaaagccttccttgagaaattgacattagagctgggatcttggaaagtgaatagaagtaaagcgagctaacaaaagaaatgggggtttcttatagaaggaacatgtataggcaaagacaggttggcatgagagcacatgaggcatgtcttcctgtgttttggaaaatatatggtctcttggagggttggcaagacaggaagagtaagcaggcatcacaagggtcatcatacaccataataagctgggatttttaccaaagtattttagacaagggcaagatgactcaagacagtgatggcagtgggaaggctgacttgggaaggccaggagtccaaacctagaggctgggatgctagttaggaggctcatgcagaaatatgggtgagaaatgataacggcttaaaataaggcactgatcagtgcaagggacaggctcagaagagattaaatgagagatacagttaaggtgagcaaatgaccaactgcttggaacagggagaagatgaaggtaccaggctcagccactaggtgctggtcactgaaaagtggaccactggatggtaaggggatgggcagagatgatgacttgcgttttgagtatactgattctgattctacctttccaggtgaaagtgttttgtaggaaattagaaataagggtttggagctcacacacaagcctaaggaggcttagatttaaggagttacaagattgaaaattatagttgcagccatagaagtggcttaggtgacacagaaggtataaaagtgtgtaacagaaacatgatgacagtggggttctagaagctccaagaagagakgggtactgtgaagagggaaggtatctatggcatgggccacacagtgataagaaagataaggatgggaaaagtggacatataatgttataagcaaaaaatggaacaacaggataaataatggcatcatggttttatctgcaaacagagttgacaggcatgaaggatggcaaaccgaagatgcatgaagtccctctggaatacatatgcttaatttctccctcctttcttgacctcttttgtcccctgtaaatttagtaaagtcaaaatatgtgttttcaaaagatttctttcatgtataatatatcttcaccttccttggaggttaaagaaaacctaaaatttttaataaaataacatgaaatttacaatgaaaacagtattataggaattttttatttgttagaaacatcagtgatgtacagaggatttcaatagaagtgtgactttatatttcatgacctttcttatattgagtggcaatatggtagccgggtagcaacgagatgacttctttttttgagatgaagtctcactctgtcgcccaggctggagtgcagtggcataatctcagctcactgcaacctttgcctcccaggttcaagctcttctcttgcctcatcctcctgagtagctgggattaccggcaagcaccaccatacctggctatttttgtatttttagtagagacagggtttcgccatgttggccaggctggtcttgaacttctgacctcaggggatctgcccacctcaggctcctgaagtgttgggattacagacgtgagccactgcacccagcgagatgaccttttctactacagataataatgaattggtgttaagatttaaagacaactcttagccatcccaaataccaattcataaagaattattttatccttttcagcctcccattttaaagcaaaccttaaacacattttttttggtagagaaaataatataactgttttctgcctctcccagcttccatgaggcatttactgaaggaatgtcatttcctgtgtttgagctctttttttttaattgtaattggtggtaatttggcattttattattttttttttattatactttaagttctagggtacatgcgcacaatatgcaggtttgttacgtaggtatatgtgtgccatgttggtttgctgcacccattaactcatcattttcattaggtatttctcctaatgctatccctccccctgctccacactccgcgacaggcccctgtgtgtgatgttccccaccctgtgtccaagtgttcttattgttcaactcccacctatgagtgagaacatatgatgtttggttttctgtccttgtgatagtttgctcagaatgatggtttccagtttcatccatgtccctgcaaaggacatgaactcatctgtttttatagctgcatagtattctgtggtatatatgtgccacattttcttaatccagtctatcactgatggacatttggattggttccaagtttttgctattgtgaatagtgctgcaataaacatacgtgtgcatgtgtctttacggtagcatgatttataaccctttgggtatatacccggtaatgggatggctgggtcaaatgatatttctagttctagatcactgaggaatcaccacactgtcttccacaatggttgaactagtttacactcccaacagtgtaaaagcattcctatttctsmacaacctctccagcatctgttgtttcctgactttttaatcgccwctctaactggtgtgagatggtatctcattgtggttctgatttgyatttctctgatgaccagtgatgatgaggatttttttcatgtgtgtgttggctgcataaatgtcttcttttaagaagtgtcagttcatatcctttgcccactttttgattttttttttccttgtaaatttgtttctttgtagattctggatattagccctttgtcaactgggtagattgcaaaaatttctcccattctgtaggttgtctgttcactctgatggtagtttcttttgctgtgcaaaagctcttcagtttgattagattccatttgtctattttggcttttgttgccattgcttttggtgttttagtcatgaagtccttgcccatgcctatgtcctgaatggtattgcctaggttttcttctaggctttttatgattttgggtctaacatttaagtctttaatccatcttcaattaatttttgtataaggtgtaaggaagggatccagtttcagctttctacatatggctagccagttttcgcagcaccatttattaaatagggaatcctttccccatttcttgtttttgtcaggtttgtcaaagatcagatggttgtagatgtgtgttgttatttctgagggttctgttctgtttcattggtctgcctctctgttttggtaccagtaccatgctgttttggttactgtagccttgtagtatagtttgaagtcaggtagcgtgatgcctccagctttgttctttttgcttaggattgtcttggcaatgtgggctctattttggttccatatgaactctaaagtagttttttccaattctgtgaagaaagtcattgatagcttgatggggatggcattgaatctataaattactttgggcagtatggccattttcacaacattgattcttcctatccatgagcatggaatgttcttccatttgtttgtgtcctcttttatttcattgagcagtggtttgtagttttccttgaagaggcccttcacatcccttgtaagttggattcctaggtattttattctctttgtagcaattgtgaatgggagttcactcatgatttggctctctgtttgtctgttattggtgtataagaatgcttgtgatttttgtacattgattttgtatcctgagactttgctgaagttgcctatcagcttaaggagattttgggctgagaagatggggttttctagatatacaatcatgtcatctgcaaacagggacaatttgacttcctcatttcctaatcgaattccctttatttctttctcttgcctgattgccctggccagaactaccaacactatgttgaaataggagtggtgagagagggcatccctgtcttgtgccagttttcaaagggaatgcttccagtttttgcccattcagtatgatattggctgtgggtttgtcataaatagctcctattattttgagataagttacatcgatacctggtttattgagagtttttagcatgaagggctgttgaattttgtcaaaggccttttctgcatctattgagataatcatgtggtttttgtcattggttctgtttatgtgatggattatgtttattgatttgggtatgttgaacaagccttgcatcccagggatgaagctgacttgatcatggtggataagctttttgatgagctgctggattcagtttgccagtattttattgaggatttttgcatcgatgttcatcaggaataytggtctaaaatgctctttytttgttgtgtctctctctgccaggctttggtatcaggatgatgctggcctcataaaattagttaggaagaattccctctttttctattgattggaatagtttcagaaggamtggtaccagctcctctttgtacctctggtagaatttggctgtgaatccgtctggttctggactttctttggttggtaggatgttaattattgcctcaatttcagagcctgttattggtctattcagagagtcaacttcttcccaatttagtcttgggagggtgtatgtgtcccggaatttatccatttttctatattttctagtttatttgtgtagaggtgtttatagtattctctgatggtagtttgtatttctgtgggattggtggtgatatcccctttatcattttttattgcatctatttgattcttctctcttttcttttttattagtcttgctagcagtctatcaattctgttgaacttttcaaaaaaccagctcctgaatttattgatttttttgaagggttttttgtgtctctatctccttcagttttgttctgatcttagttatttcttgccttctgctagcttttgaatgtgtttgctcttgcttctctagttcttttaattgtgatgttagggtgtcaattttagatgttttctgctttctcttgtgtgcatttagtgctataaatttccctctacacactgctttaagtgtgtcccagagattctggtacgttgtgtctttgttctcgttggtttcaaagaacatctttatttctgccttcatttcattatgtacccagtagtcattcaggagcaggttgttcagtttccatgtagttgagcggttttgagtgagtttcttaatcctgagttctaatttgattgcattgtggtctgagagacagtttgttgtgatttctgttcttttacatttgttaaggactgctttacttccaactcttttggaataagtgctatgtggtgctgagaagaatgtatagtctgttgatttggggtggagagttctgtagatgtctgtcacgtcctcttggtgcagagctgagttcaagtcctggatatcgttgttaaccttctgtctcattgatctaatattgacagtggggtgttaaagtctcccattattattgtgtgggagtctaagtctctttgtaggtccctaaggacttgctttatgaatctgggtgctcctgtattgggtgcatatatatttaggacagttagctcttcttgttgaattgatccctttaccattatgtaatggccttctttgtctcttctgatcttctttggtttaaagtctgttttatcagagactaggattgcaaccctgctttttttttgctttccatttgcttggtagatcttcctgcatacctttattttgagcctatgtatgtctctgcacatgagatgggtttcctgaatacagcacactgatgggtcttgactctttatccagtttgccagtctgtgtcttttaattggggcatttagcccattcacattcaaggttaatatgtgtgaatgtgatcctgtcattaggatgttagctggttattttgcccattagttgatgcagtttcttcctagcaccgaaggtctttacaatttggcatgtttttgcagtggctggtaccagttgttcctttccatgtttagtgcttccttcaggagctcttgtaaggcaggcctggtggtaacaaaatctctcagcatttgcttgtctgtaaaggattttatttctccttcacttatgaagcttagtttggctggatatgaaattctgggttctttaagaatgttgaatattggcccccactctcttctggcttgtagagtttctgccgagaaatccactgttagtttgatgggcttccctttgcaggtaacccgacctttctctctggctgcccttaacattttttccttcatttcaaccttggtgaatctgacaattaatgtgtcttggggttgctcttcttgaggagtatctttgtggtggtctctgtatttcctgaattttaatgttggcctgccttgctaggctggggaagttctcctggatcatatcctggcagagtgttttccaacttgtttccattctccctgtcactttcaggtacaccaaacaaatgtagatttggtctttcacatagtcccatatttcttggaggctttgttcatttctttttacttttttttctctaaacttctcctctcactttgtttcattaatttgatcttccatcactgataccctttcttccacttgatcgaattggctatcgaagcttgtgcatgcsttacgtagttctcttgccacggttttcagctccatcaggtcatttaaggtcttctctacactgtttattctagttagccattcatctgatcttttttcaaggtttttagcttctttgcaatgggttcgagcatcctcctttagcttggagaagtttgttattaccgacctcctgaagcctacttctgtcagcttgtcaaagtcattctccatccagctttgttccgttgctggagaggagctgtgatcctttggaggagaagaggtgctctggtttttagaattttcagcttttctgctctggttcctccccatctttgtggttttatctacctttggtctttgatgctagtgacctacagatggggtgttggtgtggatgtcctttttgttgatgctgatgctattcctttctgtttgttagttttccttctaagagtcaggttcctcagctgcaggtctgttggagtttcctggagttccactccagaccctatttgcttaggtatcaccagcggaggctgcagaaccgcaatattgcagaacggcaaatgttgctgcctgatcgttcctctggaagctttgtctcagaggggcacccagccgtatgaggtgtcagtcggcccctaatgggaggtgcctcccagttaggctactcggggttcagggacccacttgaggaggcagtctgtccattctcagatctcaaactctgtgctgggagaaccactactctcttcatagacagggacttttaagttgcagaagtttctgctgccttttgttcatctacgccctgccctcagaggtggggtctacagaggcagcaggccttgcagagctgtggtgggctctgcccagttcgagcttccccagccgctttgtttacctactcaagcttcagcagtggcagacgcctctccccctactaggctgctgcctcaccggttgatctcagactgctgcgctagcagtgagcaaggcttcttaggtgtgggacctgctaagccaggtgccatttgctaaggccattggaaaagcgcagtatttgggcgggagtgtcctgattttccaggtacaatctgccatggattcccttggctgggaaagggaattccccgaccccttgcgcttcccaggtgaggcaatgccccaccctgcttcggctcgccctctttgggctgcactcactgtccaaccagtcccaatgagatgaaccaggtacctcagttcgaaatgcagaaatcactgtcttctgcatcaatcccactgggagctgcacaccagagctgtttccattcggccatcttggaaccgactcgtgtttgagctcttgacagtggcacctgacttaaaagaaataaaatacaaattaatttcgggtttcatctgcatataagtaaaaagtcaggagctaaagaagcaatgtttgaaataagtaaaacaacaacaacaacaacaaaacaaacttaaaaggcacacaaatttaaatgttttaaggtgttctgcactgtagtattttagcctgaagaaatgtaaggggatgtggttgaagttttctagtctccatctccaacactcttgaatggatctaggttttgttctgttttgtcttttaattaagagtttagtgatataacttataatacagaaacaataaacatttctcctttggggttaagaaagcaatgtttggccaggtacggtggctcacgcctgtaatcccagcactttgggaggccgaggcaggtggatcatgagttcaggagttcaagacaagcctggccaagaaggtgaacccatctttactaaaaatacaaaaaattagccgggtgcagtggcaggcgcctgtaatsccagttactcgggaggctgaggcaggagaatcactttaacttggagggcagaggttgcagtgagctgagatcacgccactgcactccagcctggcgacagagtgagactccatctcaaaaaaaaaaaaaaaaaagcaatgttttggccggcgcagtggctcacgcctgtactcccagcacttttggaggccgaggcaaggtggattccctgagctcaggagttcgcaactagcctgggcaaaacagtgaaaccccgtctctactgaaacacaaaaaattagctgggcttggtggcatatgcctgtattcccagcttcttgggagtctgaggcaggagaattgcttgaacccaggaggtggaggttacagtgggccaagatcacaccactgcactccagcctgggcaactgagtgagactccatctcaaaaaaaaaaaaaaaaagaaaaagaaaaagcaacattttgagatatttgatgaagcaggtatgtagtatagtagagaagggcgttctcaatgacaaatgaaggtggaacttttcttgtgcctggatcatttttgggtagcttaatgtgaagagctataagcccacagtctggcaaatagcaaatagatactctttggcaatgtgcaagcctcttgacatgcctacctctgagaactgatttggaaacaggatgggtggccaggaaagaaggaaatctacaattctagcacttccaaaagacactttcatgagactgtctcttaggaaagctgctgtaagcttgttgaggacaataccttattcccaatggcctcctgattcccacagaaggctttttaattaaccagctcaagatttgtgcacatgaatcaccattgctagctyttctttcctttgacttggaaggttataaagagtctttatttatcatactgattgccatmctcaggtgaaaacacagcttttccaagagctttttcttcttagttcccaaatatttagtcattccaggaatgagataagaggaggagggtaccaagtgacttctctgtggaaggagaaagagatcactctgaaaggcatgtcataacctagtgttaagaagtgcgtgtacttacataagatgcgtgggtgggaaatatttagggtattgtggccataaccaggaaatttttttgcccacgtctgactccctatttcgaacagattgtttttggcttgagactagacttctgaacacatgcattccaagtctacttccttaggagcacccttgtgttgtttaatttagccaaaacacatcaaagtgtgtggtttcagtatctgctagttcagtgtctaattacaataacaggagatggctgtgtcagcatctcggccaagaccatcagcaggggagaggaaagctgattatctttctcagcagaggacggggcagcactgtgggaactccaggcaaataggatcaaaatggggcagggaaaggcaaaaggaacatgagaaagggactatttcaactttccgaactgaggttttgccattctttttatctgtttttgtaagaagtactctttcacccccgaaacatgaaatgaaggttgcttctggttctacaacagcagccctttggaatatttcgccctcatcaggcagttggctccctgcaatgatgtcagctataaaaatgcaataggagcagccttttattcatctcattttattatgctaaaattttgttccttgttctgcacatgtgaagaaaataagaattttcttttcttcttagttttttktttgtttgtttgtttgtttttttttgagacagggtctctctctgttgtccagactggagtgcagtggcgctatcttggctcactgcaagctccgcctgccaggttcacgccattctcctgcctcagcctcctgggtagctgggactacaggcgcccgccaccacgcccggctaattttttgtatttttagtagagacggggtttcaccgtgttagccaggatggtctggatctcctgaccttatgatctgcccgcctcagcctcccaaagtgctgggataataggcatgaaccmctgcgcctggccagtttttttttttttttttcttttttttagtttttttttttttcttttttttttttttttttttagtaatgcagkggtttctttcaaaactcttttagttctagggacatagaactcttgccagtgattaagatggatgattttaaaaccaggaattgaggaggcygatgtcagctagaatccctktaaaggccccttattggtgggtgttggattactctgaagaccaggtttgaccaaaatgtacatagtagctgagaacacaacatggtttcactatagtttcccactgtggcaaaatgtaaggtgcaaggaaaataaatcatgttgagatggaaatttcttcttgcttcacttataatctgacttcccacagctttaagtgggaagaacattgtcaagggcaataaactttattttcttctttcatttcttctaaaaaaaaaaaccaaaaccataaataatactcagcactcgtgtaccagacgccgattttagtgccttgctggtattaatttatttaaccttatataggctaagtatcccttatccaaaatgtttgaaaccagaagtgttttggatttcagattttttcagattttggactatttgcatatacataatgagatatcttgggaatgagacccaagtttaaacacagaattcattagtgttttgtatgcagcttacacacatagtctgaaggtagtcttatttctccatggggttgctaaataaaccaaatgtagtgtgcctgtgtttctaccatgacccactgagatcaggtgtagaattctccacttgtgatgtcaygtccgtgctcaaaagttttggatttcagagcattttccagacttttggattaggagtgcccaaactgtaatatgtgcataaatatgtattattawtgccttttttaactggtgaggaagctgaggcacagagctagaaagtgtagatcttgattygacccaggcagtctggcctcagtgtctagacttacaccatgctgcctctgtatccattagcagttgagacatggagcaggaaaatctctttgagaaagtcagacatcaaggaagaataactcctaatgttgacatgtataatttcaataaaatttgacactaaatattttctcatttccattatgatttctcttttgatatgggmgttagttagcagtgtcccctgtcaactcagaaactgtaatagctgttactaagatgaaaaacagagctaaaatgaaattatcatcttctctttatagtccattttcttgctaaattatagaaagaccatcatttgcataaaccatgggaagaaaaaaaagccctctgattggataagcatgaatacctgagtttgaatcctgcctctgccccttactagatgtgttatcttgtgcaagtcagtcggcttctccatacctcaattttcccatctgtaaattggttataacaggtactatttcataggcttattagagtgaagtgagttaaaatatgaaaagtgcttagaatagtgcatggggtaggtgctcaataaatattatctattgttgttgttgtttctaatagtggattggcaactgcacttcagtattatttcacartacttatgttttttccataaactaatttagggagaagttgttgatgtataaactaatagtttaagaatattctcgagttgattctagaataaatcacaatgcaatttagcaaaaaccgttataaactttgtacttccttttataaattaatgttttaagacaggtctaaattgccatttaaaaacaaaagtcaaacttactaaacctatcctgcaccttactgcctcattatgttggaggaattgaaccaaagaaacctgcaattcatattgtcatatcctgagaaggaagcagcatattcattaaagtatatgaaattaagggatttttttcctccactgcagagcagagtatccgaacaatttagtcaaaaaaaaagaggtatggtaaaaagcgaacaacgctgtagggtcatggctccatgtggacagcaatagaacgtgagccctaggaaggtctttcatgaagtcactcaaatgttttctcatctctacctcctcattggcttattcttctccctttcactgtggtactgtgaggatcagatggaaaactggacattgaaagccctgtggatggaatgcctatagcagatactctggactgtgcattatcatcttcactgagattcctggaaaactggccagaaagtttgtggaaatcaaaccatataatcacatatatagtggggaaacagaaaaatatggcaactctgtttccccaaggggaagtgatcaatcccttttctttggtagtgggagagacggggtagaaagtgcattctgtgctcatacaggacattttgtaaaatcaacgatgagatgtcactcaaagtgggatttctacatttgtgataggcctttcctgctgttgatatggcccctccaccggttgtataaatacctgaatagttagggtggcaaagggaagaataatattaaataagctaaggacttgtgaatgctaccaggaggataccactttttcccttcagacaactatttctaaattaacagtctccaaatcgtaagttaaaaacaatttttttggcagggtgtggtggctcatgcctgtaatttcacagcattgggagaccaaggcaggagggtcacttgaggccaggagtttgagacccagcctgggcaacatagcaagaccctctctacaaaaaatttaaaaattagccaggtgtggtggcacatgcctgtagtcctagcttcttggggcggccaacgtgggaggatagcttgaggccaggagttccagactagcttgggcaaaataaggagaactcatctctacaaaaataaaaataaaaaataaagcctggtgtggtggtgcactcatggtcccatctactcaggaggctgaggtgggaggatggcttgaacccaggagactgaggctgcagtgaactatgatcatgccactgcactccagcttgggtgacagagcaagaccttgtctcttagaaaaaaaatgcacccccaatgtgtttgttcatttattgatcatttattgatatataacctactactgtgtatccataaagtatataattattttaaaactataaagatacatttaaaatttttaaatgttttaataatttaagggcaataaagatgaaaaggcaacgttttaaaataacaacagctaacagtgatacagtgttaattgtatgccaggcattgatttaagtgtttttcacacagtaactcatttactgtyttgctaagagcaaagacttcctgctatcattagctaatatctcaaggcaaaattcatcattaacaatagcgagtataattccatatttcaactctccccttgagcgtttcagagtattttggctagatatgatgatgatgattgtcagatatgactggattgtcattcctgggaatatcaagtgccagctctgacatgttcttatttgctcatgttttctatctgtagtttctttgcagaaatttttttaacctgttgtctactatgtgaggaataattttaatttaaaatttagtagtataatcaccagttaggggcacaggtcccctgcaatgggttgccatataccaaaactaacaggcatggaagagcaccagcatcccatgcacgcggaggattgacttacgtaccacgcgagggcgccagtgtcatcccgaatgaaaactaggaaagcatttctaacgtgtctcttacacgccgaccaattccccctcacattcatgtgcttcgtgtggagagcactcgtctcaggggaagagggataaagaggtttgcaaaactctagagctctgtgcagtgagtaaaggaaggcaaaaccgtcgtttccttaagctggaacaaatacctcaaaccccactccttggctttgtgtatttcctctcctacatctgggtatttctgttggtctccacaggaaacgtctgaggttatgtctagaacctctccttctcagttggcactccataaagaggggatgggtacctcacaaccacccagatggctaacgctggctgttttagtctatggattccccggagttcaggtgcacgttgatgtagctcctgttcgagtagggctaaaatttaagctggtcatttttgacatctttggttggccctgggatcagtatacctgaagctgaatggacaccacctgcttgtttctgaaatgacttcagctccttgtttaatagttagatttctgtttggaacaatcttgtatttgttgaaaggcccaaggantcttttccagttagaactcattaagttctggcatactagattttttgaaaaatgggaaaaagaaaataaaattattaaaaagcagtttccttttgcgagaagagaatgtgatagtgagcctactgtagagaaagtctaaaagagaaactgaattttcaagctctcaatttttcaccttctggaatcttccttcatcaggctgcagatgtattcctgaatagaagtaggtaggcatttgtgtgttataaattgcatataagactgattctttgtaaatgaaataatttagagtgcaactggaaaactgcctcaaagttattgttttgtgagtcagaagtgatttctgccaaattgaattatatggtaagtcaggaaggggcttgatactgtttttcttcaagtggagtacacatttaactcatgtttatctggagcaaaaataaggttaaacatttgttagaatgaatatgagtaattttgaaggtattatgtcaagagctaggttactctaattatgaagggtctgatttgcatcctgtgctggtgccccatcaacattttctgaagcttccggaagagtaatgcagagccattgccgaaacatttgagcaatcagacacgtatgcaattactagtaagcaataaacaaattaaaataacacaagcaacactgaagtgcaaggccacacagtaacagaagccgaggagattaattacacaaagttatgtgacactggggagagggaaagatcccttaacttggagtctgaagaactaggttcaaatcctatctctgccacataccagcagagttacttaaactatctgtaccccagtttcactgttggcaaaatggagtgacaacaattttattgtgatgttagggggattaaacataggtgcttgatagatttgtattagtttattctcacgctgctgagacataccagagattgggtgatttataaaggaaagaggtttaattgactcacagttcagcatggctggggaggcctcagcaaacttacaatcacggtggaaggggaagcaaacacatccttcttcacatggtggcggaaaggagaaatgcagagcaaaggggagggaaagcccattatgaaaccatcatatcttgtgagaactcactatcacaagaacagcatggaggtgaccacccccatgattcaatgacctccgacagggtccctcccacgacatgtggggattataagaactacagttcaagatgagatttgggtggagacacagccacaccatatcagatgtcctttgaactaagacttcctttaggggaaataagaaaggtgaacagaagcaacaggagttgcacagtagagcgagatgagtacaccatttggcagaattggaagtcaggagctcagatgtgcagcctggtctccccacctgctcagtgtccctccaggctatttaatagtataagtaattaccattacttctagtgtttttgccactcctatgtgctgaatacagtgctatacattttatcatttttaaaacatacagtacaattaactttttccttttggtatacagttgtatgaattttaatgcgtgcatagatacatatcatcactgctgcaacagggattcagagcagtttcatcatgacagagaactccttcttgctatcccttcatagccataccccttcccgtgtgccccccataccccatggttagctgcacatttaatacatgttatccactcacgtgatgccatgcactttgtttttctaacattcatcacacttgtaattacctgatcatattctagattgttagttcaagagcttgagaaccatgacattttcattttctgctgtatctctagtgcccagcatggagcctggcacataggaaaggaggctccaagacatgtaccattacatgaagtaatcttactgtctgtgccaccattttgccttgtcctttatcatcttcttcaaataaggaaatggagttgagagaagttaagtaacttccccaaggtcacatagtagtacatttcagagcccagatttgtcttgatctaaagcctgtggtctttctatgttaagacatatcatggtagatagaatatgtttgttttaactcatttgagaatgcgtaagtaaatatccagcatttaaaataactaaaattgcccttggactgttaaataatgtaaatgcttaaaccttgttcatttaccatataaacacaraatcttagagttaataccaaactgaggagatgttcctcctttgccaacagtatgaggggtggatatgccctagctcagaagagattggattgagagagagagggagacagtgagtttcatactggttatgtaggaacgaggctcagcaaatcaagtacagccagagatggcaatgtctcttcgtttctttggagcccctctgagattcccagggtcccagatgcagrctccttatttgcttggcacacttggcctcagggagctgagaggacacagtcctgggtaaataaagcaagatcaagtcatccccaatcctggagtagggtagggttatgatattctattggttttaccaatgtgaagtgtcttatataaaatccctatttgccaagctactgtattgctttgaaaaaataaaaaccattctctccttttctttctttgtatatttaataagtatttatcgaacatctattctgtaccagacactcattgggaataccagagcaaatgagacacacctaagtctctgtgagcagggctgatgcatactggtgtacagaaaatgggatgcacaggggctgaggtgatccaagcaggcttgatggaataggtcacgcttccaccaaaaaccgaaggatagttttccaagcagagagatagggatcagtgtttcacgcagaagaaaaacatgatggtcatagttccagaggtcactgagagttagaagagaggaaatgagagaagttcaggaccactgaaggaagcaagagatgtgctgaagagtgaatagtaactagatcattcagtgtctgtaagacatgtcagcatctaagagaaaaaagtggcattttaagggcagtagggagtaactgaagattctgagcagtgaagcaatacatgtgtatttgcagtgaaatcgcaggtttcagatgctttaaaagcatcaccttcataccacttgtgattccccaggcctatctcttagattcacagttgcattgcccaggccaccttatttctggcttagacccctaaccttgatgaaggcccctcctgctcatgtgacattgaggagacattcattccttcatgttcacagatctgactttatgcatcaaaccatcctgcctatcttacggcagttgatggcatcattttgaggagaaccaggtaggaaagaagggagaatcctcatatccttaaaataagtgtacaggccgggcctggtagctcacctctgtgatcccagcactttgggaggttgagatgggtggatcacttgaagccaggagtttgagaccagcctggccaacatggtgaaaccctgtctctactaaaagtacaaaaattagcctggtgtggtggtgtatgccttagtcccagctacttgggaggctgaagtgggataatcacttgggcctgggaggcaraggctgcggtgagccaggatygcaccactgcactacagactaggtgacagactctgtctcagaaaaataaaataaaggtacagcaaaacctatttgatcattccacctttgaaaatagatctttaatctctctaatattttggtcacatttcaaacacatgtagccctctctggcctcatatagttctttgaaacacctcttgcagtccttcatgagccttttaaattctagcacttctttcttgccatccagctttcatagcactcctaggtacagaggcattgcaactcactagtacccaccaggtggtaaaatggaggcttctcagtctgctttgccagactggaatgtcaccctagccctcaaggccgctgtccagatggtgctcagggtgaagtaggggcttctggaaggagatgatatttaagctgagtactgaaagccaggtgggagttatgtaaaggaggtggtgatggttagtggtttgtgatgagctgcaagttctgtagtttggtgtgggtgggatttgagtaagggctagaatgtggggagatcatcagagattcaatcagagacggcaaactggaggctcacggacaggagccagcccacagagcaggctgttagactcataaaagaaaatgaccaaatgttgtgttttaggaaaaatcactctggttgcaactcagattayagagtagaaaaatggactatggcactatgtataaattaaggcaaccttccctctggtggtagggtaggggtggtcaccttagcatagaggttgatggctgaaagcatagactctggtccctgctgcacaacttaataggtggtgacctagagcagttatattctctgtctctcattttcctacaatataaaatgcagataattaccacacctctcacagaggagtggagtaaggattaaacgagttcatatttgtaaagcatttagagtattgcctgctatataaggtttattaaatgatgggatgggtggccagacacggtggctcatacctgtaatcccagcacttttggaggctaaggcaggaggactgcttgagcccagttcactagcctgggcaacatagcaaaacctcatctctctgaaaaatacaaaaatgagctggatgtggtgrcacatgcctgtagtcccagccactcaagaggctgatgctggaggatcatttgagcctgggaggttgaggcttcagtaagtcgtggttgtgccagtgcactccagcctgggtgacagagcaagaccttgtctcataaataagtgatgggaaggtttttctggacctgtaactggatgtgtttctctgaccttagagtctcttacacttttaacagctgagctgaactctaagcacatagcagagcccacaatgtggttgtatttccccgaatagtatgtcccttttttacatcctcctagcataggaggacattgaagattttaacatctcattataaacttgtttttatctagttcaagggattaaaaaacaamaaaccatggcatagaaatgttaagcaaaagggacaaccagctaatggcctaacacctgtcctgccaccactcagctgatgattggtgttgaagatgggattagaatccaaatcttctcacctgtaatcmttgttctttcctctttcctatgagttagagctctttgtgtttttacctttgttttrtgacacttttcattgtttaaatgtgtttcttatggcctgaatgtgactgaatgttttttagggcaggatttacctcctaccttagcatcatgactttcacccttatttcttttctaatctcacagaatagcttgagtgatcttttaaaaacataaattgattttgtcattcttacttcagtcaatggtttttttttgttacacttatgctaaagccaggatccttcatgtgtcctgtaaatattgagtggtctagctgctacctctctctccaccctcatcttgctcctcactctcccactcagccacatggccatggttgagtctatgctcgtgcatcatgcccccattctacygcagggcccttgcacctgctgttgctactgcttgggattctctcccctcccctccttatctcatgaacttccatgcatcctcagcctagtcctcatgtcctcaggaagccttctccaatgtgtcctgtccctctgcaggctggccttgtagtactaagaatttctccttgtcctctctttgatcagacttgtgatcttatgtttgtacgtgtgattatttgatcagtgtcttagtatgttctctcacttctctaaagaaatacctgaaactgggtaatttataaagaaaagaggtttaactggctcactggtccacaggctgtacaggaagcatggctgggraggccttagggaaacgttcagtcgtggtggaaggtgaaggggaagcaggcacatcttacatggccagagaaggaagagagtgaagggggaggtgctacacacttttaaacaaccagatctcgtgagaactcactcactgtcacaagaacaaggggaaatccacccccatgatgcagtcacctcccaccaggcccctcctccaacactggggatcacaattcgacctgagatttggcagaggacacaaatccaaaccgtatcagtcagtgtctgtcttccccactggactattaagatcaggccatgtctgatatctctttcagccagtcttttatctctactgcctactccagagcctgttgcatagaaagtgctcaaatcacatattggytgaattaaaaatcagctattttatttcttagcacctaacacagaatcgaatggaaatcaagttttaaagagcacagagtaatggttcatgtcaccatatctactcagtgtcttctagcattatactaaaaattttatttaatggcttcaattaaaaaaaaaaagccttcagtatttattgccatagggtagataagccagctagtcagaagtagatgttatatccataccttacctctttgtccaccaattttctgaaaatagagatcccaaatatttatttktcttagtgttttatatcctacccctctagttacattttttcaaatgtaatgttttatttctcccagttttattgaggtatgattgacagaaatcatgtatttaaggtgtgcatgatttgatatacgggtgcattgtgaaatgactgccacaatcaagttaatacatccattcccttacatagttaccagtttttgtgtgtttgtggtgaggacacttaaaatctactctctcaggtaatttcaagtatacagtacagtgttactaactaaagtcaccatactgtacattcgatccccagaacttactcattttatacctgaaactttgtaccttttgaccattatctccccactttcctcaaccccagcccctggcaaccaccattcgactctctgcttctacgagtttgactcttttttagattccacatatgagatcaagtggtatttgtctttctgtgtctggtttatttcacttagcataatgccctccaggttcattcatgttgttgcaaatggcagaatttcyttctttttgtggctgaataatatcttattgtatgtaaataatatacaccacattttctttaccattcatctgttgatggatgctaaggttgtttcagtgtcttggctgttgtgaataatgctgcaatgaacgttgggctatagatactgatttcatttccttttgttatataaccagcagtaaaattgctttatatgatggttctatttttaattttttgaggaacctccatactgttttctgtaatggctgtaccaatttacattcccactgacaggacagaagtttcctttttctacacatcctcactaacacttgtctcgtttttttgataatagcgatcctaacaggtgtgaggtgctatctcattgtggttttgatttgcattttcctgatgattattgattttgagcatgttttcatrtacttgttagccacttgcttatctttatttgagaaatgtctattcagatcctttgtccgttttttaataaaaaacaaaaagatttttaaaaagtgagtttaatacattgcagtagaaattaaccaaaatgggccgggcgcggtggctcasgcctgtaatcccagcactttgggaggccgaggcgggcggatcacgaggtcaggagatcgagaccatcccagctaaaacggtgaaaccccgtctctactaaaaatacaaaaaattagccgggcgtagtggcgggcgcctgtagtcccagctacttgggaggctgaggcaggagaatggcgtgaaccygggaggcggagcttgcagtgagccgagatcccgccactgcactccagcctgggcgacagagcgagactccgtctcaaaaaaaaaaaaaaaargaaaaaaaaagaaattaaccaaaatgaagcattaaaaaaatgaaagcatccttaatgagctatgggacaacctctagggactactacaggtgtaattagattcttccaaggagaaaagagagaaggataccaaaaaaaattttttttaagaaataatgggtgaaatttttctaaatcatatgaaataactgtaagtccacagatctagaaagacaaactccaagcacatgaaacatgaagaaaatgacactaaggtacatcatgctcaaattgctcaaagccaggataaatgcaactttattttcttaaacaatcttttttttttgagacagggtcactctgtcaccccagctggaatacagtggcaagatcttggcctgttgcagcctccttctcctcgattcaagggattctcccatttcaactttctgagtagctgggattacaggcgtgagccactgtgcccagctattttcttatacaatctttaggccttttcttttttcttgcctatctagaaccttccagtatcatattgaatagaagtagtgagagcatactttttttgttttgcccagtgttatgggaaagcatgcagtatttcaccatgaaatatgatatgagctaaaggttttccctagatgccccttatctggttggggaaggtccttaatttcagttcactgagttttatgaaaggtatcgatggtgagcatcttttcacaagcctgctggccatttattttatgtcatctttgatgaaatgtctcttcaagccctttgcccattttttcatcggcttgcttgttttgttttgtttgcaatagaattgtaggagtttcttgtgtattttgaaaattaaccccttatcacacacatgctttgcaagggttttttcttatgccataggctacctaccttttggttttgttgattacttcctttgctgcgcagaaacattttagtttaatgtagtcccacttgtttgtttttgcttcattgcctgtgctttgggtatcatatctaaataatcattgccaagaccaatatcaaggagtttttttcccccatgtttttttctaggagttttatgatttcacrtcttacatctaagtctttaggctattttgagttggattctgtatatgatataagaatagggcccaatttcattcttttgcatgtggatattcacttttcctaataccatttattgcagacactcttctttccctaatgtgtattcttggtacccttgtcaaagattagttgacaacatatgtgtgggtttatttctgagctctctattctatcagctatgtcataattgagctccttttctctaagatctaacrcgtgtgtaattcaaacatgggttcaaaagtgctcatcttgaagtagtctagaaatccaccagcagccactaaayccaacgtagatgagggaacacgggttgcatgyagctgtaaggcaagaagarggaatggagagaccgagagtgacatcagctggagaactaagggaggtgggaagtataaagaggagatttgaattggctgcatcttgtgaggcctgggctagactggctgtctagggtgaaaacatgttctaaaaattcaggatgtagaccaagaaagatgggacaattatcccagcatttaagggctctaaaaggggaaaatgggtctacttatttcccgttggraaacctgagaaagggcgtttttccaaggccccagatcaaacctactctggggttgaaatagatgggaggttccaggcacggtggctcacgcctgtaatcccagccctttgggataatctcagcactttaggaggccaaggtgggtggatcacttgaggccaggagtttgagaccagcctgggcaacatggtgaaaccccatctctactaaaaatacaaaaaaaaattagcctggtgtggtggcacrcgcctgtagtcccagctactccagaggctgaggcatgagaagactgaggcatgagaatcgcttgaacctgggcggtggaggttgcagtgagcctagatcgcgccactgaactccagcctgggccacagagtgagactctgtcaaaaaaaaaaaaaagacgggagttaaggagttaggtgttcaagctggactcgtacagacttgtctgtttgtaggagagttttatgcaaacacctacacttcaaattagagtagatctcaccctccaagtagtagcttagtgtatgatcatttgggctcccttgctaggtggggaggcagagrccgcttcatccttctggtgctagtaacaacaatggctcatttggggacccttccctgagtgttttttttgtttttgtttttgtttgttttattttgttttgtttgctatgttttgaccgcattgtttgcagacgacagacaaccaagtggaccctcagtcccatagatgtcccacaatctgtatgaccctgaggcaaagtccacagccgttctcactcctccctgtcgtcctctcccacaggaatccgagggtgtttcctgccactattggtcgctgtttgacgggcacgcggggtccggggccgcggtggtggcgtcacgcctgctgcagcaccacatcacggagcagctgcaggacatcgtggacatcctgaagaactccgccgtcctgccccctacctgcctgggggaggagcctgagaacacgcccgccaacagccggactctgacccgggcagcctccctgcgcggaggggtgggggccccgggctcccccagcacgccccccacacgcttctttaccgagaagaagattccccatgagtgcctggtcatcggagcgcttgaaagtgcattcaaggaaatggtaggtattcctgggagtctggggcagcagggccaggctggcgcctgcgccaggtctgtccgtccttcctggagggctcccagaaagcgcacggttttgctgcctggctccacctggacggccccctgtgataatggggcttccattcccaatagaaattggcagcagacagagttcctggcatcaagtgctggcaaaaatgtaaaagaaggctgagtgcggtggctcacgcttgaaatcccagcactttgggaggccgaggcaggaggtcaggagttcaagaccagcctggtcaacatagtgaaaccccgtctctacaaaaatacaaaaattagccgggcatgatggccgttgcctgtaatcccagctactcgggaggctgaggtgggagaattgtttgatcctgggagacagagattgcartgagccaagattgcgccactgtgctccagcctgagcaacagascgagactgcgtctcaaaaaaaaaaaagtaaaagaagatgaaagagggggacagtgcatgaggtcagaggcttattaaatacaggccttattgcttttatttcctatattcatattgatgccagctggtacgattgcacttagatgtgagcatgatcaccatctgttttacagatgtgtataaagtccggtgttgggggaaacagggtttaggaaagtgctcaaaagtccccatcctatacagatgtgatctaagaacggctgttttaccacaactgggaatgtggttcacactgcagacaaagtgctggaggagaacagagccaggggccaatatccaagaagtcttagtcttacccaggcatgtggatttgtstgttcgtttccatctgaatgggtctgatcgggagttcatcatccttcgctgttggcctcactcctgagcatgtcctcgggagagtgccacagctctcgctgtcccttgctgcccctctgcctggcaggagtgcacatagaagccgcctctgctttgttctatgccagctctttccctctgtgagcttactttatcctaagccaattattttggttttaaagattttatttcttgctcggcagcctgcatacagataaagaataagagatatttaaggatatttataagggcttgagttaggcaagtgggcagtcatggccttaaaacctggagattacaggccgggcacggtggttcatgcctgtaatcccagcactttgggaggtcgaggtgggtggatcgcaaggtcaggagttcgagaccagcctggtgaataaggtgcaaccccgtctctaccaaaaatacaaaaaaattagtcgggcgtggtggcacatgcctgtaatcccagctacttgggaggctgaggcaggagaattgcttgaatacaggaggcagaggttgcagtgagctgagatcatgccactgcactccagcctgggcaacaacagcgtgactccatctcaaaaaaacaaataaacaaaaaaaaaaaacctggagattacaaagtgatgagaagctgttaaatgaagtcaaarcagctagaagcgtcttgccagaaccggayaggcayatggtgcatgttccaggatctcacggcatcaggtagtgtgctaagaaggaaagtaaataatgactatacatatcgtcatctgatttgtttgtaaggcaaaaatagttcatatattcacccctcaaatttgcatyctctttttatttaaacgtgtcccttctttggtctcagctttttctctccttgttacagagataacatttaccmtttgactagcaggtggtttaaaatgcaccttgctgggcgtggtagtggtgcatgcctgtcattccagctactcaggaggctgaggccggaggattgtttgagcccaggagttctgagctgtcatgtgggttcagtgtcaatgtggtgacctccttggagcagagcaccaccgggatgcctgaggaggggtgacctagcccagatcaggttatatctccagtgcttttttgtcactgtattccagcttgtgcaacacagcaaaaccccatctcttaaaaaataaaattaagaataaaaatgtaaaaataaaatgcacttctatctcaagactgtctgatagcctgcaaccctgcaatcccaatraaaataccaggaggctggaaaagattatttaggaaaaagggaattaaggtaggaaaattkactcccactcagtcgtggtgtaaaatctcactctctgcctctgtagaggctctgatgtcaataaatgtttctagacactaatactcagaatgccaagtattgaatttatttttttaattatttaggcaaaaatttgacaatgggctctccttgtaatgtaatgtaatgtaattcagtttgcatggtagaagtgaaaaataaaggaaacgttgagattttcatttccttcagttgtgactagtgccacaggacatcttttacctggagctgctgcattctcaattttgtccactagaggccaatgtcacattgactcaggactccacaggggtctcaggctgttcctgcccattaatggctcagggttgctcttaacaactgtgctggcaaagaaaggttcwttcagaaaaatacttaagaggctcatttttaaaatatttctacttttaatgaaccaattcattacctcaaatttttcttggaaacttagtcaccagcaaaaacaacaattgtttgcttcattttcatgtgtaattcattcaatcartaatatttgttgagaaccaactagaagccaggcctgactgggaaaagaatattgagccgattaggcaaagaagggtgttaaacaagtaaaatataaatgggaggagccttgagaggggaaatacagggtgatgcaggagtctggtaaagagatgaagggaaaggttccctggggaggtgatgctggggtgtgggggctcaggagtagagcagacatgtgcagggcagggttgggagaatgaatgccctggggctcaggaaacctgggtaacaaaccgagcctgagaaaaaacccaggtaggccaaagccagtaagccaccattgctgtggtgggaagatagatcttaaatgtagcaatggcaggtgaatgaggaggaaggctggagygcccctgtggagacccaggcccagatgtgccatatcatgaacytttagctttaagctatgtctcttccctgtttgttcctttcaggtttacccccatgccctagcttcctcttcacactttttccccccagattgtctgtctaggtccccaacctgcctacagcttrccggggctttgcactgtgaaaggaaaataaaaactgggcccccaatccactatggaaattggaaatcactaggaaaaaaaattaagctgaaagctgagtcgtggaagaaactgtttccttttgttcctaagcagatactacagatgaatggttgaatatctccacaggtagctactctgtgttcaccttayctcacgcaaagtgttgatttattgatttccagagccycagactatcccctacytgctccttttctcttggaatatgtggatgaccataccctccctctttcccctccggcccacttttcccctttaaatactgaagccttcaaattcatctttggagaaaggtacagactacagactgtctctgtgatctgtgttttttttcttccaggcatgtccttacccttggcaaaataaactgaatggattgagacctgtctcagataccttttggtttacagcacctttctggttggccttattaagtgagaagctcaccattctttggttctcatggcacctggaagggtggccataccttgtgctttgctggggactgggycagtgggtgcctgctgtcttaattgttaatactctcccatttcactctcagatgtgaccttctttggaatgataagtcttctgtttaatcacagatgctcttgtttttctttgcgtcatcrgagatttcagaraaactacactcctgtttcatagaaacaatgcctgtcttaaccttatcaaattgcttaaggtgagcttcagaatccacagcacagaaattataccagcttcaaaataatagctggaaggccattgccaactcctttttctttcctccccctctcaatattaggtttttgagagtcrttgtcttaccgtgtaaacctttggttttttgaaatgcccacaagcsccayggtgtgccaggcaacccgaggacagttcacacagctgtctatagcaggacagctttgaattttccagatcattcctaaactttttttttcacckcagtagccacccactctctaattttcctgtttctagatgtcctttaggtattgygggttttgtgccattgattttctataataggaaattcaatattaagtaagagttgtcatataggcatttcagctttgtggctctcttgccttctcttccacttttaatccctaaaagtaaagttccccaagccttgcacctaagcctctaatttgcctcactgatgacatttatgcagctgtccctctggagattctgagtgtcacaatatccttaaaagcagagcttctccttcactgggagtttttgctttatttataagagctcaacaatgtggaatcagaattctttggactctctttgtttctgtctacctgcttgtctgtctccatctgtttgtcttgtccctcaatggaatgctgtgatattatgatattctgtcttcaactccatgtcctgacatacaactcctaaaatccttgaaatcttcaaagtgataagtatctttttgtatcctaatgagatgactggtggctggcagcccctgggtagcttctggatggggtctgttcatcaaaaagaccaaggcaggattagagggctgtgcaactaagtagaatcacacagtaaactgccgttgataatgtagatgtcaggtgtattaatgtgaataaaatgaaagaatagcctaatttagatttgccccaataatttgtgtgtgtgtgtgcgcgcacacgggtgcacgcatcctcaacctcatgagaggggagaagggctgaagggtgagttgatcaccaacagctgatgatttaaacactcgtgcctatgtaatgaggtctccataaaggcccaagagaatagggctcagtgagcttctgggtagctgaacatgtggaggtccctggagggtcacgtgccaagtgagggcatggaagctccacaccgtatgcatctcttcatccatatcctttgtaatatcctttataatgaactagcaaatgtaagtaaatttttcctgatttctgtgagccactctagcaaattaatcgaaccttaggagaggggggtcttgggaacccagatttatagctggtcagtcagaagcacaggtaaaccaacctggggcttgcgactggcatcagaagtgggagtcagttgggggactgagccctcaacctgtgaaatctgatgctatctccaagtacataattgtgtggaattgaactggaggacgcccagctggtgtcttctgcagaactgattgcttgctggttatgtgggggaaaactctcacacatttggtcacagaagtcttctgtattggttgttgtgggatgagaacagaggaaaaacagtttgtgttgttttcactaagaactgctcttctcagtcactagtatttattgagcttacatcttaaaatcagtattcttttagacaccactgaggaagtaaaasataagatcttatggtcaggcactttggtccacacctataatcccagcactttgggaggcccaggtgggcagatcacttgaggccaggagttcgagaccagcctaaccaacatggcgaaaccctgtctctactaaaattattaaaaatttagccaggcgtggtggtacatgcctgcaatcccagctacttgggaggctgaggcatgagaatcatttgaattccggaggcagaggtcgcagtgagccgagatcacaccactgcaccctagcctgggcaacggagcgagactctgtctcaaaaacaaaacaaggctgggcgtggtggctcacgcctgtaatcccagcactttgggaggcccaggcaggtggatcacgaggtcaggagattgagaccacggtgaaaccccgtctctactaaaaatacaaaaaaattagctgggcgtggtggtgggcggtagtcccagctactcgggagcctgaggcaggagaatggtgtgaacccgggaggcggagcttacagtgagcagagatcgcaccactgcactccaacctgagtgacagagcaagactctctgtctcaaaaatatatatatatatatattttatctgggggcatttgtagtcccacattatatgaatatagaaatatgcaatatcttatttattttgatattctaaataacaaaaggaggtagtgaaatgttgacacctttccaaaagggatacactgttaaaaatgttcagaaacactcaagtcaaaataaatagtacctatttctggggaaaaagtaggtactagtcacaaaatacagacgaacagaagagaaaaaaatgcttccaatgaggggagatggtaacagtttcatcaaatactataagcttctttgagagcagtgcttttcatctttggtcctcgggttgcctggcacagcttggggcttgtggtgaaggtgacctatgaccactggtttttaatacttactgtgtacactgtcagaggtaggtgtgcccctacaaccccctgattgtatctcagatcttccttcatagtgtgaaggctatgtagcgaatccctcctgtgtccactatgaaaagtgagccatggcttcctaaaggaccaaaatctcaggaattttccgactgacttcaattctgcttcccagcaaggcctggcttagctctgttttgtcacctattatatttatattgtcgcttggcccaggacaataggtataaataagacaagtgtcttctaagtcctgatttcaaacctcctccctacttctccaccctcccaaaaacatggttgaataatcaacatttcagactcatggaggaagtcgattccactgcagggttagttacaggaagcctttgccctcctagggatcagaaccaagttagcagtgattaccgttttaacctgttaactatgggatttgagctctggacatagccgggaggatctcagagttctatttccttttaagagtgggtctagattccccaccagagtcggttcttaggaagggaagaaaatggcaatattttaacttatggaactactatatgtaattccatcactgggtaaatgattggaaataccaagcagctagactttgttgataaaaaccttataaatacatggtgacattgtgacaaaaagggggcaaagtttatagtttagaaatctataaattagtgtttatagattaattataataaataaattagtgttttccaaaattagcatgttaatggtaaattgggaacccacatagctgtcttaaatttaagttggttttgttctctttgtttttgttagaacgggaagtttctctaggaaggaatgagcatgtgattccrccagcagccggcaggtggcaatagtaggcagtagagtgctggcttttcttccccattgcctggctggcagatggccttgttctcagaataaactgggatcagatttggatactaaaaccatgcagaatctgattatttgtgactgacactattagcaatgtgctcagagccgtgttttaactcagctagggggagctgccaggtcctattgaaactacccaacacttgctcctttytgstaccagatattgctttccttttgcaacctgaaattggtaggaaacaaagaatgaccttggagttgcatcatytatgagactttcaaaccaaattattaccatcccgggcaatatttttytyttgcacttctttcctgctgaattagtctcattgcacacacatctctgtttgccttttttttttttttttttttttgaaacggagtttctctcttgttgcccaggctggagtgcaatgacgcgatcttggcttggcgcgrtctgggctcaccgcaacctccacctcccgggttcaagcaattctcctgcctcaacctcccgagtagctggggttacaagcatgcgccatcacacccggctaattttgtatttttagtagagacggggtttctacgtgttggtcaagctggtctccactgcccgacctcaggtgatctgcctgcctcggcctcccaaagtgctgagattacaggcgtgagccaccgcgcccggccctctgtttgctttctcggctcccgtttctccttgcaacaaggagcaaaataaaatcccacatcttaaaaactggatccattgtttgatttaaagattaacctcgcttaaatgttgtgtttaagcagacacaacagaagataactcagtcctgctacctagaaagttgccctgcaaggtcttcaggactattgattaagcagataaatcaattatcttgttaattgaatcttaagagtcatttaatcgatccttttagaccatacttgaatgatagtataygcatgtgttttgctaatcagtttattctagacacagggctcggggttcattgacagcaaaaatagggagatattctaaatcagtccttgcttagcacaaagcagtaagcagtttttcccgtggtttcattgatttttgtaaaaataccaaaaacttgaggtttttaagaaaatacttccatgtttttatttattatgtagaatattaaaaacttaatctaatctgaaaggtgaggatttgaagaaaaaaggtagataatgcaatggtaaatgtatctttattgacttaatatatcatgtttgctctgatagtaaaagaaccacccagatggtcctttaatgttcctttcagtactaagattttgtgaaacatcttttaaagaggagtaggtggtgtatgtagggaaaaaataaatgtgctattttggcttctagggaggagggggagggaagcaattatttttagaatatgttctagttgcacacggttttagaagaaatagaagagtgtgttttaacgacagtgaatccttcagggggatgaagtctatggaaacacgtctttcaaatccttcccaccatgatcccagagaggacacttgtaattaaagtgtgtgtgtgcacatgtgcatgtatgcacacttatgttcccacacaaatgtgggggagggaagtggcaaacgcatgcacatgttagcaaagtttcttggattaaaaagtacttaagttcactctttatgagaaagtgctgccaaatttagcattccttattcagggggagctacagagggaatgtagctgaacgtagaaaaaggtgaaagaaataatgaaatcagttagaaaaaaaatattgagtcacactattaatataataccaaggggttaaatgggtaagctaactggaatgtttcccccaaagttaaagcagaaaagttttagtgctgagctctttaccttgattttttcccctaagcattacataattttctaagcagaatttcttgtgatagaaaccatgataaataatgtacctacctgtggtgtagcccgaacttgcttaactgagtcccaaaggaatttgttgccgtggacggccctgttacgtggactttttgcaccataacgtttctaccttttggatcatactagtggtttgatcaagtctatcaaacaaacatcattcacattctagtctatagacagtatacaagcagtaggtgttcagataattttttgagatgaagtctcgctctgttgcccaggctagagtgcagtggtgtggtgcgatcttggctcactgcaacctccggctcccgggttcaagcaattctcctatctcagcctcccaagtagcttggactataggtgcacaccaccatacccagctaactttttttgtatttttagtagagacagggtttcatcatgttgatcaggctggtctcaaaatcctgacctcaggtgatccacctgcctgagcctcccaaagggctgggattacaggcatgagccaccacgcccggcgttttcaaataatttttaataaatattgtctttcagccttttaggtattcaagcaaatattgattctgacagtgaaaaaatagtctctgtagctgagcagttccttttgatgtattggatgcagactctttatcaacttatataattcagtaaaatatgtatctatcatagtatcaactttatatgcgttctttaaatgcaaaaaaagtagcaattccatccacaaaccccttagtagggtttggggttctgtttttatgggttttcttggaggttaaacaggcatcttgatgttttccttctcctctcttctatttgcttgagataattcttcccacctgacacccgtgcccctcctcctcatcctccagccttctaccagtcttgtgtaggttctgataaccattcttgkcagtcaagcattttaattgaagcatgggtttctgcttaattattatctcagcgagcgttggcattgtaagcttttcatttgtgaattgtggaatccatttttcatattaaggcagaggtaaggggagaggcagataaaaaaaatttaaaatttatttcttcatttgtccattgaacagatatttattaaactaccatttacctggcctaacctaggtgttgagggtctaagatgagcaagaaaggccaccgctctcaatgttgaagcttctgggctgcgggaagggtccagatatcctactaagcccctcacacatgccagctaatttagccttacgacagtcctttaagaaagctaatttatacacagttgaagtaaatgttaaaaatcccacatagtcctttgaagtttgccccatgcttgatgcttctgcagcttttgctgctgctgttcactcccatattgaagtgtttcctcacttgtttataaaccactacatcccccaacacatattcctacctcctccccgtggctctccagttcccctcccgcaatctcttacccagctctctcccagtgtgttggtctctcccaagtcctggctttgtgttttttctctatttactggtttttgttgttattttgtttttgtttttgagacagggtctcgctctgtcaccccggctaaagcacagtggcatgatcatggcttactgcagcctcgaactcctgggctcaagagatcctctgtcctcagcctcccaagtagctaagactacaggcatgtgccaccacacccagctaattattttttatagagatgggggtatcactatgttgcccaggctggtcttgaactcctagcctcaagtgacctcctgtctctgcctcccaaagtattggaattacaggcgttagccaccgtgcctggcttccatttgctctttaaccartatgatatccctaagctcaagctcttctgtttccagtttcccattggtgatttaccctttttatgttaccatctctggcccctagagcaaagcagttgctggtaaatgctggggtcttgacttctctcccccttttccatgaggagtctggttgaagcagctgagctctaactctgtgggattctcaggattacaatagtggcctgaccctagatctgccaacaacagcatcaacgtcaccgtttcttcctcttcctgtaatttttagccagccctcattttccttccctctgcaccaaaagtagtagattaccactggaagatttggcattattttagccaggcattcaatgtatcttactaacacagatttttctgaggtaacagaacctttgcttctatcgctaacacagaatttcacaggtatctgtcttgatgatgccagtgttggtctatttttaatatcaattccttggggaggcctcattaggtggcaggtaacaacacaaactttggaagagaagcaggttggaatccagactctagccaggtaaatatgggcaggctaccccacttctctgcaactaaacaatgaggttcatagtgatggtcttgaggacgatatgagagtttgagtataaagtgctcagcacactacgtgacgtagagaaagttctcaatgaatgtttctaattattataaacgttttaccattgtaaattggtggctgtgggaagaggaaaagtcaggtcagagttcagaagccctataagtcatttgaagtcatttaagtcattataagtcatttataatttatttaagtcattttaagtcatttataagtcattgtaagtctttgccctataagtcatggcttgactcctgcctgtgttgaatagaagacatctttctgtaatttatctgtaaaagagactatttatccaagactttggagtttaaaacattgatcatatctgggctgggtatggtggcccagtgctttgggaggctgagacaggattgtttgaggccaagagtttgagaccagcctgggcaacatagtgagaccctgtccccacaaaaaatggaggagttagctgggtgtggtggctgcacagacctgtagtcccagctactcaggaggctaaggcaggaggcttgagcccaggaggtcaaggctgcagtgagctatgatcataccactgcactccagcctgggtgacagagcaaaccttctctaaaaagacaaggctgggcgcagtggctcatgcctgtaatcccagcactttgggaggccgaggcaggcagattgcttcagcacaggagttcgagaccagcctggacaatgtggcaagaccccatctctacaaaaaatacaaaaattagccgggcatggtggtgcgcacctgtggtcccaggtactcggaaggctgaggtgggaggattgcttgagcctgggaagcacaggttgcagtgagccaagattgggccactgcactctagcctgggtgacagagccagatcctgtcttcaaaaaacaaacaaaacattgatcaggtccaagtacttgtcatcctcagcctctctagtgtatgtttcacatggtagctcatgcaatccacaaagactaaattttccataagctgtgatatttactgaatacaacttacattttatttgcatttttgtctgattgtttctgtttgctgtctattgtttcctgtctctggttcacagatggtctaatatgtggcagttttatgccagtgtcctctccagaaatgctcatcaggtggtaggaaagcaagcactaaagatttttctagtcccttcttgaagcacattcagagtctggggactgtcaagagaatgaaagtgagaaagcttttgctacacatcctgcacaatccaacactaactctgttttattctccaggacctacagatagaacgagagaggagttcatataatatatctggtggctgcacggccctcattgtgatttgccttttggggaagctgtatgttgcaaatgctggggatagcaggtaagcagatgagctgtctgattcttgctaatttctaatgccttctgatstttttattttgtctcaaaaattaaatgattagaaataattaaagacaggccttctacatcagaatgaaaatgcatttaaggacaatcaggttgatattacaaggtaaaggcagtctcttacttatgcatatagcatttcatgtacacgtctgtgataaatctaaaccagtagtattcaaacgttttttgacttcagaatctgtttctcagtgaaaacttagcaggagcataatatgtgagagtgatgaggaggaaggaaagggattcgagtgccctgggtgtttggaagggggcctgggatgactccccagttgactccacttttacttagtgactttgcactgttctctcccagaagcttctccttttatgcacattcccttagaagctgcagttgcctcacgtccgggttcaactgaaggaaatttgagccaagagatcattgttaacccttcctttatccagcattgccagggaataagatacatttatgtttttatttcatttattttttaaaaattagacacagggtctcactatgttgcccaagctagacccaaattcctgggctcaaacaatcctcccacctcagcagcctgagtagctgggattacaggttgcaccaccacctggcagttgtgattttcttttaaataactgatgcttcttcacttttggtgtggggaatttttaaattacagattttgcaacaaatattytaacatgtattacacacttctccaccgctttcataacgaaatatgctggcctgagagtggggccttttccaaagaactgactctttattccgaaagtagtaaaagtacaggactcttccccccgaagggctgtgaggactctcattcttctgtccccttcctctaggtcacatggctcttgtgggctctcctgcttgctccaccctttttgaggtctgatcccaccccttccctttccccttccctgtctccagcttaagttgctgttgcctctgcagcccagaccaccaattcccttgaggcaatcaagaaattcaccttaattttacttccatttacaaagcagacttaggctgaggcagccttcgttcctcctagtaaagcgtcctttccaagggaagatcccagagaacaaggagcraaccgacctggcagtggttttgggggcttgaagattggtgtttgttgaaggtctgttgctttcaaaagtatatatgtggtgacataaacgtatatatatacattttacracaaatattctaacgtgtattacatgaaatgtaattacatgttctaacatgaaagaggtggagaagtgtgtaatacatgttgtaaaaatgtatatatttacgtttccttgtaaaattctgcccagtaaatggaagtatgtgtaagatgctatctatgtttaccccatggctgccattcccatgtctcaggtcagggttctgacaggagacagactccaactcagatgggtcaactgtgaatgaaggaggtagagagaaccggccaggagtgttgaggtccccaggaaggagttgaccaccctgaggaaccagggaaggaaacgctgtagcagagccaaggagagtgggagccactaatgagggaccactgggcaggagctgttagaaggaatgggagaagatatgctgacttctctctgcccgccctcmcatctcttgcctgaccttcccatcggctgaccccagcaggaagccagctgatgagtggcccagggaggtcagcctgccaggacacagacacaggccagggccgtacctccaggatggggacagatggaaaagaaccagcacatctgctacccctcctttcctctcccgcctcagggtttgagcagcttcaaagacaggaatctatggtcttcaggggcttttaaaacacactgagtggccagcccctggcctcttgttcagttcctgatcttgagctggtcggtagacagaggagagcagcaaaggaggcaattcattgctctttgtctgctccaattgagtaagaccgagtggatgattcagctgttgcactcacgttcaccttttaaagcctttatgtctggtttcctgtcctttaaaatgagtttgcttcctggcccactcagggactaaggaagtgactgagtgccttgctcctggaaacaggcccaccctacctcccagggaagtgcctttcaccagatgacctgagtcagaagttaactcaacttcccggctggaatacctttatgttagactgttcttcgagactcaactcctccccagtgcctttttctctcttttttttttttttttcctcatttttaaacgtagtttccttcaaagctccaggctccttaaaagagccacctacctagccagggcttctaagcctgcatcccagaagctccagtcctctgtcctggaatctgccagtcccaagagttcatcttctgggctcttgccttctgttgtacttaggtgccaatttccagaccagacttcaatttcatctataaaggcagtggtattggactagataatctctaaaaattatcccatgaggagtgacacttttagaaagtaaagttgtactataaagtatcttttggttattttatatttcttagaatttgttttggaaatgttaatgtaactgaagttcttgtatttctaagtgttcataaaagtatgatgttttggccgggmgtggtggttcacgcctataatcccagcactttgggaggccaaggcgggcggatcatgaggtcaggagatcgagaccatcctggacaatatggtgaaaccccatctccactaaaaatacaaaaaaaatgagcgggtgtggcggcacacgccggtagtcccggctacctgggaggctgaggcaggagaatcacttgaacatgggaggcagaggttgcagtgagccaagattgtgccactgcactccagcctgggcaacacagcaaggctccgtctccaaaaaaaaaaagtgttttgttttacatgttatatctaatcatttgaaaagcctaacagatacttttatccttaataaagctgtaaaacatttaaaaaaaaatcaaaaaagcagtatctctaaaacctaataagcttaatgataaaatactacctctaaaacctcataagcttaattatgcttacagtattctagycccagtatccagatataaatttggggttttgtagttgattatttgggttttctgttcacatatgggtcatacttcaggaaacctgagaacaatgtgagttggtatttttatgtgctatccaaaggatcgtttatgcgacacttactagagtgctatttgmagctcttttacaaacaatagatactgatatcatcttctaggattgttgtctagtttgccatactaataatataggtatttgagcttacagaaatattcagttattcccaagaaaccacagctaagtgagctttgatcatatctgtggaaatgtaggtccattatcactgattgacgagcagtcaggaatcccagggctcagtttaaaacaaatgcttagagccgcagaaggttctggcaacagagccctgattaatgaagggctaagttttctttattgctagatattagctgtcatgtgctttttttttacatcttgacagtttcgagagtaaaaaatatttgttatatgttcactgcccccataattattcacgctcaggaaaagagaagctttgccctggtttgatttggaagctgccaatggtcaggaactaagctgtgtatcatctgatttaccatcagacatctgcacacttaggggttgtattcaggaaatgttgcctgatgctgtttgtggctttatgggtttttgagtcaacgaccatcccattcagaggacataggaccattcatgtaggatggtccacagtgacgcgagtacctgatccatgtggtctggtccgtgccctgatagaacttgcccttctactctgccgagctaaccagccacagaggcacatgcagtaactgcttgatgcatgccagttgctttatttttccccggcagagtcagccaactcaacacctaggggatcataagggaccaggaaagaagcagatggtgggcggattttcacttcaagcaaaaaatgaaccagtagcatgcaaatgtcatgcaaagcaatatgcaaactatcacccattgtgtttgagtcatcagctccttagggctctgactgattcttcagtttaggaactccattttagagatcatttcatttcatctctagagaactaaggcactgaggaagcaaagccattaccacgtattttaaacaatgtctaaaggtttagcaactgagactgggtgaagtcactcagagttttaaaaagcatttaagatttattaaattcataattctactcttgccagacttatagtaatagcggcattaaaatagctaataagtgcaaggcacgtattaaatactataacaaaggatcacatttaattttctcaataatatagtgagaagtaggcactgttaatacgagttaaatacaatttaccaataaataaactgaggcccagtgaggggaactggtttccccaggcttcgacagctgtggaggagcagggacaccacccgcccaagactgggagttcgatcttgtccacaatctctgcactgtaccctgggatttcccatccatgctgaaactcacagaggttttgtttttctcattttagcatctctaaataaagaagttctaattaacatttttttcttcctgcttttatgtgaaatagtggcacaccttataatcaatggcatcttagttttcacctaaaatggattatggagggagtggaaggctgccttagaggctattttaaacgcactgcagttgttgacaagataagctttggatggtccaattcattcatttataatatagaaaaggagtgttttctcaacatgagagctcccatctccttccaagcgtcccaaagttctaagactattttaaatgttgtgtttttggccgagtgcagtggctcatgcctgcaatcccagcactttgggaggccgaggtgggaggattacttgagcctaagagttgcagaccagcctgggcaacatggcaaaaccccatctttacaaaaatatatatatacattagctgggtgtagtggctcacacctataatcccagctactcaggaggctgaggtgggcagatcacctgagcccagagatgtcaaggctgcagtgagccgtgatcacaccactgcactccagcctgggtgtcagagtaagaccctgtctcaaaaaattaaaattaaaaataaatgttgtgttttcattttgatcataatctattgaaaataatataagcattttctgattctataaatgattactaccacaaattcagacttccattttgttgtgcttataacttctttggaagcaagtgtctcactaagtttttgaattgagcccacagactcctgggaatagagggtcatcttctcatgcttgagagtctcctaggaaagggtagggaaagtcgaatgtgtcattcattagctctttaggaccggagtgaatagcattccatgaattgtcactgaacgaagccagtgatggtttcctttcatttatctttcactcctttttagttttccacaattacccccctttacagttaaagctttctctattagttcaaaggtgagttcctttgacaagtctgactgttcctgaggacaggagttaggtattaaacaggacttacgttcctaaattcaaaatcaattacacatctgtggcatcttctctccaggtttcttccctttgctggtggtaaaataatgaaatattatgtaactgcctccaagccaagggaatgcaaagaactattcatttcttcttatgttcatggatttcaccaacggccagtacaaatcctttctgaaactcctttttgctaataagtggttcatctatccacacgtgccagtgagctcctgctctgttagtagccttcctctgagttcagaaatatatttgatcttaagccattaactatattaaatacactattcctctcactttctttggcatgtatttgaaaaataacagaaaaaaaacaaaatcaacaactcttctccactgtgaaagttgaattgctgtttctcccttttttctgcagagccccctccccatctttttagtgtgtatttcatgtaatcccttagctatacccataacctctagaagggattagcagaaagaaaataatgctaccaaatgatcacaaatacaggcagagacacagaaaccaagtgatggctcaaaacagtctgtacttttcccatcaggccacttgccatccacacagagggcacccgagaggcccttctctctctgaccttcctctctcaggtacttcttgctctgaatcagtgatcttcaaagtgtgatccccaaactggcagcagcatcacctgggaacttgttaggagagcagatcactgctcgctgaaactcagtgggtggacccagcagtctgtgtttagcaagtcctacaggtgactccaatgcatgctcaagtttaagaatcaccactctaaagtctacccctgggcatctgaaagagctaggaaggattgaaacattttagctgttcctggcctgagggccaaagcgttagactgcaggcacactataaggcagtctcagcagtcctgcagcagccggacaccacacgcagggcaagctcctggaacccgtgtctccccttccactctgcagcctgctacctgcagtggggcgggggcgacctgcctgtacctgggccggctgactgcagattcctttctgccagcctgacatcctagaacttaggccctgttcctctgaagagtagagttgggtgagaatttctaacatgatccagctccacatgtcagcctcctcttcctgctgggtagttctgaggcctgagtagctgtgaagcatcctatcctatcccggcctccattcccttgtctggaatgggtcagacatgcccccgtgcggacttttcgtctgtcattgttgggcccctgggaaagtgtagttgtagttccccattccaaccaagctgtgccttgaaacacgtcccgtgtctcttacacactgaaaggctaagctgggaagtctcatgaagttcrtagaagtagaatatttgcacttagaaatgctggcgtgagattattgtgatcgagatagtcaccttttctatgcctggctgctgagctagggtagaacagtggatcagtgccaggaggaaactttgtagtagagaacccaaggccctgtgtttgcccactcgagcccacaccaggatagatttccagggcctgatcatctaatgtgtaggtgatatgaaaccgagtaagacaaactagcaagattcaaaaagtcctttagtgcctgggaaagtgggtaaataccaggtgaagcttaaccacagtaaaggtaaagtatcacacctgttgaaaagagaaaaaccagcctggcagtcagttacggtggctcatgtctgtaatcccagcactttaggaggccaaggcaggaagatcatttgagcccaggacttaaagaccaacctgggcaacaaagtgagaccttgtctctattaacaaatttttgtttcaattagttgggcatggtggcacatgcctgtggtcccagctactcaggaggctgaggcaggaggaccacttgagcttgggaggttgggctgcagtgtgccatgattgcaccaatgcattctagcctgggtgacagagtgagaccctgtcaccaaaaaaaagaaagaaaactagcaggataggggagacagcttatcaatggttcacatttttttaaatgtatttaagtagacagtaaatttaatctggtcagtagtgtgatatagacaccagaacctaatctgatcataggctgcagtatttaagctataaggcaaataatagctaatgtttctgactggctggcttactttgtccatagtaagtactgttgctagtgtctagggctttacatgaattttacataaataacctcattaatcctaacatcaacccatttggggaagtactattaatgtcattttacccatgaagtccctttctaggtgacataattcaacatgtgtatagatgatcaggaaccttcaaaagagagactggagtgctgaagagattggaattatgtttgaaaagatgaggaaaattcaaaagagctaaagtttctcagccacatgaaaagataacttttgttgatgtaaaagatcaaatatttgtcagttatggggtaaggtggtaaggctagctgtccatgagmctgggatagaagtgatagccacaggcaggcaggatggtggttaagagcagggactctggactcagatggcctgagctgaatcctggctctgccactattgtgtgtgaccttgagccaatctcatgttttctgtactgagtgttgtcaactgtaaatggagataatgatagtactcactcctcaggtgaggattagatgagcagatgcctggaaggccttcagcacagagccaggtgtatggcaactgctcagtaatagttagctgctattattgttatcatactgatcaggagaactgtttatagatgcaacaagccgctgaagaatgtagtgggttcttcttaatggaaatagttgtgcatcaactgcattctacctagcaaggatgttgtgctaagtttttcaaggtgtccatgaaatattatgtttgaggccctgtgcagtggctcacgcctgtaatcccagcactttgggaggccgaggcaggcagatcacaaggtcaggagttcgagaccagctgggccaacatggtgaaaccccgtctctactaaaaaaatatatatattacaaaaattagccaggcatggtggcgtgggcctgtaatcccagctacttggaaggctgaggcaggagaattgcttgaactcgggaggtggaagttgcagtgagcagagatcacgccactgcactccagcctgggtgacagagcaagacctcatctcaaaaaaaaagcaaaaaacaacaaacaaaaagaaatattatgtctttctttctttttctttcttccttccttcctttccttccctttcttcctttcttttcttttctttcctttttcctttcctttcgagacagagtcttactctgtcacaaggctggagtgcagtagcatggtcatagctcactgcagcctcaaactccttggcycaagccatcttcccatgtcagcctcctgagtagctaggattacaggtgcgtgccaccatgccaagctaatttttattttttgtagagatggggtctcactatactggacctgtgctcaagccatcctcttgcctcgcctcccaaagtgttaggattataggcatgaaccatcacacccagcaaagcattatgtttctgtgactttgaggatcttaagtaacrtgactattttcatttttgtctctttcctttaagagtttaatgaagcagtgcctttgtccctttcaggcactcgaggacctaggcygaaggaggctctgtcatttttaactcttggcttccaagagctcttgaggcatctccatccagtgagacagaaggggacaagagtgtggaggagcactcaagaaagggtgttaggggcaaggcctggtagagacacacaacatttctgggtgcattccattggctagaacccagttatgtgactttactgagaagcaaagaaggctgctgggaaatgtagtctaagtcgtgtacccaggcccaagggaattgattttggtggacagttagcagttttggccagcagtggcattgaaaagggaattcatattaggttcaattagtaatagtgtcttcattcagtttttgatacattttcccttttgttctgatgaagttacaacttggatatcactrtcatttttaaagtccaaagaccaattacctcttttgttacctgaattttgtcactgttagttttaggagagatgcagtaagttcagctttagctgtcaaacatagtgaagaaagaggtttctgagtagctaggattacaggtgcgtgccaccatgccaagctaatttttatttttcttctccaagatccactttcatcttggagaagaacacatttgaataatgaaaaagcctacaagtaaacagcataccaaatatttgtctttggaaagttcatcatagaaagcaaagattatttcattgctaaaggagaaagattacattaatcaggcagggtgtgactatactgatgttttaacaacttctgttctttggtggttatttttaaattgtcatagttatgttgtaaagatttttaaatgatataccagttcagtttaatagtttcgtttcttatctgctctcaaactgcagttctttggtatgttttttgagttcatttcctcccattgctgtcatccttaatataagatttgaaataactgttaggaatggattacttatatatacacctcaatccatcctcggtttgcatatgataaacttttacagttcatcgtgcatatattacatagttagaagataaagtataagcagagtaaaatgtcatggtaggagcaggattcaatgaatatttttatgccttccatgagccaggcatctgctgggcactgtgctggggaagctaccgtgaagtaggcagatgaggtctctgtcctcttctacttgtagtcagcccaggtaggcaggcagtcaggcmkccatttacaatgcagtgtaacaggcaaggcaggtgtttcaggagacacatgaagctctgggctktactgagtgaaggctgccttgggttaaaggcacacatttgtaatcatgttctttggccgcagaaatagcaatgctggtacactgcatcaacagaattgcctcacaggtcagaatccattgcagcagagttctacaggctaagccctgtgctttattatttcacagtgtcattgtggttgtgaatagtgcttcaatgtttggcacttggggtcattttgtgatataaatgttggatgggatcatactcgtttttgtgaaatataaccctcattgagccaccatcaacagacaatggtttatgaaggtcttgtttcctgaagggatgttgatgttcactgagcagtccttactggtgtgtggtgtacagttatcaaatgatttgtttgcttcaaggagttaactgaacaatatgggcatttcaccttcaactctatcctgtcttgtttaagcaaggtaataaactctccaggcccaaatatggtttagctgttagtacaggaagggagggagaaacatgtcagcccttggaagtgagccagggttgtgggaggtagagtgttgaaatgggatgatcacaggtgctagggtctggaaatgctggccctcacccctccagaaaataccttgctttcccatttgtggaaggggctggttcctgctcttctagattgccatgcagattacagatgatgtgcttaaagcacaagtatggttcagcccttcattctttcaccaaatatgcctcatgccagacactgtcaaagtcactaggaacgtagctatgatcaaaaaaaccctgccttcatggagcttgcaaaccagtatggaaagacagataatgagcaaggcacataagtaaaatgttgagtatgctattggtaataatttctaaagagaaacatagggcaagggaagggacttagtagtcaggggtgggttgcagtttcaaatgcgacagcaagggaaagagtcatgggggatagagtcttagagtaaggtctgaaggaggtgaggcaaaatgttctggcagatgaaacagccaaggcctttgatatgatttggctgtgtccccacccaaatctcatcttgaattgtagttcctataacatactcccacgtatcatgggaggggaccaggtgggaggtaactgagtcgtgggggagtatttttcccatgctgttctcatgatagagagtaagtctcgtgtggtctgatagtttcataaagggcagtttccttcacatgctctcttgcctgccatcaagtaagacrtgcctttgtacctccttcaccctctgccatgattgtgaggcctccccagccatgtggaactgtgagtcgattaaacctctttttctttataaattacccagtcttgggtatgtctttttagcagcatgagaacagactaatacagccttgaaccaggaatgtaccttttatagttgaggaccagatagaaatggaccaaagaaagagggggtagtaggtgaggcagaggaggtgcaaacagggcccaggcatgctcagtggcagctagtgctgcagtgaccatggcaatggccatgaggtctgagcttgaactctcctctcttgcttgactcttataataaccaagagggtgtgtgtgtatgtgtgtgtgtgtacacactcatttatatataatattcatttttaaagccttcgttccatcttgcctaccaaggcgtaagtaattttgtaaattcataaacagttggatctatgtaaggccttaaaaaccatcttgtaaagtggtttgtatacattaagcagtgggtccattgttggtacgctttctggtagaatyttacacaaattctcctgtgtataaacaaacaaggtagagctgcccagactaaactctagaacaaggctgaggttcacaccagctcccttttcccaaggtggcacctggggctgctctgagggactgtgaagcccmctgaactcggtctgaggctgacttctggtccagaggctgccggacttgcctgtacatcagaatcacctgggggactttgccaacatatataataattgagtcactcttgtacacctactacctagatcctgcaattagcaattttcatcaaatgtatctatccatcctcccgtccctctatcaatccagcgcagacattcatgtattcacctgtgggatttaaaaaataacagtaatgaaagttgcagggcccctattctcaggcttactgaatcagaatccttgagcttggggccactgtgggaaccactcatctagtccagtttcccttttttactgataagggaagtgaagctcacagaattgtctttctcaagttcccacagatagccggcggcagaactcgtaccagaacctggatcgccacctgtttttggaggacctacctcctccgtttctgagattttgcttgtkatccgcttagcaacatcagttctttctaagatcagataatactctggacctactctttatccatgaacagtttgctgagcctctgctattttaggggattgctaagaatgtattttctccttggtcaaaactttcaatcattattggggaaaaaaggagtataactacagagacagatgtttcctggctggacatggtggctcatacccataatcccaccactttgggaggctgaagcaggagaataatttgagtccaggagtttgaaatcagyctgggcaacatgatgagatcccatctctaccaaaaatttaaaaattagccagatgtggtggcacacacctgtagtcccagctactgagggggctgaggtgggaggatcgcttgagcccaggaggctgaggctgcaatgaaccttgatcacgccactgcactccagcctgacaaaaatatctcaaaaaaggaaagaaagaaaggtttccagagtacaggtgtgtgtctttgctcttagctgcctcattgagacagcaatggaaaaaacactgggctgggagtccagagattaatcacaatcttgtcccgtagcaaactgcataacagttggaaatccacttcactctctgagccggtttcctgctttaaagaacaagtggagttaacaggatcttactaattgatttcaagggtgttttccagctctgaaatttgggaaccattaacttagtatccagccagagactgacctgcctctattatttactctatcaaagtaactcttttgtcagacatatcacttaggtttgggggggaatgctggtcagctcagcttcctggactcctgcaggctatgatccattttcttcccttcaatcttgttaggttaggcatagatggcagaagacaggtaagatgctccaaacctagagcataaagaaaattttcagttgccagctccagtgggacttggttccccctgagagctgtgcttcagcagtttcccraaatctaagcttcccaggaagcccccaccctgctcctgatgttcctctctgtagcttcagaagaactgtacggcactgacctttgagttccttctggctctcagaggtcccagtcagcaggctgcagacacagtgtctgccacttggatgttaaggttgcctctctcactcttcaaagcccaacccttcaagaaatgagttgaactagcagctcatggtttagtggctgcatgtgggcctaagtggtgactaccacctttcccttgatattacatcctgcccttcaatgtgagaagtggattctttcatccctttatttttcaaaaaaatttttattaaaaaaaatttttagagacagggtttgagtctgtcacccaggctggagtgtactggtgtaatcatggctcactgcagccttgacctcccaagttcaagtgatccttccacctcagcctcccaagtagttgggatcacaggcatgtgccaccacacctggctaatttatttttatttttacagagatggttctccctacatcacttaggctgctcttgaactgctggattcaagcaatcctcccacctcagccttccaaagtgctggaattacaggcctaagccacggcacccaggcttcatgcctttgtgttttgttttgttttgttttgttttgtttttttgagacggagtctcrctctgtcaccagcccagggtgcagtggcaccatctcggctcactaccacctccaactccctggttcaagcgatyytcctgcctcagcctcccgagtagctggaacyacaagcgcgcgccaccatgcccagctaatttttgtatttttwgtagagacagggtttcaccatgttggccaggatggtcccgatctcttgacctcgtgatccacctgcctcagcctcccaaagtgctaggattacaggcatgagccaccacacccagcctatgactttgttttaaatacttcccactcttggcgcctcccgctactactgcctgcctgtcagctgacagagccaaccaacctgactgggatcagtttcctgtctctaatcctccccagccctgcagattccctttgactcatccctctgatactttcccaaaggaaagtggttttccagaatcccttcataagggttttagcacatcacagatctagagttgcagctggcaccacttcctcctgttatggcctgatatggttttgatggccctggttcagttcaccttcacccctcagactaggggtgctgctctttcacttaatgttagtcccttttagtaacccaaactttatatgggttatgaaaaaagatagtatgaacattttaaaattagatacaaatctaaaataaaatttttaaagagtaaagaagggagacccatagctaaagtgcacagtagctctctatgtgaaggatggctcaggacacagaatggggcaatggttatgagcatgcacttggaactcacgtgggcctgagtttgaattctagccacacaacttagcagaatgactttggtcaaggtagaggatccttctaaagtgtgtgaataaaataataatagcctcctttgcagaactgttatattaatgagagggtgcacagaaggcgttcagtgtggtacctggcacatagtaagcacttgctacatgttagctattgtcattattaaaatagaaatgctaggggttcaccaaaagtatagggtttggagtcaaatggcccaggattgaatcctaattctatcacttactgtgcaacctccagccagttacttaaccattctgtgccccagttacctcgtctgtaaattaggaattctaacaatccctatccctttcagtyattgtgaggattaaatgaattaattcaactcagaaaatatttgcattcctactgtgttctgagaactgaaggcttagttaataatgaagacaaaaacccctgagcctctgccattatggaactcacattgtaacggggtgtggggaggaatggtggcaaaataagtaaaacataattcatgcaaaagcattaaacattatgtgtgaatcgagtgcatttgaaatgtttatacaagtgcttgcctgccttatggaaagcacctaataaatgctagttatcaacagtgattatcaatatattatttctgccactgctactactgcagatagtaaatatatttaagtttataataaatacatgatgcaaggtgaaatataatttgcattacagtgtagatggcttgcatatgaaagggctacatgaacttttgggctgatgtaaaagcatgtggtgaacttttctgatagcgttcctgagctgctttaggactccactgtgtcatataattcatcttagccaatattgctgccagatattagctctggaccctagaactgtattcttaccaggttagatgtggacaagatgctgaattcaagtcagcacactccaaaggcccgtgtgtgtgtgtgtgtgtgtgtgtgtgtgtgtgtgtgtgtgtgtcttcacaaagtttataatgataatttagttgctttgggacacactgggcagcctgtaatattctttccagctctcgaattttgtgattttttttttttacctagtattttggcaagcaatggttgtctctaagtaacacagaagaagtcctttttcaacaaagcctttaaaaagcctcccagctctcaggcattcgaaaaacacagttgtgtgtgtgtgtgtgtgtgtgtgtgtgtgtgtgtgtgtgtgtctttttctttttcctgcaagacttagctgtgaagtcaaggtcactattcctagggagctcagctgcacaagaagcctagagctgcattgctgggcctggagcctgccctgaccctctgtgctggactgtgctttcccacccggctcctggacccttgcttttcttttccagtggtatcccaggcaataataaaatggcttttgaaatcgcagagtgggaacgctttccctactgtgggccaccaggcctgcctgcaaaaattggattcgtgcaatccattttcacactgattcatctctctgctcgcttttcactcctgttttgctgcttttctgtgtcaaagtttttgtataattgttcccccaccacacccttgtcatgttctttgtgattctgagctggcaggtcatcattgccaccagcatttcaaagacacatggtccttccaaatggactgcaccaatttctcaatgttaatagatcatctaaaaaaaaaagctgtattatatactttccagaccctttgtttaaatgagaccttacaacagaggcccagtatgtaaaacagataggaacacttgtgatgtagagcaggttatatactgattaatagcacagattctggagaaacaaaagctggattcaggtcctggcttctgtgacttatcatagcgctgtgggaccttgaacaaaatgcctaacctctctgtgccttccttatcagggaaatgggggaaatggggataataagaggccttatctgtgataaggttagtagaaggattaaatgattcaaagtgtgtaaaatgttaagcacagttcctggcatataataaatgctcaataagtgttttattactataccaataaccataataattatcattagtaatattatcccccaggtggaaaaaaaataaaaactagggaccccaatttattaagccaaaaaggaaaaaaaaaaaaagctgaaagttgagtcatgcaagaaactgcctttccttttgttcctaagcaaatagctgcagataaaaggttaaatatctccactggtagctactctgggttcatcttatcttatggaaagtactaatttactgagccccagatgaatagataatcgactattccccaacctgttgcttttctyttgcaacatgtgggttaccataccctccctctttcccctccagcccacttttcgcctttaaatgttgaagccctcaaattcatctttggagaaaggcaccgatcacagactgtttctgtgattccatgtttttttctcccaggcattccttaacttaagttggcaaaatgaacttttaaatcaattgagacatgtcttggatactttttggtttacacccatcaacagtccctcagggtttcccatggcgctgttaaaaacagctgttcagtatggtattttcaatgccatgcttttcacaaattgcctttgcccatagaagacattgaatgaatgtcagaagaccaacaaacccatcttcatattgttttctggaatggatacttaattctttagcttatgagcaggctctcaaacaggctaattttgttcaggccacgaggctggttttgtcagtgattgggcaactgtgccctttctccctctgtgtgaggaccagttgctcacacgcaggccacctctgcatgtcacagccatcaggattctgccacttaaaagggtaaagcggtattctggttagggacaccaccttttctgaatgtggaytctgcagacaacttccttaccccaagtggtgcaggtttgtggatcagagcntcttagggctagtggtgccacagcaggaagagctagactagcccactgttctttctgcagcagatacacaattacatgatgctaaagtattcattactgttttagtgcattgccagcaagcagtcttctggttgacccarcatttctgcaagaactctcaggattagcacattgggaatgtacttggaagagagatgwtcctaacatatctgtgtataatgtgtgtagtataggtatctgaatatatacaataagctgtgcaaaacaaacatgtctcaggttaggcctaaaagaaatcaggtaacaggcttaaaaagccaggcaaaccccagctgtcttgtcttttatcatttggtatttcacaggatttgtgcctctccgtacttagattcagggatgtgcwgatttcttccaccagtgttctttgttccacctcctccaaaaagtctccacccatcctctctgcccctacatatctgtatttgctcccttccccttggcttcttacctgcctgcaaacatactcaaagttctctcatttcgcacaaccttccccttatccctgtgtcttcctctttttttttgagacagagtctcactctgttgcccagtctggagtgcaatggcgggatctcggctcactgcaacctccacctcctgggttcaagccgttctcctgcctcagcttcccaagtagctgggattacaggcgcccgccaccatgcctggctaattttttgtatttttagtagagacagggtttcactatgttggccaggttggtctcgaagtcctgacctcatgatccgcccaccttggcctcccaaaaagctgggattacaggcatgtcttccccttaacttggttctcttcacatcccggattgtccctcagagcatgcattccctggctgcatttccccctcatgatagcctcaattctgtcccaatgtgctcccccatctccctgccctgtggtatggtggagctgactagctgccctcctgctgccttttcctttctcctgagcacagggaacaaccttcctcggcctttggtgtactgcaggtatagctacatgactcagtttcaaccacgggggtgtgggcgagtgatgtatgacccacgaaaacctcacacatactgttgtcttgaactgttatgttccctcaaaaagttatgttcaagtcctaacccccagcacctgtgaaagggaccttacttggaaatgggatcttggtagatataattaagatgaggccaaactggagtagggcagaccctaaatccagtgactggacttaagaagggcatgtgtagacagacacagggaagatgacccagttaaaatggaggaaatggaggtagagacgggttaagaagacacaagtcaaggaacaccaaggatttcctggaatcaccagaagctgggaagaggccaggaaggattctgcagagccttcagaaggagcgtggccctacgattttgatttcaggcttccagactccagaactgtgagagaagtcattttctattgtgttaagctgccaaatttgttgtgactcatattacacgaatcctaggagactgccacacataccatcctcactcttctccagactggaagttgacaaaccaggatggctttggaagtgcatgctgaagctggcagaatacccctgcgactatgcccaagccaatcagaccttgtatttcatgtgtgaaatgaacacacactgtatgaagccattgagatatttaggattatctgctatagcagctaatattaccttatcaaaaacacccacttacagagaggttaaaggcagctaccataagtacgcaccaactcctcttgaaacaatctctctgctcrgcctctaggawttcccttccccctccctccccttcactggtggaacctcttcacacctgccactgaaatgcaggctgccccagggtttgtcttcagccagcttctccacatcccaccctgagccatcttatgcacctwcagcatccactcacatcccgatgttgcccaagtatagaagcccaagccgcacttccctcccacactccaggccccatgacaaccttcctccagtcayctctcccctcttgtcagcctcccacctctctgcagagcgtcaggagcttaccatgaggcatgtggcagggttcgacttgaacttccctcacacttgatcattctgcttcccccacagccctaaccaactgagcaagcctatttgttgcttggctggtggtgtaactgcttttcaggtatttattgggcagggtggccatgaacttgctgccttttggtatttctgaaagagtctgttgagagaaacagtatataggaaggatttctattcctcgcacccttctagaaattctcaaatctayccctrgtaaagcctgaagctcacacttgtggccctgcacaatggtttcctgaatggcttgcttatgccatgtgcctccactggagaagattgcaagaaacagctgtgtgaaatgtgctgtggcattcactgaaggaccctgctgaagagcttgctcattctatcacacagcctcctcttttttcagraccacagaggacttttctctcatatgcaatttaggaaaagcctggggactgagagcagggtaattttttttttgtttctgtggctttttttaattcattttgggccctgagttgtgtaaactgatcctggtttgtatctgtgttgcctgttaggaagcrtttgtgacccacttctaataagcgcaagggccttacagtacatgttttttgtattaacttaattcctaccttcctgtgatctttctagttttattttccacatatatttttattttattttgtgtgtgtttatgtaatcaccctttcaatcaagggtaaaggttaagtatggataaataagatgtcctgcaaatctcacacttaagatgcccagaactagcatagttttcttttccccaatagagccctctctcctgttttcttaggccactaagtgcctaaacttaaaccaaaaacctaggataatttaccctgacctgcattccccctccccaccccttctgtcatcaatccctgttaatcaccagctgcatattttgtagactccatataggagcctcacctgggccccttacacggctggccactgcattggcacccatctggcagtccccaagattactacaatgtggggtggccacaccacttccttgttgaaagcccttcagtgatgtatcttcagactgaagtccagattctagcctctttctaccttcacctgtcacttctcatcctcataccctgagctctggcaatgccagaccaggtactcatatctcccttgtcttgataacatgctgccctcctcctctgtcaagaacagccctgggatgtcttctagaagattcagcttcagcatcacttcttccttgaggtcttccctgactcctccatcccatcccaggcagacacctgttcactgatccctctctgtgtgccgggggcccaagggtctcccctctatttcttttgcttcacttttcacactgcactgtaactgggtgtctctctctcttccctaataggccagagcttgtttgtggcaggaatcaaatcttatctttgtattctctcaaaactcttctagaagcaggctcaactctgcttaggtgttgaaaaattgattatgtatagtattgctgtttgaaaagaccatgacagcgttgataccattgcaggcttttccacattctttaaagacaagtaggtgcagtcagtccagggaggacatcattaacagtgggtgcacagggacctggcatatgaatgacagagatggcttcttttagggaaacacactctccttatgcccagcacatagaggcatttagcaaacatggcctccaccccactgtgcccagctcccagtccatcctcacacatcagttctgattccagatgacatctcgtggacatcagttctctttttcaccattgcactgctgttggtcatgtactgtcacacacctcactgaacttcagcaacagaccctggttccctctctcagctctgtcctataccagtccagtttccacacacaacagggataacctttgtaaaagataaaccctcctctcaaagcccttcagagatgactactgagctcatctgaacttttttgatgacctgcaaggtccttctgactggccccagcccatccctcgagcctcccctgagcctgtcctcttcctaactaagcggcacgcrtggctttgtccagctcctcacacaggccgagcatccgccaccatgcggccttcacacatgcagttgcttctacctgaacwtctctccctccatccttctccatggccccccgtgccagtcctttcagcctcagcctcactgtmccctcctggacctccctgactgaggcatctcccaccttcacagatggatcacggctcctccctatattgtgagctctgtgcagcagaaactgccctctctgcttccccatctgagcccagtgcctagtacagtgcctggcacgaagtaggaggtgctcgaggagtaaacgctgaaagaaaaaaaaaacaaaatgggagaggaagaaaggtcttggaagttctcatttgattggtaaaagtgtkgtgttcctggggttcctgttacactcaaggtcacatggatttaatttgagacctttttatagttaaaaatgtcaagatcctttggaagctgagccttccatatgcacagaatgtttttattcagaatagctgttactcaacatttgagacagatttgcttcagratggtggtttggctctgtctagcatttgcagccatgatctccactcactaatttagggcatacctagatttccagcacaaatatccccctcctggcaatataggacataagccaggggacattggtgtccctagacrgtgcctccacatcctgactccagagtctgtggtctctctgggtgcatctcttctgggtcactcccatttgttctcatttcactatttttgtccctggcaattgtctggacggaaattcaccagagttcaacattttcagtattattggatcttacaaaggagaggagagacaggatggtccccacggcatggagcagaaaccagtgcagacaaagaaaaggcagcagctggatcgaggcaggaatccaggactgagaagcaccctgaccttcgctggaggagacaaaatgcatcaggagtgttcctctatcttaggacgtcggctctctcaaagctcaccccacatgttcaaaagcaaccaggagtggaggtgagaattaatagtccaccatgagtggtagcaagcwcagcaaatggaataatgaacccctcargtttaggtctggccaaaccactagcctctcaagattttggttgcttcacccctaaaatgaaacgattgaagatttctaagctcaacaatttctgtgaagaaatgtcatttaccacatctctgcattatgcacctctagtaaatgtttaatgatctgcaataagttttagagtcacattagtgatttcaactttctgtatttgacaagtgttctaattacccatcaagtaaggaagagctgaggaagaaatgagccgaggactggcaagaggttgtagcaatttgtgttgtactttgacctgctttgtcaagttgtgaacaattagtctcacarmtgaaaagcaactgctgcatgcaaagcaggtgatctgaaatcaggaccwctgctcctgatgcccgctcccactcrtgcacatttaccctatctggatttggtgctcagccctgactgatgatcttcatagcatggtgtgcggttgatggccayggtttatagaggggagggagccgaggcttggaggggctcarcagccagtccagggttacaggggacaagtggaaaggccagyactcaaccccggtccgcctgattccacccaaacagcccagtgtgggcaggcaagagatgaccttggatggattcacagacctgaaaagaccatttgcttgatctgggaggtagcacatattgggagccaggtaaatctgcttctcrgtccctgcttggggacttcgggaccatcacttaaaaactcttcytgcctccttgggttgttgaagagaaattagacacagtacctgcttcttggcaggtgctttggaaaaaaaaatagtttctttcctttcaataagaggaaggattgaatcatgcacagttcttcaggtccaaaggcatttcagcctcctccaggtttccctgccagcctctcccttctcggtcatcaatgaggtgttctttatttcttaaccggtattgcccctatttttagcttatttcatcacatgttcctctgtcatgctagatccctattgatttcagtagggatgacaccacgttcaagaacctgaagaagagacccaaagccaacaaacaaggcacaaggttttattatrgggaacttacacacrgaaatggcccagtggtggcaggctggacagagctgcaactgcttgtaaaaaggatgcagattgtatagcatcttcacttagcatcctccccctagcaccctccacatggcaaccctcatttcttgagttactgctgtcaggtgtgtctgctataaggatcattttcggggtatgcataagttactgctgtcaggcgcatctaccatgcctcttctgagcctccaacagagtctacaattgaatgaaaagccaagcttggaggaaggcgagcttctgaagtttcctgtcctgctctgtggctttctgagcatggggctgctccttggctatctggagttcccagaggaagatcaggaaggcctttgctgaggcctctgacgctcatggccaggcactgctacagactccatggcagtgagccccctctggacaagcacacatcaggtgtggtcaccacagggtctaatcacagagctttgtgcacactcacctgaccacctgtgcaagacagaaacctctctaaggaactcctaaaatgggccatacgtagttaggggttaacccaaaggcaaacttggggcttggcagattctctaaaacagggactcccaagttgttggcacacagcaaggcagtgctaccaagacaggagctgcagacggagcactgactgggcctgtgctgggagaccctctgcctggctgtgggtctctggtcttaggccacagatggcaggtcctgagagtgggaagagccgcttctgggagccacgtccatttccctcacaccagtctgcagaggtcagtcttcatgtctaagccttccagctccttgctgtgtcattccccatgggtaaaattaaggcagatcatgcccccatgagtgctgtggcctagaatgactcttaccgcagcctatttattacactaagccagccagctccactgtgtggactccctaaactcttgcaaaacgctcctataagtggctaccttttatagagattctcagtacccttctccatccctttttttatggggaaatgagggcctataaggctggggcaatgagaagcactaaacaggcctatctccacctggtgttttgtggtagagatctctaccttagtacaaaacatagaccaattttagcaggaaaattcaaggattttttacacagtttttgctgtagatatatgtcatgtttcttgtagaaaatataaacaggcaaaaaagaaaaattgcctataatctcctcccctccccaaccactgttaccaattaggggtatatctttccagccttttttcatacataatcccatttkccccccagggaaattacactctgcatacaggtttgaaacagcttttccccttcctcctcaaatacagagtaatggaaaataatctaaacatttcttaatgcttccaaataatggatatgaacttctgatcccttattcctccgtaactgtggagtccttaggaccttactttatagtattaatatttattgttggctgtagtcttctttgagattacggctttttatttagtttttttctaaagcctcctgtgttgtggttttgttatctcttgctgctgtcaaggagcctgcatgaaacagaattccttctcctttctggattagtccttatcttttttgacttgaaaatcatgtacaccctggtgtttgcactgtatgtaaactgaaagtaaacaacatctaagttagggacagaaggtcacaagtacttaaggtttttcccggagcagagtatgactggtgtgtggttagaatgtaatctttaacctgggactcagtgcttacccttcagagctagtctaggtcatttggccatttactcaccttttataggaaaagttatttttctttagtcattctgggaattggcctaactattaggatgacatttaagtcgctccaggttaaattgtaggacagagttagatattggaattcctgtatatatttagtggggtctgrtgagaaagagcctaaacactggctgatttgggaaaggtctgatagagaaaaaggcacatgtaccctgactatgccttcagctccagccacctctctaagcggaaattgttgagcaggtgggggagagctagttgcagaatgaaactgtaaaccagactgggtgtgaggggaggtaatagaagggttatagggtgggggagcaraggctgaagaagagttggagcctgattcaacctggcagggagcgaccggaggaggagcagcctggggaggaggtgagaggtcagatgggttagtagaaagggaagattcacaagactcagtgacacttggggttgggactgaagggacaggtgggagggaaagaagaaagatttgggacgagtctcactgggagcagagactagggaggaaccaatgtgtaaaagaatgcctggacgtcaggcacctcagaccatttgcccatttttcgacaaaaattatctagatcttgtaaaacagagaaatcaaaagtgccattttctggctatttagaaccattgtcgagtttgtactggggccaaacagtattgcagaagaaaataagatgcttagattttaggtcaggctagagttgaagaggttttaagttcttgagaacacaggctaagggagaagaaggaagaatggagggtggaaggttgcccatagtgaaggaggcaagtttaaagagaagggtagagacatggagagaagggatggggggtgcttgccccccaggaaagtgaagaaggggtgagaggtgcttgccccccaggaaagtggaaacagggtgggagatgcttgccccccaggaaagtggaaacagggtgggaggtgcttgccccccaggaaagtggaaatggggtgggaggtgcttaccccccaggaaagtggaaaaggagtgggaggtgcttgccccccaggaaagtggagaaggggtagagacacggagagaaggagtcaggggtgcttgccccccagaaaagcggtgcttgctgctaagggtgaaagaccaaggcaggcatccccgagtggtcagacacctctgaaacgtgggtgaataatcaggcaggcgtccccgcaatgattaatcaccaagggaaggctgtcttcccgagtccgtgaccagtgccagaattttgggtccacggataaaatgtgtctcctttgtctctaccagataatgaaaggaattgaacttaagagaagggagagattgaagggtggtgccaagattgaaaggagaaagaggttgagggatagtgagagaggttggagaagagagtaaaaatagaccgcttacccgatttaaaatcagtgagatgttcattgggctggttggtctgaggacctgatgtcataggtggatctcttcatggagtgagagtgaggtgaggacaggggactggtctcccgaaggagtcccacttacccgagtcttcggcaccaaatgtctcacgtgttcgtgtgaagagaccaccaaacaggctttgtgtgagcaacatggctgtttatttcacctgggtgcaggcgggctgagtccgaaaagagagtcagcaaagggtggtggattatcgttagttcttaaaggttttgggataggcagtggagttaggagcaatgttttgcgggcagtgggtggatctcacaaagtatattctcaagggtagggagaattacaaagaaccttcttaagggtgggggagattacaaagtacattgatcggttagggtggggcagaaacaaatcacaatggtggaatgtcatcagttaaggctattttcacttcttttgtggatcttcagttgcttcaggccatctggatgtaaaagtgcaggtcacagggaatatgatggcttagcttgggctcagaggcctgacactaaccaccacagcatttcatggagaaaagaaattctcttagctctcagatagttcctgtctaggtgacacctgtcttgggytagatgctccttttttttcctccacagttggaaggtttaaataaaatgtasccagtgtggagagtgagatgattgcaattatggaggcagaaggataagaagtttgaagtttaggcaaagcacatgtcccaccaccaagataaaacaaacagtgattcagtcaagaatctgagttttggcttaatttctcatgcatgtgcattgtaggtcatctttaaatttatttgacttgtgaaaacaattttaactacaaataaacacacaaagcagtataaatatggaaaccccacacaggcagggacctccctttggtgagaacgctataggcatagatgaatcatgctgagatagtttgcatctgtgaggttcatgtgaactttgaggccaccagacctcaaggcaaaaataaatacccttcaaagactttgtagcttccaagaattattcatgtggaaaccaaatgaagatgttgatttccaagaaagagatctcacaactacaatggatgactgagtgattccagccaaacacaagaaagtattaactttttaaatctattattgaaggaaagtaattgtaattatggtacattactttagggttctggggtagttttaagcacttagctttaagcactccagtttagccttttgaacagcaaattcatgtttcaaattacaatgactgtctctattactgcgctttctaattccttctaaacctcactcctaaattgcaccaggctggagccataaagggttgcatgtgggaagcctccatctgcttttcttctttgagaggtggttgtgaatgagaccagccaatgggaataagataataattgtgttctaagagcctcttgttctgtggagtgtgtgacttactgactgatgctaaacatttgaaattgtaaatttggataagtccatagaaattgggacacagaaacatgggtcttaaatgatagagctgcttccgagtgttttctggagtggtgttatggtaggaagtgcctttcaataattctaytgtaaagacaaccttacaacttgaaacttgccccaagaaagacacttgaaaatagtagatctatgatggtacatttctggtgaatttactagagtgtgttttcttctagtgaatttatctcttcattgattttattcattcctgtgatctaagggtgaactggtctattttcattttacagtttgagaaagaagttaaaccctaagcaactataatagtttctctagaacttaaaatattttttacacacctgaagattttttcagccttactaggccatggtataaatatttctcctatttcttgtgttgaaatgggaggtgtctcaggaagctgagtttccacttttggcataactaatcccagcaaaaacaggaaacagtttatctatcaaaaatcacactcctgattttatccatgatgttcttcctcctttcctgttccctactgtctacactcagataattcagattcataacccagccctacgagagcatgagggagtatggggataaaagccaacccactgaggcttctcacgaggaccaaacagtgcctctcagtgcctctttggccatgggtttctgtctgcagagtctcatcattgggggtgccattttctggtcatccaccctttccccaacctcattttccagctggaccagtcatagcattgagtgtcccttgtgaactctggaaggagagttttcccctttgagcccttggagatgctgtctttggctttggttaaatctttgctgacatcacaggtgcctctcaagtcagctttcctaggtccaactggttcctggttagatatcctgctttctctttccctctcatctctgcagcttactatagaggctgctcccacagttctttaggctttcacgtgccgtcatcttcggccgttcaattggctcctccgagattcagtgccctccttcttttcccctcccctactttttccttgtatttctcagtaagtactcttcaccttttcaggaccacattcccaaatgtcaccagctcacctgagtcttagtattccctggcctggaccacctctttgtagatgatgactctcctccctcaggaatttattttgtrtatttataaatatacaaaatacgttcatgtacatgtttccttcatgaaacatttgtttaaaaaaactgtgattacatatgcagtatatgttacttatgtacaatttttttttttttggctgagtgcaggggactttattaatggcacacgacaaggtggggctctctaggcccctcccttttcagggggtctacatggaaacttgagaaagggagattctcagtgttgtgggggactgagtatggcagggacttcccagcagtgagggcctctctcttcctctctcgctctcgctggggttggtagtccaggggtcttactccttggaagtcatgtgggccatgaggtccaccaccctgttgctgtagccaaattcattgtcataccaggaaatgagcttgacaaagtggtcgttgaggtcaatgccatccccagcatcaaaggttgaagagtggatgtcgctgttaaaatcagaggagacaacctggtgctcagtgtagcccaggatgcccttgagggggtctcggacgcctgcttcaccaccttcttgatgtcatcatatttggcagtttttccagacagcagttcaggcccacaactgacacattggcagtagggacacagaaggccatgccagtgaacttcccatttagctcagggatgaccttgcccacaaccttagcagcaccagtagaggcagggatgatgttctggagagcgccgtggctgtcacaccacagtttcccagaggggccatccacagtcttctgggtggcagtgatggcatggactgtggtcattcatgagtccttccacgataccggagttgtcatggataaccttggccagaggcactaagcagttggtgatacaggaggcatgctgatgatcttgaggctgttgtcattacttctcatgcttcatgcccatcacagacatgggggtgtcagcagaaggggcagagatgatgacccttttggctcccygctgcaagtgagtcccagccttctccatggtggtgaagacaccggtggattccatgatatactcagcaccagcattgccccatctgattttggagggatctcgctcctggaagatggtgataggattttcrttgatgacaagcttcccattctcagccttggcagtgccatggaatttgycacagacaaaatcatactggaacacacagaccatgtagttgaggtcaatgaaggggtcattgatggcaacaatatccactttaccagagttaaaaaccgccctggtgactaggcacccaatacaaccaaatccattgactttgatcttcaccttcaccgtagtgtctcagggatgcagctgtcaatgagagagaagaggcggctgtctgtcaaatgggaggagcagagagctacttatgtacaatttaaatatacaaataagattaagaaaagaaagacatgatattctyaccatccaaagacgatcactggcttgagcctctcatcatccaggtcgctccttggcctgttcttgtgtgatttccctgttcacatgtggcatctctcagaactgaattgacctgcgtggtagagagctgaaggccacccatcttgtaaagataacatccttaaaacctaccctcactctcccgacagccatgccacagagctgaatcacaacaagtgtctcatggatggaaacccttccattttgttacatttcgactgtttttaatttgtttatttttacttgtgctaacccttcctcttcactgtcaaccaaaagatcatgaaagactgttgatttctaaagtccaagtaaagactatggcttaacatttcttttagctggacaaggaaggggtttgggagagaagcattgggaatgaggtgacttactctcttaaggaacccaggtagaccaccagtgactgctgctttctttcactagccctcataargcttcctttcatgatctactctagtatctgtttttggacagtgtctgtctctcacctgggctagagtacagtggtggcttgatcttggctcactgcaacctctacctcctgggctcaaaccattctctcacctcagcctcctgagtaattgggactgcaggcatgtgtcaccaagcctggctaatattttgtgtttttgctagagacggggtctcatcatgttgtccaggttggtcatgaactcctgcactcaagtgatcctcccgtctcagcctcctaaagtgctgggattacactgtcctcagcctactctagaatcttatcaagactggataccaactctctccttctcacagtgcagaatccatagtcttctatgttaaaaaaaattatacctgatttgcctatctctaatctttggccacagccacatctcttcttcaatgcccttccttccagatccctaacagtactgtgacagcctcatttttgaggacttttggggccctaaaatataatccattgaagtcagaggatttgatcccttttattgcagcaagattctcttctgtaatatttttatctgttttggagacttagtttttcctgtggtttttctccaccttctcaatgtgagagggaaaataatacttctaatcctggtgatgagggaaggttattccagagaagcagcaaaaacaaaaatcaagtaagaatcagaacaagaaagcccaagctccaaggcagaactagtggaaatgaggttagtgggagcccgccctgatcccccttatctggaaaactatttaagrgaataaccagaatggagaaagccagagagagggggagagaacctggcattctcccaggcaagcccccaccagtctcagcctctttatctctgcctgtgcatctcaaaaaagaaaatggaagcagagagagatggtctgtcatggcctttttccaagagggaacagaacagttccgattttacatccaacaaggcttcaagagtagggggtgaggatgcaagagtgaagcccactgtatccctaagctatagctcagtcaaatgcttccgtccctgaatctgacccacacatggtagaaaggtggaaagatgttagatgttcatcccttagttagatttgggcattgttacaaaggaacctggttttggagaacaacaatccacgtgagtatattaaagattcagaaaagtcctgtgacaaagaagagtgtttcctgaactctttcgagcatgaggaatcttcatttggtcgtcccctgttttcattcagaagtgggttccataggaaatgttgtagaggccaacctaaattaactgatttattcagtgaagaggagtttgccaggcagctgaggttagaaggtagatgagagaacagacctatttttctgtgttttcacttaatatgttagttcagttctcggctttgtttttctcccctttttctgtatgcattccctagaacacttgtttcaattttataatttaactagcatatagacatgactattcacaaatcttttttagccctgacctcattcctgagcaccactcccacatttccaactgtgtcttcaccagcccctccacctgacatcacacatatgccccaaattcaaatgcccaaaatgcagtgtcttctccagaccaactcttctgctcgtctctcctgtgttaatagcatcatcgtccttcgttgtccaagctgggaacctcagcagatttgcaggcattttcttctcctttaattcccacataatttttttaaattatgtatgttatctctaagaattttctgtttccacagacatagttcagactcattttttacttggacagttgtaagagccttggataaattatgggttgagtagaatttttgcaggaaaaggggatttggcatgggactcctttatatgtatctctttgtcacaataaaattaaaaattatggatatgcttggaaaaatgttaaggagactctaatattaatgaacagagtgaggtttcaaagctattgagcaagagaagcaagaatgcccccaatccccctgtcaatcttccttcttttctgtggaatgttggggggatctgaacacatgaatggaaatgacaatgagaaatcttcaaaatgttaaatttttatttaatgataaaatgtgagataaccactttattcttaaagcctaagtgaggtcacaaaatttttttttctttcatacagttccttaagatcccatttgtagacatttatcattacacaaaaataacgaagttccaagtaaattactattctactgactcttatatgtgagtttaatttattcattcagcatcactaataatctataaagtcccttcatacatatactcatttagtctgaagaaagtggtatttatcaagtggggaaaattgattctcagagtggctaactcactttcccagtatacttaattcatagcttgaaattgactttggactgcaaactttgattacttttcatttcaccacagccagctcccaaacccaacttaatgggttatgttcaacgaatgagagatgggcttcccaggcctttgcttgtaaggaactgacaccgggtaactgttaccaggcagagccagagaggccttacaggtagggctggtgtgcagcatctagcccatataacctaaccatgaaccacagatgagcctccctgccctgccacatgaagtaatataacttattttgaacaggagcatgtagcaaagaagaggtcctgtttacttccacagtgcacactgcaagacattctcagtacattatacagtctagatctcattgtttatgggtctggttttgccctcatgtagcagacgtagttcctgatttatagcaccataaagaaattacagtgaaggacgcctcaagattcttggcaggcaaatatagacaaagctcctttacatctttttaaagaattccagggatggagatccatgagctttcgtcagatgtataatgtgaagatcaagaaattattttcccttttccaaccatagaattttactgatttgatgtgatttcctcctgtctgtttcactctgagcatgaagaactggtcacccactgttctctgaataaacccattttaaatgcgtgaargcgagtgtgatgagattgttcctcattctttccctcaggctaaaataccacttttcctttagcctcttcaaagcttctattttccaccccttgaattgtgtttactcctcttcttgggaccctgctcagttgttccgtcacattgctgttttttaagtaaagaggtccgaatcagacacaaatcaaacaagggtgtgaccaatgcagggtattagtgaagaaattgcttcctgggctctgcaagtcctacctgtcttggcacacaaatagtgagccattgtagtcaacagtcatctttaaaaagaagagaaaagttcgtcctactcataaatagacygcagtagagagaaaaataaatgcctttggtggcttcacccagtctggctacttgccatgaggaagaaaatgcttgatttggcacttaacaaatggttgtatacatttgtgctggggaaccgtacggtattgtgaattttagatattgaccctgcactagagagaagcagaatacatatcctctgatgcagatgaaaaataaagcattgtgtgatgtacacattgaaatctaaacatgcaggcaaaactttttcagcaaggtgcctttaaaagggtgctgaataagaaatcactgagattttcagatctgaatctagtttgaactctagagtcctttaagagaaagttctaaaacctaccaattgggaatataaaattgtacagtcactttggaaagctaactggtagttcttcagaaagttaaggttaccatatggctcaataatttcactcctgggtatatgcccaagagaactgaaaacatatatttacacaaaaacttgtacacaaatgttcatagcagcattattcactgtttcaaaaaaaatggaaacacaaatgtctgccaactaatgaatggataaacaaaatgtgttcatgtgatggaatattatttagccacaagaaggaatgaagtattgatgcatgctgtaacatggatgaaccttgaaaacatctgtttagcaaatgaaaccagtcataaagaccatgtattgtatgatgccattcatattaaatgtccagaatagattaatccatagagacaaagtagattagtatttgcaagggcttagaacgaaggagagatggggagtggctactaaaaagtacagggtatagggagtcctttttcagattttgaaaatgtcctggaattggataatggtgatggttgcacaaccctgagaatgtaccaaaaaacactgaattgtatcactttaagagggtatattttatggtatgcagactataattcaaaaacagaaaacaaacacatagacctctttttttttttttttgagaaatgatatgcaccttgaaaacctttcattaatgactgaggcatttagctgatctggaaaattttgcgctggcgcactgggtttcatgagtgttgctggtatagcaaaatggtagactaagatgtttctacagaaagtggctgaatatgacactgagaaattattctgggtggtatgagtacagactgggctggttgtgaagaaagcaaggaacatgggactcagctatggctctatgagtggtcacttatttttgctgctacttaaagatctgaaatatttttcccttgaccatcatttgtgaatatttttgcttaggagcttaattgcatagttggggtcttgttaaatgaatcatcgtatttgcagacttatttagtagtttccattctgaaaattgaatgacaagaaatacacccaaactgattccaggctgttaagcttacttttttcctttcagctattttttgataccattaattagcatctacagagtagccatcctctgacgatggtaaggtaaccctggcttgtccctcagctgccctgctttctttcccaacaatgcgtttctaatacttttgaaagagaagaacacttctgctgcatccaaacagaatccacaaagtctgatgcttttgaacaaaatggatgtttcctccctgtgccttgaaattgatatacactgtcaaaaagggttttccgaatggtttctctttgtcaccttgtaccagattttctcctccattctggaaatgtgcagtttaatgttgcgtttcgaatcactttcagctgaaagagtgtgtaatggaatcagggcatcccatgaatactcttaacagtgtcagagatgcctttttgtttgtagctctgcgttccaaggggactgatgacaacagtgaaattacattgggggccttgctcaatagtaggttccttgtctgtgatgttttaagagaagtagtaagggtggcttctcccatcctggtgcttctgtgtttggtttatattacttaraatctaaattgtagtggttattacctcctgagaagaaaagtagtaactggagtccttgtcagtattttcctaccccagtgtgtatcagactgttttcagaagcatttcactctaaccttgaaagttgcctgtaaaatcacctgattctgaccctttttgttatcagcaaggatgccagggcccagagttaaagacaattaacagcccactgtggagttggcacctataatcacagrttcccaggctggtgctggtgctgtttctgccacaacacacaggctcctaccaccaattactcacatatatgtgaatttcctccaaagccatgaaccttctgagctggaggagggcttgacaattagtctttgccccacagtctttatcatttcatgctttggctgtcacagtatagcctttcaggttaactgtcagaacctaacaacccagaaagggtagatgatggcaggcccttcctcacacgtgtgtgtgtgtgtgtgtgtgtgtgtgtgtgtgtgtgttctacactgaaacacatttaactacatgagtgggtggattccatgctacagggctggctgattgcttaggaattaaagatgggaatgaatttctgcactcccaggacttttttaaactagagcctcaaagcactttgctttgccattcagcaagttcccttgctgcggagagaagaaaccaaggtataacaaagtgaagtgacttggtttggaattggacttcagatgtgagcttgatcgctgccctttgtcttacttggaggactttttttttcttttttttttttgagacggagtctcgctctgtcgcccaggctggagtacagtggcgcaatctcggctccctgcaagctccgcctcccgggttcacgccattctcctgcctcgacttcccaaagtgctgggattacaggcgtgagctactgcgcccggccacttggaggacttttaataccttttactccatagaaattggactcctggacaccattacctgcttctcaagtccagcagctaggggattttggatttcttttccatttctactctacagagagatgctacctttattttttagcttggctatatatttgtgtgtgtgtgcatgtataatttttttctctttctctttcccacctcatgttataggtcattgttgtgtatctagagcagasggagwacttggtgggttctgccacatgggcaaagctttctactgaggctgaaaagctctatgcctattgtctccatgccatgtttacatagcacctgtttattacttgactgtgaattttgggattttgtctggttttaagacaaaaggtttttaccttgagagggcagaagggctgaagtgtgctctggaatgtaccctggcagaacatgggcttttaggctttctgagggttacatgaagaaggtgctaacagagtgttcctacatttgccctacttgattctccaaactttgtcttccccttaaaacttaatttacactgggcatggtgattcatgcctgccatcccaacactttcggaggcttaggtgtgaggatcacttaaacccggtacccatctctaaaaaatttttaaaaattgccaggcacagtggctcacgcctataatcccagcactttgggaggccgaggcgggtggatcacctgaggtcaggagtttgagatcagcctgaccaacatggagaaatcccatctctactaaaaatacaaaattagccaggcctggtgacacatgcctgtaatcccagctacttgggaggctgaggcaggagaatcacttgaacctgggaggcggaggttgcagtgagccgagatcgcgccattgcactcgagcctgggagacaagagcaaaactccgtctcaaaaaaaaaaaagaaaaaaaaccttttttaaaaaattaaccaggcatggtggcacatgcctgtggtcccatctactcaggaggctgaggtgggaggatcacctgagcccaggaggccagagctgcagtgagccacgatcgtgccactgcactccagcctgggcaacagaacgagatcctgtctcaaaaaaagaaaaaaggaaagaaagaatttgttactcgtttgcatgaatctgaagatttctctatagctgtagccagtgacacagtagctctgcagtgtactgaggcaatgtgatttcatattaggaaatttagaagtgggggggtgtgaatgagcttctactgttcaaacccagtagcaccctgtgtgttggggctccgtgaagggagaacatttctgagaccatctagaaggaaagttccttattctgcagggtgaaaccacaccacacaacagtgtaagttgagttttgcttgccccggaacaagggagatatctcccaggcaatagaaagcgtaattggctgttggctgcctcgcaacaaggacatcccctagtccatttactcctagtagtgatgtatgaaggggaggtggctttcccatcctgctgctacctccatactcctgggtggctgtctgggcctggaactctggcagtccgtggtggtaggtagcccataggcaatgcatatggtaattgagttgtcagtggtggtttggtttggtttggtttggttttgctttatcagtgttactgatggaacacattgaaaatttccctatggccactgaataaatcacacctggatatatactgtcagagcctgtgggcatagtttcaagtcagttcttgggtgcctagtgaaatatatgtatcagactgttacagaatgctcaggctgcaggggaagatcacacctgttcacactttgtttttgtttttgtttttkttttgagacaggatcttgctctgttgcccaggctggagtgcagtggcatgatcatagctcatcatagccttgactttctgggctcaagtgatcctcccatctaagctttctgagtagctgggactatgggcatgtaccacaacgcctggctaattttttctattwttttgtagagacgagggtctcagtatgttgcctaggctggtcccaactcctgggttcaagtgatcttcctgccttgacttccccaagtgctgggattataggtgtgagccgtcatgcctggtctagacttctttatatggctaagattaacaagatctaaccttcaatcaaagagctgatgaattctttagtcatgcatgcatttaatccctcacttggaacctcttcttatacttttattttgaatgtgattggcagttctaaacctatttttctgggtcctttccataaagcacaagtgatgtagaaaagtacagacagttttaggcttaaccagttcttatttttctaagaagattcagtcactggcttcttagttagtggctcctgaaacagatgcaggatagttgtgctgctgtgmctgagctccaaataatggcctctgagatgtggttgggccacctagtagaagaacttcatggagaggtgcttgaggcacatggggtcatgaagggtggtaacattacaaagatgaatcagcattcaggaagactctaggtcttctgtgactgcatagccaaatctggacaaatcagttcctcttcaaacttacaaaaggagcatacgtttcctgtaacagtcaaataatacaaaaatatataaagaaaagttaaccaggtgcggtggctcatgcctgtaatcccagcactttgggagactgaggtgggaggattgcttgagcccaggcattcgcgacgagcctaggcaacatagtgaggcctcgtctctataaagaaaataataataatttaaaaaattaaaaataataaaattttttaaaaagwaaaattaactttctctcccacttccataacttccttgccactcattgaaacataattatatgttatcaagctgctaggtgtcgaggtggtcagttaggwcaatgaaccaaacagaaagtaacaaccaaacctttcttctcttactgcagtagtcctggcaagaggcaaagaggaaagtgctcttccatttttccccataggacggcaccaggtgaaggtctggcagatgacatgcagcgctggcaggagggagtctcactgcccagagctctgaactaaaggctttgccattttgtggaccgagggttgtagggccagggagagaaggggaaggactataagaagactgagtcagagcagagaagtgtctcagtggagwctcctaggctagtggggtatgagtcctgggctgcagctgtcctggcggctgcagtgcagggactgtgcaccacatccggtgtggagagggcagcttcccccgtgaggcctgctgggcagagcctttgtaatggcctgtggtcaggcctgaaacattgcacacaggattcgggcatggaatcagactcctcacatagatggaatatctatatatagtttttgtttttacaaaaatgggattgtaccacccattactctgcagtttacttttctcacttactatatcatggataactccaggtcacaaaatagaatttcactcctttttttttttttttttgagacagagtctcactctgttgcccaggctggagtgcagtggtgcaacctcggctcactgcaacctgtgcctcctgggttcaagcaattctcctgcctcatcctcccaagtagctgggattataggcacccaccaccacgcccagctaatttttatactttgaatagagacaggttttcaccatgttggccaggctggtcttgaactcctgacctcaagtgatccactcacctcggcctcccaaagtgctgggattacaggtgtgagccacagcgcctggcctcttttttttttttttttttttatgactgtataatggcttatagaatacaaaccaatccattcaacagttccccttttgacagacattcaggctgtttccagtctttgccccaatgaataacgtcaaaagtctgaattgtatgtatatcctatgtactgagtcttttatttctttagcatgtattcccaaaagtggaatgactgaaccattggatatgtaattataattgtaatcaatgtaaaaggtgtaacaatttccattcccattatgaaagtgacttttactctatgaaaactatatattgttgtttttttaatgtttcccaacctaatgagcagaattatatattgcttttactttagtgtgcattttcatggactagtgagattgagcatcttttcatatctttattaatcgttgcatttttccttctgtcagttgcctaatcatattttttatcagctttttttcttctgcttgtttgttaaatacctgttggcacatgtcagtcctgctctgagaacatcacactgagttgagatttaacaagagttaatatgatccctttaagaaaaattgtaaaatcaagttaatattcgaagtgaccatcctgttttaccctccctgtttctcttaaccacttaatatttagactaggggaataaagatatgtgtttttaactccaaaatataacattagaggagagaagtagcgggattttctaggaattagtctgtaactcaaaattctcattggttaggaataaattacctttatcctctcatgtagctaatatttggggcagggaccagggggagttttgtttttgtttttgagacagggtctcaatctgttgcctaggctggmgtgcagtggtgcagtttcggctcactgcaacctccccttcccaggttcaagcaattcycctgcctcagcctcccaagtagctgtgactacaggcgccygccaccacacccagctaatttttgtatttttttrgtagagatggggtttcaccatgttggccaggcttgtctcaaactcctgatctcaagtgatccatcccccttggcctcccaaagtgctggaattacagacatgagccactgcrcccggcctgagttttttaaactattaatgtccttgctttacctccttttctcccattcttgcggttgactcataagaacaccctaaaccttactgttcattgtatcgcaaataacgccccatcgattttactggaattaatgtcatataaatttcagctgtagtctttaaaggaaaggctaaccttaatattggataatatgctgaaaacccatcccctctgtatgggaatggttattgggtgggaggtgattgccaatggattaaatcacctcaaccccggcaactttctcgtttaacctctggaatgttactcagattctggtcatggtggtatccacaagtccaggcctgaggccccagaaggaaggtcagagtgtatacgtagctctcctgcaccctcgcagccacggcatttggtttttgtttttttcttaattttccttaggaaaagcatctcataaaataatgaaatagaagctaggaagtacaggggtcctgtgatgacagactgtagctttaaaggcatttctctactttattgattgtttagtatgaggtttgtcagctttcacatgcatttcgttccgtttgaaacccctttcgtctcattgccctactccagattggagaccagcactctgacaaattgatcccaagatcagagtgatgaaagagagaaagatcaaaaggaagccaaggatcacataggaagaggcatcgtgatgtaggcactgggaaggttggcagtcgaacatgctgtcatctttaatccatggatgcctcttaaaggaagagcttggtagttcaaacggaagtgaaaaaatgttctgtacatagatggatttggatataattatctatttaagaaagtaataaactaggcttgccctggcagtcatattgtaatggaacgcagatacctcattgtgtgtgaatttgaaattaaaaaacaaagtaaacatggtgagctgctaccattgctgccccctccctgccttgcccactaaggagagaggcactgccttgtttccctttgtatttcaaggagcttctcggtggcaactcagccagaacactgtcctcttaggcctgccgtctttttgcaaaaccaacaaaaaggcgtatggatttttaagggctcagactataagttatataatattgctactaagaaaagtcttatgtagggccctcatttctggattcttctgttcctccactcaagtccagctcccccttcatctatttagccacttatccatcagcaagcaattgttgcacgtctggcacgtgccaggcactgagcactggagattcagagacaacaacatagactctgcctggaaaatatccgcggggtagttcaagacagccatggaagccagcagtcatagcaaggactggtaagggtacagctaggcatagacaccacggggtcacagagaaggggcatggagggtaggccaggaggacaacagaaggcgttctgagctgactcagagaaatgggctaaccatgagaaggaagaagccatgtgaagggagtagcaagagtgaggctaaagcaagaaatacaggcaagaaccagataataaaggaaactggaaaagctgggaagccatcacagggctttcggtaagacatgtggcatgatgagagcggtgctttaacatcacctttgtgaccctatgaagcacggggcagaggagggcagaacaggggctgaggaagcagtggagagctcytgagtcatgcaggtaagctctgatggaaaccagaaccaaggcactagcaggaatcaaggaaagagagggattcctgtgctgctgaggaggtgaaatctacacgcctgggtgcctatttggacatatggggtgagaaaagggaggagtctagaatggctgcctgtcttctgggacgagcaactaggtggaaaattgtttggttcccggagatagagaatgctagaagacagatttgggagggggctggggacaggatcattaattttgaaccttattaagtatgaaatgccagtgaatatatcgaagtggatatatccgttggcagttggctgttccaggccgagcacaacagagatatgtgggctagaaaggttgtctggactcaccagcatatgtcgttgttggagctatttatccatgcagcagatattaagagtatacactcagggctatctttgtgagcatgcaacctgtgcaccacacagggccctgctctccgaaggacttcacatttggtgtaatgctctgctgtggctgtcttgaaattctgcattttttaatcaggggcctgtgttttcattttgcgctggaccctgaagttacatagccctgcctacaatggcctggcaccgtgtgcagtagtagggctgcagtgtcgatcaagacaggcatggttcttgtccagcttacaggctagcgtggaaagcagacagttaagtaatcaattataaaatgtgatgagttctgtattaagagagggaccaggctaagggaacacgtatggagggataggggtctaacctaacctaaccttggtggctgagaatttagggaatgagagcacccagggagaatactgagacagaatcctagtccacaacagcaaagaagggacggagaagttggagagagaatgtcccggaagttaggagggaaaccaggagaagaagttgtatccctggtgccagggttaggagacagtcagatgctgcctgggagatcagaatgatggcatgcccaagggatgtagcaacaaaagggccatttgttgactcaggtgacagtagctgggtgtagagggaggcaagaagttaatttacctctgtttgagggatccatgggaggcgagggagtagatagacsctgaatgtagattattatcaatttctgaggcttaggttcttaggaaagaaaaaaggacatttcaaaggtggagttcggattaggagagtatcatctgtttggttttggttttactttgattttaaacagaatgctttagcatggttttgttctatgggcagagatccagtggaaagagaggtcagaaatacaggagtgggagtaactgacattgggagaaccccgaggtgtgggaagtgacagagaggagctccggtcaggaagagaagaggaaaagatagctgaggagcagtgagtgtctagctgaaggcccctctttcctctgtaaaatctaccccgtgtgacttggttaagtgaayatctgctgccttttagttcttttctcttcgggcctcaaattcaaggaacagtttcttctaagttctttcatctgctcctttaatcagcaaacattcactgggcccctgctttgtgacaggcatgacctaagcctttggcgttaccaggcccctgagctcctggcactcaggtcctagaggagatgcttccatggcctgattgggcatcgctggctcttcctagtccatgcctgggaattcaactgcaattcaggggccgtgcagaaaaagaggaaaaagttaagagtagctttaggcaaaatcttgaaagaggagattatctttggaatttatcacataataactttcactccagctccccgaattctcaggggccctctagatcctgtaagattaggcccaaacctagaatttcctgaccccgccccctttcaaattctcctgtgtttctccatcctgtcaaaactcctactcccttgttatagtcatactcacctggtaattagaacaaagaccattggaattaattcacactgatttgtgaatggtggataacaccttagtgggggtggggtaatagtgattgcatttgacaagtggctcctgtttataagaaggaatctttaacttgtcatatttcagacagcataataaaagtgataaggagtattataagaggcctcatcttctcacagtcagttcccctaaacttttccattttctcacagcttccactgtttttttttttcctagagtcataagttctctaaaacccctaagatttttgtcatcactccttcccttcctggatgcgctgcccgcccctccgccgcccccgccccgaccccccactttcccgtttctatgacagcagcaactagggcacaggtggtgaggggttgggggtggggtcatgacagctgcagccatttatagggattgtttccaagtcaggaactgcctctgcactgggagagagggatgcccagaggcttcttggcacaaagaatgcagcctccctagaatgaaggaggcatccactcagatctgagctgatcgaaggcatttcccatgttggtggctcctcactgagaagcatgtcaggtctcaggtctctagctccctgatgcctgggagctgttgggttcatatagaatgcaattccccaagccacttccatttgttgtagaaatggcaacattctgccacaaccgatcgatagctgaaaagtggctgtcaggaaccactttggaatcagaaggtctgggaacaggaggcaccgctgggaatagacccaggaaaggttgctcatggttatcgatcctgcagcctctcctatagacatctgctttggggaacgccgytccctcaaaagtccttgactgggcaatagctcttagatacactttttggagtgtrtgagtttcctgagccttgagatgagtggttttggttttttttttccccctggacccaggatatcaccctagaaattcaacagtgtaggccacacattctcagacatccctgtgcttatgaatcaccaggggatcttattacaatgcagattttgatgcagtaatctcagggtggaacctgagattctgcatttctaacaagctcccaggtgaagccaatgctgctggcccacagcatcattggagtaacagggatctagagctgcactgtcaaatacattcaacactagccatatgtgaccgcttaaatttaaagctaagttcattaaacttcaataaaacgaaaaattcagttccttgcctgcactaaccacaatttaagtgcctagtacccgcatgtggttagtgcctgccatattggactgcacaaacaaaaacattaccatgatcacaaaaggtgctattcgataaccctgggctagagcaagactctgttgcatcactcattcattcatccatccgtccatttattcacygagcatttgttatgtgccaagaagtatggttggggctggagcattaaggcacacttccagctagcagaaaacataaacataagctaactagaatgcaatgcacttaaaagagagatgcctctcatgtggtgagggattcagagctgggaacagtgaactctgccatgcaagtgggaaaacaaaaacatctcttggcatttcatgtgtgacctgaaccaagcaatggttgtaacagaatcagagcatttatgagattggctactgacaatgcattttcaccatttcagggccataatcatcagaaatggagaaattatccccatgtcttcagaatttacccccgagacggagcgccagcgacttcagtacctggtaagagtcatctaggcttggcagagggcagtggcatcagggatggcatcggagctgttctggaggaacacgttgctactgacatgggagcaggctcaccgcattcaaatgacatatggtattaactcccccacacacaccttytggatcacacatcctggctccgtgtgtgacgacacactccacctccgtgaatttattattgcggctgattttctcccatctgtgaccaattgaagacatggtgtgctctggttttgttttttttgtttttttttttttttaatggcttcttatgtacaatgtgaaatgcagttttgaaaaacacagataccttcttccatggcccgctactcactttaactcaaacagggaacttggtctgattcccgttgtgaggaagaatctgcccacgtggcagctctgaggtctctgctgacatgccactacttcatgctcagatatgaagtcttacaggccctttggaaaaggtgcaggtgtcagaaaatctgtttctatcctgaaaataagttctctatgtagattattctctttggaatgaaattatgagcgggctcagttttctgggaaacagaatagactcacttccttgtcttcaaattccaggggcaagggtattaggcttagaatcttggtttaaagtgactctggtaatcatcccaggtggccttggggcagatacctctaggaactaaccctgtgaatcatagttctgtggatgaaatattttctcgccaactggatttctttgtagacaacacagctaaagtagtgcccatctgctcttaggaaacaattgatccaggctactcaaaaaggactttgcatctctgcatttcagtatttgtggtcaggatttaattaatttggttgatttagaaagcagctctgcactttccttccatttccatgtctgtgttttcattcattttattctatgaactgtgtcactttaactacttatttggtgtataagacagcaggaatccaaaatgactgtaaaaacagtacttcaatctttcacctactgttgctttctaacctttgtggtggtgtcttaagctgataaacttgaaaccactactagggaatccaggcttcagacctcgtcattttctttggtagtctaggccggtggaaaggaccccactgcagccttcagatcttcattctggccccagctgtgttaccagctggacagttttgtgcaagtttcttaacctttcctgacctcggtttatcacttgtgaaatggagagctggacgatagggccaccaagggcctctgagctgcaaggatccctccaagtagaattcgttatagctagcctctctgccacctgtctggctttctccactctattccacaaggctatccaagtgacctcattacccaccttgtcactcccctatctaaaagcctttggctccctgcaatttacagaatgcagaccgcccttcttggccttgctggaatcctggcccctgcccacatctccagtcctatctcaatgttgccaccaccaccactgccaccaggcatcccatgctccagccacagagaactaccttccatttccaggacatatcatgatttctctgatctctgacccccatgcctttggaagtatggtctgcctggatggccttttctttcttttctgttaggagaactcctcttcattctttaagactccagcacaaatatcacttcttctgcaaagtgtcccctaatcctcctagggagtcagtccccagtgcttgtaccacagcttccagatccctgcagtgtggctctcagcatatggtgttgcttgttctggtctctccccctcttcagactgtgttctggagggcaggccacttaccttagtcacctcatattgccagtattcaacacagcacctggcacaagggagatatagaaccagtatctgtttactgaacgaaagatttaaaaacaggctgggcacggtggctcatgcctgtaatcccagcactttgraaggctgaggtgggaggatcgcttgagcccaggagttcaagaccagtctgggcaacatggcaaaatgctgtctctacaaaacaaatccaaaaaaaaattagccaggcatggtgatgtgtgcctgtagtcccagctactcaggaggccgaagtgggaggatcacttgagcccagaaggcagaggttgcagtgaaccgagactgcaccactgcactcttggggcagcctaggtaaagagtgagaccttgtctctttaaaaaaaagaaaaaaaaaattaaaaacaatattcatattgacttctagatcattaccaaacagtcctttctcttctgccctccgcccwwacatttcacagcagggtatgaagcctttgcctyccttgcctctattatatcctatcctcaccttccgttgtttttttgttttttgttttgagacagggtttcactctgtcgtccagtctaaactgtagtagcacaaccatggctcactgtggcctcaacctcctaggcccaacaaatcctcctacctcagcctctgtttasctaggactacaggtgcaccaccgkgcctggctaattatttttttcttttgtagagatggkggggtctcmctgtcttgccagggctggtcttaaactcctgggytcaagcaatcctctcacctcagcctcccaaattgctgggggttacaagcgtgagccactatgcacagcccacctcctgctctttattgaaacccatttcctattcaggtttctgttttcctacaagaggcaatgaataataagttaactttttgcactttctgttttaaaatgatttcatcttttcatgttacaagaatggacctgggaggttaacttggttgggggaagtataggaatgctgacattttcagattcccaaatgtcagcggtatattttgggatggttgaaataagatgcatgtggcttcagatctcacgtaagtgtatgtaatttccacaaggaacttcagtgactcccaatttcttcaacagtaatgggatagaaaacttcagaagtctgtgtaaggactaatacatgccgtactgttttgtgacagaaagtactactcatttagctattgtatgaggaattaaagtcttaccactacaaatctgtcttcatctgtttgggctgctgtagcaaaaaaccataaactgggtagttaataaacaacagaattaatttctcacagatgtagaggctgggaagtccaacatcaaggtgctggtagagtcaaggtctggtgagggctctacttcctgatttgtaggcagccgtcttttttttttattttctttaaaaaaaaaaaaaaaattcatgtggcagaaggcacaaggatgctccctggagcctcttttataagggctctaatcccatttatgagggctctaccctcatgacctaatcacttcccaaaggccccacatctaaatgccatcacactggggatttggcttcaacatgtgagttttggggagatacattcagtcggtagcaaagatcccactggcctgcaaaccagggtaatttttttcctcgtttttatttaagaaccatttctaacgttgctaagattaatgcataatttggtgtcgcccttaaacaatcagtgtggacactattagtccacagaaccgaacctaatgtctgaatttttaaaaggtgaaaatgctgcccatatcctttttaatccttactcctaaatcaaatgggttactctagtttataactaaaaacatttctcctcagacatcaggagtttaaatactcagaacataaaataccctgagttagaatattcatagcataaaataatcttatggtgaaatctttatggtaaatacttgagggaattagagattaatagtgtaaaatcttgaaaatagtatcggccaggcatggtggctcacacctgtaatcctagcactttgagaggccaaggtgggcagatcacaaggtcaggagttcgagaccagcctggccaacatggtgaaaccccatctctactaaaaataccaaaaaaaatcagctgggtatggtggcacgcgcctctaatccctgctactcaagaggctgaggcaggagaattgcttgaacctgggaggcggaggttgcagtaagccgagattgtgccactgcaactccagcctgggcaacagagcaagactccatcttggcagggaggggggtggagaaaatagtatcaactatgagaggaaaataggagtgtgatgtggatttctcccagcccagcccagtcatgagtcatttgacctctagtttcccctcacactctgtctctgaatctcctttcttcctgaatgaaacgggtagcaatacttccttttaggtactcataacatgctcagaaattaaaacgaaaagtaactgcatggtaatataaaatacagtatactgtgttataattttaagtgcgtgtaatcctactgattcattattttaagcattcattcccttgaatgattacaaaatagtttagtacaatgatagttgtatcatcttccttaacgtggcctcatcagttattagtcactgaaaaattaacagtgtattccttgttcttagggtaaatcaaattttatatttagggtatatgaagaaacatctatgatagagtcattaaaacttctgggtccccatcctggctaacacggtgaaaccccgtccctactaaaaatacaaaaaaattagccgggcgtagtggcgggcgcctgtagtcccagctactcgggaggctgaggcaggagaatggcgtgaacccgggaggcagaacttgcagtgagctgagatcgcaccactgcactccagcctgggtgacagagagagactctgtctcaaaaaaaaaaaaaaccgaaaacaaaaaaaaacttctgggtccctagccacttgcattgagcagatgtctgcagtcccaggtctgtttgacttgtagaaatggtaaatgcttttcttgctagtgaagaaggtggtcagagtcctttctacatgaaccattttgatccacatcaaagaggaatgttcagtgttcttggtatgcacagtctggacattcggggattatggaactggaagcagattacaagatgatggatgtggcaggcacattaattttgtttggtcttgcattctgacctcagagggcccttcatgtggctctctgggtaatgtgaactttgtttcatagattctcaggcagggtgattaattgagcaggcttgagggtttgacatgttcacacggaatgtggcaggtgtgtgatgaggagttcaagggacgggcactcctgcctcagcaccagggagagctgatgatctgcagtcgtgactaacccttgctcttctgttgctgggttttgtttctaaggtctccatggtgattgaaataaaatatttaaggggcttcaccaagctggacagaatgttttggtggagtcaaggctcagataggagggaagggtgtctggttgatggacatttcacaacagattttactgttctgatactgtggcctcaaggaaatcacccctacctttgcttcaggtcacagccagaaatggatctccctcaggagacatccatagccctgaggtatgagagtgatggttttccctccattctgccggtacatatttataaactctgacttgattacattaagtcgtgccggtgtcatcatatcttcaaataacatacttctgtccttgcagaataatccaagtttgcagctgtttttcatcmagggcaatgtatagaagagatgaacgtgggtttcaagtacatatttgatgaacacaagtgcaacattatctgaggtgatttcttgcaatgtccttggaactacccccagctctcaacgccgagccgggttctgtttgtctgctgtttccctggtgctgcttggctctctgggatttttcctgctcaagagttgtctgcagaaaagtattccttaagcctgaacctgctttgaaracaggaggctataagtggggaggttcaagcgtgctggtgggtcaaaatgacaggtgcaccaccttggcatcccacctaaccttgagagcaggtggctaaagccagcaagcctggctttattcagaaagagacagtttcaatatctccgtgttttgctccctgggagaatgtctgagtcataaaaaaatccactccagtcccacctacttcctcatttaacctcctttcataaaatggcatatgaggttcaaattttctaattataaaatggcagactagaagctattgtggcatttttttctgtttacaataggtcccctggatcacgtagaaatttaaatgtgaacttctcttaaaatcttcataaaccaggcagaattttattcgtattcagttctgtaatagcttatatatacaagctcggttcttgttactttgagatttttgacaacaaattaagaacagagttctttatgaaagaatccaacctatacatatttgggtctcagccatttcacattttttctaacccaaaccaaaatattctattcctgcactgtaaatcaggcagccagccttggctctggaaaagctgtctcatttgactgttagcgtgactgttagtgatcaccagtggtttggctgacattattaatttcatttcattcttgaccttagactttctatcttgataaatcatcttgaattgcaaggcttccaatcctcttctcatataatctgaggagattttccccttctaagggcaagaaaaaggagagattactcaattaaaaaaaaaaagttttgtattgtacacggaaaattcgtattttgattactttctctcaaatgctgtgaggtctgaacatttaaaaaattaattaatgtataagttttaggtagaggattctagttttagtcagagaactttacaaaagattttctgtcgtggaatctgccatctcatttatcttatttaacacatgagtattcttattttccacattctgctgatgagggtggaaattggaacaactcctttgaaaaagagtttggcagtctccctgaagttgaaagtgctgtggtccagcagtgttactcctaagtgtgtacctaacagaaatgcgtatgaatgtttacccaaagaccagagcgtgcatagcagcactgtttgtaacagcttaaacgggaaacttccatgtgcctccatgtgaagagaccaccaaacaggctttgtgtgagcaataaagctgtttatttcacctggatgcaggtgggctgagtccgaaaagagagtcagcaaagggagataggggtggggccgttttataggattcgggtaggtaaaggaaaattacagtcaaaggggggttgttctctggcgggcagagtgggggtcacagggtgctcagtaggggagcttttgagccaggatgagccaggagaaggaatttcacaagaccatgtcatcagttaaggcaggaacaggccattttcacttcttttgtggtgaaatgtcatcagttaaggcaggaaccggccatctggatgtgtacgtgcaggtcacaggggatatgatggcttatctgaatgcccctggaaagtagaatgggtaaataaataatgaaataatcacaggatggaattaacatacagcacggagaatgagcaagtcgcagttacacacaacatggatgaatttcgcagacttaatacccagcaaagagggcawcmtgtaggatttcagatgaagcacagaaacaggcaaggccagtcttgaagttggaatagtgcccctttggggcagtgacagtgattggatggggtgctgatgatggggtgctggtcccaggatgctggtaatgttctttcttgatcgggaggccagctacacaggtgtgttcaatttgtgaaacttcatcagcttgtatgcgtatgagaagagcactttaccacatataattcactgaaaagtttaagtagtttcactttatttaactccatgtatcctttctttaactgcacattaccctttgcaggaggggccatctttggtgccaatgtctgcactcctgcctcctctctgccccactctcttctctcctaggattacctccaaatgccatgctctctcccacttccctgcctttgctgtggccacacttgccctagagctcttgcctgaccaactcttaagctcctttgcagattctctctgatcctcttcagtgtgtgacccactctgttccttggtccctgtgaatggctccatttctgcccgtaagccgccctcagcctccttcacttgtgtgggtcagctctgagcagagggtcctctttttgtgttctttgagccccaaacccctagtccctggtacttagcatatgtaagggctcaaatgttagttgcatgaattcctttgtctggataccccaagccctgggacagtctccttcttggctgacactactcactggccagctgaccacaaagcaacaggaaaaaaaaattatcaaaaggaggaagaaaatgaggaagcattttgtattccctagcaagcaattttgagtaacctcaaagccccatctttgtgtccactggcaggctggtgctcagccctccgctggagccctggtcaccttagacttctcccataaccagggctagcttccctccctggggtctgagttccctgcttccggctacccttttttccttgccctgctgaggtgctcgaaactctccctgagcccaggaaggtggagctcagggccatgtgatctagagtgagacagccttgggtgcaggttgctcacctactctagacttctggcctccctcttgcctagtgagaggcttactggaaggttctggaaggtgcctcttcttcaggcttgttccctcctgttatgtctccattcttcagggtactcagagactttctttgggatggagttgttgtatttttccacagtgcaatgctcatctcccttctcttcctttgaaaccagtttctgctcaggactagagaggagagtggccatagaaagacatccaattcccctactcaaactctggtgtcctgccctgacacagtcagttgttccagcatcctttcctgagaggtgtccttgttcctggccagatataaccatgtttgtaagtttcctttttttagctgctcagatcactaagtgatgaggatatgtcgtattctctttaacaaatctgtgctctttagagtccctaagagtcttggttacttgcatttggtcttgctagggcagaggttatcaagctttttcccccaggtgatatttgtggcacacacatgaacttggggtatacctccgccctctcccctcatttagtagcattctgttatgtttccttgaaggaaaacctcaaaatttaggattaaaatggaggtacaagaagagatcctttttttttaatcggagggtgggctggtacactttaaattgcattttaaggctgggcgtggtggctcatgcctgtaatcccagcactttgggaggcygaggggaatggatcacctgaggtctggaggtcaagaccagcctggccaacatggtgaaaccccgtctctactaaaaataccaaaattagccgggcatggtggcgcacgcatgtagtcccagctactcaggaggctgaggtgggagaatcacttgaacctgggaggcagacattgcagtgagccaagattgcatcactgcattccggcctgggcaacagagtgagaatccacctcaaataataataataataataataataataataataataataataataatatttgcattttaatatcaactgctaatttataggtttctcatctgcaggcttattaagtgaagagacaaagcattattatttaggtattcttaggattgtaaaataacatcatggggttttaaaaaccacatgcagccatgcacatgtgtttttatgggaagacatctatcaatttataagaagttaactaaatccaaactacgtgggtccaagatggtttttatacaatatgggccttacttttaactttttcaaaagattgaaggctgtgttatcttatagtttaaataatcactatgttgtgattgtgtagagcaggtcagaatgtcctgtattcattcttttagcaaatacttaytcagcacctttactatgttgggtgctatgctgggcactggagtggagttaaggttttaaaaatgatggacacatggccgggcatggtggctcatggctgtaatcccagcactttgggaggctgaggcaggtgaatcacctgagattaggagttctagaccagcctggtgaaaccctgtctctactaaaaatacaaaaatttgctgggcatggtagcgggcgcctgtaatcctagctactcaggaggctgaggcaggagaattgcttgaacccaggaggcggaggttgcagtgagccaagatcaagccattgcattacagcctgggtgacaagagtgaaactctgtctcaaaaaaaaaaagtcagtaaattattagcaaactagcaaattcctgccccaacactttacagactttgggcttattgcttatggtaaatccaaagtaaaatcattttgaagactcaggactccagaatgctgacttgagcaatgcttccagaggcacagaccagtacaaatgaagtaattctagccagtcatggtcacctgaattctgggcaggccctaagaagtttccaaatcaccaagttgtttggccactctgcgtttgcggacaaaacatctctgcgctggcctgatgggaatctgcggcttccacatccccgcattggagccaggcccctgctctgcttgcctcttctccaggattttggctttccctaaaattattagaacaagaagcagtaacgctcttctcagcagtcttttaaaacttgctttaaacactgggttctcaaaaaactaatttttagagggttttttttttcaaatgaaagtaatctgtgtccaatggtcaaaatatccacaattatggatacattaaaaagaaaaccctcagataacttttttaaatattttkwtgactgkacatgtgtaaacatgtgtgcatataagactatataaacttttatgattgcacaaaaagatagactaataaccgtaagtgttttcctctgaaaaccaacaggtttttacaaattgtgtgcagccatgtattttakcatctcatttttcattaagcaaccatatgtttgctctgtttgtaccaagttcttgagaaragttcctttaatgccattaactccatagggtttgacatatgcaacagcagtaagtattgaatgtggtggcaaggaggtgggtggtgattttttaaaaaagagagagtggtaaaaatatatcacaggtacacaaggagtacttataatttctatggtaagcatgattatgacagaaaatgaatcatgccacctgtgctgtgtcagttagcaacagaggaakaaaaatcagaaggatggagaaatctaagagtgtggcatcagtatcagtgggggggtgactatgacagtatttcctcagaactaaracacgtctttgtttttttttaacatatctgaattttatatttgatttttgctgccagccargggacaggcatgacatgtcatctcctggacatatgtgaacatcaaaagggcagacacctgcaggggcggaaaagatttcctcacccatcacaaggtcccccataagaaaagacaagataaacaagagaaaagcatacaaatctatttaatataagttttacatgacacaggagactttatgagaaattgaagacctaaagaaataggtaaactttgtatatttttatgcttaagtttgaggaagactggacagtcatggagaaatataattggataaagtgggtgtgatctaatgggaataaactggggagaatttagcaaggctgtttgttcagattcttctgtatccctgtgtcttcagagttaaagatgtttctttcctctggatatggggcgggcacctctggaatgaggatcctgtgacctgcttcaggggagagggacaaggggaagttgagagactttcctgtttctgctgtttcctcaaatgccaaggtgccattttttggggtagaatgtcctgagtcccaacacaccaaacttttgtgggatgggtgtccagcagcttggaagaacatcctgcagagaaaagtgaagggcttgttaagcatcactggatccaactaattgtgcggaggagtttgaggaggtgtgactcagacttgcttagccacattcctgaagtgggagtcagaagtaagctggctctagaggattgcaaagctggcttaagaacttctgcacccttagctttgaggcttccagtgctgttgtggattaattaaaaaatgctgcgtcaccggtgctctcatgaaacacacaacacttctgtgtggaaaattatgaacatacatgattcagagttgaaaaatgatgagagcagttggattctaaatgtaaaagttttggaaaccttagccaacctacttcaattctatatcccttattaaatatatacaatagtgatagataataaaaatgtgtctargtctcagctcttatgaaaaggataaaattaaaatttgaagtgttaagaaagaattatacatattttaattggctgctttttttcttcctggaagtaataaaatgatggtgcgtctaatggcatatatgtttgatgaaatatcataccctgttgttatcctggaagaaagcaagcagtttgtggaaatcatgaaaggctctgtgtgtgaaggcgcctcaragtgacacaatatttaaggccctttcaaacctgcacatcctcagagggagagggtaggtggcccctgcagttatcaaagctgttgaggagttcccaactaacccacagayatctgcctcaacagatcttctgacgcagccacccaggcaaatggatatcagccaaaaagagcccaagggtccctggtttaaagcaccatcaaagggcccactcatcctcctgttaggaggcaaagcgcctgaaatctccacacttacccttatgtgggagaagagatttcttacccattcatggctgatgcccctataacaaaagacagattaacaagagaaaagcaaacaaattgatttaatataagcttatgtcacatagatgtcttcagaaagccccaaggaaacagggcaaactgtatttttagggacagtcatacagaagtttgatcaaaggacaaaagatctaatggtaataaactcaggggtaggggtacttagcaaggcctgtttgttcagcatcatcttggcatccctgtgtgatatttctttcctctgggtatggtgcagggcccctctggaatcgggtcttaatgatctattttctggggaaggtgagctaggtctcatggcttgctttagaggaggagtaaggggaattcttcctagtttctatgggctgcttctcctgttccctcaaatgcccaggtactgtgattggaggtagtgtgtcctgaacatgcatcaccttcttagacatggggtttgttaagaaatgtgctcaggaatgtcgtttggattcttacctgtttgttaataatatatatgcatgccacgtatctgtatttacacacacacacagccttagtctgtctggtgctgctataacaatactacaaactgagtaatttataaagaacaaaatttatcacagttctggggtctgggaagccccaagatcaagacactagcatctggtaagggctttcttgctctgttttcacatggcagaaggtggaagggcaagagagtgaactcactctcacaagcccttttctatagcagcattaattcacgagggctctaccttcatggcctaaacacctcccaaaaagtctgcctcccaacattgttgcattaggggttaaattgccaacacatgaattttaggagacacattcagaccataacatgttcatttgtaaacagatggttcccaacttactttttttttttaatcagggcagccttcattttacaaagcagaatgaaagcmccgctacttttttttttttaactttctgatattgtgaaagcaatatgcatttggtagaaatcatacttcaaattgattttgaattttgacctttttccaggctagggatatgtggtatgatactctcttgtgatgctggacggtggcagtgagccagcagctcctagtcagccacccaatcatgagggtaaacaacctacactttacagtggactgtgttgccagatgattttgcccaactgtaggctaatgtaagtgttctgagcacatttaaggtaggccaggctaagctctgatcagtaggctagttgtatgagatgcattttgacttacaatattttcaggttacratgggtttactgggatgtaaccccactgtaagcagaggagcatctgtgtacgtatgtatgtcttctataaagatctgtgcatatatgacccagcactcacaagttcatgcacacacacatattgtttgatgacctgcttttttacacttaacgcaactctgtgtcattgcatattctctgtagtgtcattgtaagtgacaccatagaattcttttgtttgggtttatgctagtttatttaatgagttattcattcartgatttcttctagttatttaatgttataaataatgtcagagacatttttgtgcccatactgtgtgtggctctgtgtgtgtgagttcttttaacaaggtttactgattcagactttgcttggtctaagtgcaaaggatcacaggcctcttatggcccctttactatcttttgtaaaaatgtgtgtgtaggttaaaggcccaaaatatggttaggatgagggttataaccatgatattaagctcaggctcaagatccacccagtcttgggcgaatgacctcgggctaggtcttaacctctccaggatgtagtgttctcatttgtaaatcaaatcgactcctgctttgtaaaattgttggggagtaagatcaggtgtatgaagtacctggtatggggctggcacatggtaacccctaagcccatgttagtccagcttgggtagtggattgtattcatgctgatacaatctgaaagttctgaaagatcataaagggcttataacagatggtgctgtccgttgaccacttatgcctttgttccttagttttcatgggcggactaaaataaaaagaataaaatagtatgtacccagtaggcatgacgagcttcatgggcctgtgacttgtgcggtcgcggagggtgccgtgcttagtttagtgctctgcttagtttaatgctctgctgtccctgtcttgaaattcttgattttgaacacaggctccctgtttctgtttttcaccgggccccacaaatgatgtagccagtgttgtccagaagattgttaagagggtgaaattagaactctcaaagcactgagtgtagtactcaggatataataggattcaataatcactaggtgactataataattttttgtaagcagaaacaactaagtatattaatagacattacattatgaaaacagcagtgtgggatatataattaatctcatttacagataaactgaggcccaagaaattaaataacctgctaaaaccacattgcttatgaaagcagagcttggattcacacccaaattcttctcacccaaagcaccactgttgacctgacctattaagtgttagttcccttcattccttcccaggagaacctctctgtraaacctcgtatttaagcttccttgatacccatcagcaccccaagccttactcccagcagaattttcagagcccctcaragtgatccagaattcccaccagacctagaaactgttgaggctacagcaaatgggaagcacagttctcctgctcaccctcagtcaccctgtctcatcccatcctgtcctgtccccaagcctgcccagaattacttgctcagagttccatatctgggcaaatatgaccagcctggtgacaacttagcttccttcctttggttcctgaaaaacttagcattggatgactaccatctaactaatacctccagaccttcatgagaatcagtgagagatccgccggcattgggtcctagcaaagtagctgtaagagatgcctatgacccatacactgaggacctgaccatctgcctggtggcagagatcccttgctttcctacactgccaggctgtgatttgctctgcccactcttttccctgccagaaaagaaagaagatccattccaccatgctgctcagaagcaggtagacagcttcatgtggggaagttctagtgcaggcctgcttgcagcatgtggcctctgagtagagaagttagtacgtgagcattgcgtctctcggattgctagatttgaattttgaatgtgacaatgagactgttgtttcaaagcaattccctaagtggctgtttgctcaagacttttgtagtgtgaacagagatttgggggagggggagaagccatctgctccagaatagtcttcgaatgacacgatcaaatgactgcagagcaaactggagggagtccaacagaaagttcctgtctgctgcatccagccccaaccagcactcragccattgtgtttacatggaagctcacacacaggtttcaaaggcaaggccgtgataaccaaggatgtaagtgagatgagtgtggaaaagaccacgtcagggagctttctcaccccgtatctcaccagtataccatttggaaaactaaaaagccattctttagagagaagctcagtcttttttcctgatcccttcagctatgcatttggttacaattaatgtatcagatcaaatgaaaaagttacattcctttgtaaattcatttttatgtgctcgtcttctattagtgtttaaactctgaaatctatttacttaaaatatgaggcaattttcttgtttttaaaatatggcctgyctcaatttgcaaaacatccttgattcttattttgtttctctaaatacgtgtatgtgtgtgttttttctttttctttttgctattaggcattcatgcagcctcacttgctgggaaatgagttcacacatttggagtttccaaggagagtacagagaaaggagcttggaaagaagatgctctacagggactttaatatgacaggctggtaagaacatgccttcctctgcctcggaaccacacagtgtgtgtgaaggaagcatcaccaccataaacagccagttacacagtttggatcaggaagcacagccagagaccagggtttgtggtraaagacaagggggtacacctgcctctgctatgtttgcttaggaccaaatcacgagccttggtttgcctctctgcttcttcgaggccctccttggggatattggaccccaggaaactgacctgatttctcacttcacatgtagcaaatatttgagggctttaaaaacacatgaagctttatgtgtttaggtcagggttattaaagaggtagaatggccaaaggtttattgagccagactgacttgggtttgaatcctgactctgattcttctaaatgagcaaagttggttaaattgcttaacctctagagcccatttttccatggataaagtgataaaaagatatatcctttgaagattcattatcaaggctaaagttaatgagctattctcattaatatcacattcaaattgaaataagaactcttgtcaggggggttgtcgtattccgaaaacacaactgtgtaagcatcaagaacatttctaggatggagcagtggctaatgttgactaagacctcagctatttcttttatctgactgatagatatgataagtacttatacactatagggttaatgtaaggattaaatgagagcgcagtgcctggcactgtgtgggtgaagatttgctcttgtgccctggggtcctaacgagcgagcctcctgccagtctggagaccatatgagaatgagaccatggaccctttcttccccatatctccaaaagagtcaaagaagtagattaagtagattttcttatctcttccccattgaccaaaatagcaatagcagatggtcacagcccaaattcccatggtgatgacttggccagggatctactgccagggtacatactgtcttcagggaacaagttgagctacccagagaagataagaggccaaggggcttctggttgtcctttgccaaccaagagaagtttctcacctgtatccactcttcttcctctacaacaaggttagcaaactatgacctaagagtcaaattctgcctaccccatctacttccagaaataatttttaaaaatatagctacacccatttgtttgtttgatctgtgactgccttcacactgcaacagggcaattaagtagttgcatcacagactggttctcaagcctaagaatttacccctgctctaaaatatgaatggatttatcagaaagggttcacctttgcagctctgagttctggagttttgatgccccagggtcatcataccaaccctgactgggttttcttgtgaatccatttttatttagttagcaaaatcagcacttgtacaggaaaagtttaatgtgagagctagtgtaattcagcaaagcatcatggggtttagtctgggaactgtagagtttggaaagatggaacgttaggaacccacatggttgtaaacacataaaaagagtagatctaaaagacagcaaggaacatgaccaaatagaagaggagagactatgggagacagatggggctggtactgagggaacatgatagggaaaacgggatgccagacaagtttagatttactgggaggctatggggtgctcttatatattcctgagaaagagaaataaatgaaagtgatgtttttggagggccattctaagagaagttggaatgagattgactaggagagaaagcagattcaggtactcagagaaaaactatcataacaacatttatgtgaggtctcgaggcctaaatagagggatagaagcagaaaacayggaacgaaaatgaataagaaactaaatgatttaggccaagggataaaggtaagaggttaagtcattgacagcaccagttgcctatttaaatatgtctctttaacaagtctgtaggctccttgagggggacaccagtgcctagtcctgtgcctgacacatagtaaacaggcagcaattatgtattggctgaaaggaataaaggaggtataattgacagaagtggggagatcaatgttgcagacagttgatgtgcacatttaaagcagattgagcttgaggcaaggctgtacctatgttctttctatgccagaaaggcaaattagatctaaagtagtcaaaacaaatgataaatatctgcctaggattttgtaataaggaaaagtatctttgttgcagatgcttagtattgattcaaagggggagaagaacagctcattgttactaactttgaaaagcactcctaatgagataataggcatcgtcactttaatgggccagatgctttcaaaggctgtaaaggttccactcaaacctctctttgtaagtagaatgtgtgatgaggttagtttttttatgtttctttctccaaaccctggaagctctgcttttgtgttttgtttgtttttgttttttgtttttgtttttagtggcttgtacattttaatatttagaaaatggctaaagattgtcctggttttataattaaaaaaaaaatgtagctaagttcagggactagattatatccaactttatatgcacacagttactttctttcactcttgcgtgcacacttgctcttgttctctttctcattttccttctctttctctctctctctctctctctctctgcattagcatggtcctaagcagataaacagtccacaaatgggctatttttaattgtatagaacttcacagaaggtaatgaataatgaaggagccacaactgagaatggctttagtcagatgtgatttgctgatttgttttcagcctaattccccaaacggctgttggctcacaaccttggctacaagcagatttatgtgcatctttgtgcatttcctacctgttccaacttttgatttgaaaataggacttaagttgaagaaaagccctttacatctttgtcagaagaacctaagaaattgaaaaccagtttaggccaagcacagtggctcatacctataatcccagcatttggggaggcataggtggtaggatcagttgagtccaggaattcgagggtgcggtgagccagaatcatgccactgcattccagcctgggcaacagagcaagacctcatctctaaataaataaatgaatcagtaaatcaatcatccattcaatttagactactgcctacgtaaagcactccccccaactttaatgaattcctttttaaaatgtttttaccctctagcagaaagccttagatctagcagttattttttaggacttaaagatgggaggctgggcatggtggctgatgcccataatcctagcactttgagaggccgagatgggaggatcacttaagcccaggagttcaagaccagcctgggcaacataaggagaccccatctctataacaaattttttttaaattagccaggcatggtggcatatgcctatggtctcagctcctcaggaggctgaggtggaaggattgcttgggcctgggaggttgagactgcagcaagccatggttatgccactgcactctagcctggaacccattcttctgaaaccttctaacaagtaaaaagtccacctactgcaaagctgtttaatccttgtagtaaatgcctagttgtggaattttttttcttcctcatcttccactaatcatcatggtaatggggctgacaattattggaagagctaagggccagacactatgatgagagctttacctaattcctcatacctaaygcttaaaacagtcctgtgaactaggtacattttacagatgaggaaactgaggcacagagctaagttgctcaaggttacataactcgtaagaggagaaagtgggatatgaatccaggcagcgtaacttcagagtgtgtggtgcttactaaggtgctaaactgccaaatgtggaatgacccccccttactcccattttgcaggtgagcaaattgaggcctagaggtattaggtggtttgctcagcttctgacacagcttgcacacagctgatgcaaatgtgtcagaataaggactagaatccaggtttctgactttttgttggggttctttctaatacagtgtgccagtcagcttttctttaggataattagacatgatcattcagtttcgagcttcggtgtacatttaagcaggggccctctgtccaccaggactggtgtcttgacgatcctatagggtcaagaggatggaatgaagcattttaggactgctgaggccgtcccttttctagtccccagtctgaccctgtagaccattgctcaaattaaactgatgcttcacacttctcactaagagcttgtgtcatttgggggtgggggttctggggaagatcccaaaaggaccagttcttagaaaaattgcctgctctcattagaggagcaccacgccggcactcagtggtgtgtctgctgcaggaggaagtgtgggagaggatgtcagctctgggaaggcttgtctcataattaaggatgagtctgttgcctcttaatggggatccttttttttcccaccctcatgctttcacggagactgtggagcagcttggcaggctcaaattgttttgaggacaaaaggttattgtcaccaggaccttcataatgcagttggcctcttccctggctcccccacctccccttccccctctcctcagatagtttgcacagtggctagatttacaaagccattctcttcgcagtgcccccagtgctgagttcattcytgatggagtcttcccttgctctccctatcacccccttggctctcacctyctgcgcatggtgtcattggtcccggtgccagaatccccaagctggggcccatcctccccatccctttgtgttgagctgctgttgcaggatgcacactgtagctggcattgtgttgccttgaragcagtgtatcccgacccgcagccctctgagatgtctcaggccataatttactggcaagtgtctatgttacygagttgaaacagcagtttctcacagctcgctttgtggcaccaagtctctgctcctgtgaccactggctattccgctttctcaagtaggatcagcrtacttcgtgccatgtccagccacmtggggtggcaagcaagccagggacccagagggacatgtgtgtgggagggggctgaaacttcacccctggcgccaggccagattctccagcagctgttcctgggctgatgggatttgtagagagagcaagggccaaagaagaaaagtccatcttgtgaatgctagattgcttccagatggttctggtcatgagcaaagtataccagaattcttcctttaagcaaagcctttctaacgttatgatggtctcatttcaggggcaggctggactggtaacttgagatcacatgcttgacttggtaaagagagtcctgttttggcgataggcaccttgtgtactttgctctgccaagcttctggggccttgggcagatcctggcctaggtctctcgtaaatacttcctctgaccattgctgcgaacctctaagtgtggtggcggcrgggggtrggctttgctctgcttttagagctgctggaaaagacagatcccattagaaagattccagagatggcagtgttttattttgtcccttagagcccctaactttttataattctaacttgatgatacatcacgataattttccctcctctgtttcccttaaaactatgagcaaataggggattttccactgggagcagagtggagttagcccattttctcctttcagcactttctacttttattgaggcaaagagaaatttccattctctgtgctctcgagcacagtagccactagccacatgtggccatttaaattagctaaattacataaaattaaaaatttatttcccgagttgccctagccacatctcagttgctcagtagccacatgtggctagtggctgctgaattggaccatgcagatatagaacgtctccatcatcacagaaagttctacggcatggtgctgtggtctacatagtagaagagcgtgggtatagttgggaatggtgtggtgcaaggagctctctgtaactcagcatcccaacagcaaagagttttttgttttggtttgttttttttgttttttttaaagacagggtctcactctgtcactcaggctggaaggcggtcacatgaccatggctcactgcagcctcaacctcccgggctcaagtgatctcccacctcagcctcttgagtagctggtactacaggtgtgtgacaccacaccctgctaatttttgtgtattttgtagagacagggttttgccatgttgcctagactggtctcaaactcctgggctcaagcagtcctcctgcctcagcctcccaaagcgctgggattacagggatgagccaccaaacctggccccaaagagttttttaaaaggtgggatgggtactgataactgtggacagggaatggtgtagccacaccggcctctggtgcctctgatgccagactctgagtcagcagaggggtgggcttcacacccctttcctgatcctcaggggcatcagtcattgtgcttaggaacaactcacttcatagccagtagtcacttttgggccaccaagaagctgcatccagctggccagactaaagggagacccatttcatcagccctagtcagtagcgcacctcccctcctcaagcagcccagcagccttctttcagctctctcccctatctcctggatgaggaccagctgctggcactcttgtccctcttgcttttcctttgatttcttggggagtaattcaggccctgagaatatgatttaaaagcagcttggcttccaaccctttccactgtgtttggggtgacctttattctccatctatagcctggagtttggcttggggtggagaagcacagccccacagcatcaggcttctcaccaaccatccaaacgctttctggagagagaaactcactggagatagttccacacatggtctggagctgccaggttgggttttacaaatatagatacagcttctatcttattctttattgctctcttcaatgccctctgacagtgcattcaagcaggctgacaaggaagtggatgagcagattgagaaacgccacagaatgcttatgaagccaactccagagctgcgccygcatttaatataaattgatttattgaatcaagcacagaagccctgttacagaaaccccaggctttatcctcttgaggaccacctaataaagcagccccaactgacactcctcattagcttttccacggatcccaaggcggtttttaaagggacagtgtccctctttggggcccaaatttatgtgttggccatgcctgtgggtctaattagctcagcgttattagcctaccttagaaagcctacatttttgaacagcttgactcttgagttttacagagtaattgaaaaattcaaactcagtacttttccctctttctgcttttaatcactcttaacccaatcttcggaaatttacctgcagatgtctctggcattttggggacacagaaggatctctcagtcccaccccagtgtaaatcctgatgttgccgtcatgccacagacctacctcatggggaggctttttacactcaccagagaaatatcacattttaattttataattacttcacaagaaagcaggcctttccctagtgaaacctggtattcatttcctctcagcaacttgtattttcataatttaatgattacgggccaccttggcagcagtctgattgctgaaagcactctgaaaatctgaccttgtagagacaggggcaggggggatcatttcagagaattttaaccccaaacctcaatagattatccaggatggagaatggctgggccagggattaggcacctgaaaagtccctgtgttccaaattccaacggggctggagtccaactcagaatgggtcagccccacatggggaggggcctctcccggggcttccagagctgagatgatgaatggttatttgctatgtgcatgttctgcatcttttcaagatttgcagctctagctgcaggagcagcagggaagaaagcgggccctgctgtgtgcagcacatctcctgacagtgatgaatgactccctgctccctgccctcctgcgcaggaggccagtggaagctatggggtctttacgaatggttgcaagccaagacagacaggctttgtcagaccacagggaggagaaagaaaagagatgccccaccagctcgctccccattgatcatcactcaccctacacacgcatgcacgcatgaatgcactcacacacgtctctctgcttcaatgagtaaaagtttattgtcctaaagtggctgaactatttccaagcctttcttcccccctcagacccttcaaacactcacagcatttatatctattatccacatacgcttaagcagagtcacacggcgcttcccctgtgactggtgtttggggttgtacagtatgtatgtgataagaacatagctgcaagtcatctggggaagtttggggatgtcaagtgcttataaaaatctctcttaaagtagtgtccttttaaccaagaaggccctgtagacacttaccatctatttgacaggcttgtattgtacacctactacacagtagatgttgagtagcagttaagagcaaggatgctggagccagactgcctagctgggccaatccccaccacagatcattttgccactgtcagccttggtttccccatttgtaaaatgaagctaataatggtacttgaggccaggtgtagtggctcacgcctgtaatcccaacactttgggaggctgaagcgggtggatcctttgaggccatgagttcaagaccagcctgggcaacatggggagaccctgtttctataaaaaatacaaaaatgttctgggtgtgttggcacgtgcctatagtcccagctacctgggagcctgaggtgggcagaacacttgagcccaggaagtcaaggctgcaatgagctgtgatgataccactgcactccagcctgggcaaaagaacaagatcctatctcaaacaaacaaaacagtacttgataatagttgggatattatgggttagtaaggttgagtgcattgaacaaagcctggcatataatagcgcgtgatgagtttctaatactataatcattagctattatggagagtgaaagggtcagcaagagctgctgctggcctcaggaggtctacagtctgttgctgaaatgctgcctctgcaaggtaatgagaagctagaaaacaaaaagacaaaggaaggcagtttcgagaagaaactaaagtcagatcaggtctgctggctgcctctgcctagcaggtctgtcctgcagcatggcagatgaagatgggtttgacacagaaaacgtagagctcttgtctgtcagaagagacaccatcactacagccaggaagcccgttgccagcccctctgtcccaggcactatttgataggatgttttttggtttggggacttttttttttttttttttaaagagacagtctcactccactctgttgcccaggctggagtgcagtggtgtgatctcagcccactgcaacctccgcctcccagattcaagcgattttgatgcctcagcctcctgagtagctgggattaaaggcgtgcaccaacatgctgggctaatttttgtatttttagtagagacaaggtttcaccatgttggcctggctggtctggaactcctgagctcaagtaatctgcccacctcagcctcccaaagtgctgggattacaggtgtgagccacactgcactcagctgatgctggaccttttaatgtactcctgtagtcttccaaaccatacccaagaagctgggagggtcaagcccatctgtggttaaagcatgtccttgcgtaggaaggatttcatcatataggactatgttagctttaaagagattgccacgtggcccaagactggcttttttttttgagacggagtttcactcttgttgcccaggctggagtgcaatgaatggcgtgatctcggctcactgcaacctccgcttcctgggttcaagcgattctcctgcctcggcctcccgagtagctgggattacaggcatgtgccaccacgcccagctaattttgtatttttagtagagatggggtttctccatgttggtcaggctggttgtgaactcccaacctcaggtgatccgcccgcctcagcctcccaaagtgctaggattacagtcgtgagccaccacgcccggcctttctggaaatttattgaacaatatcatttcacctttaaacctattcttcaaacttccacagtgggggaagtagatctgttgggacatatgtataaataactaaagcaagacaaaagataagagttatacaaaaaggtttgaagaaaatgcctgtggctgtggtggagggagtagttgttttgagaggggagattgggattggggaggacttcctggagaagattgtttgaaccaaagatctggattacgagaggggtttcaagaagtttggagagaaggacattcggagcaaagggcactgtgccagcagaagcccagaggagtgaaaatgtgatgtgtgttttgggaatttggaagccagagataatattcaaaatatttggacaatcaaaatggacaagtaggccccagctgggctgcagcagggtcctagaagcctccctgctgtgccaggcattaaccctttatttactgttacctcttggggattctaggggagagtccagagcagcagatgggggcattcatggagactgagacagccattgtttgctgactagcatggaacgtttcaatgttttagcccttcgtgtgcagttatattggtgtgtatcagctagataacagtcccgggaggctcacataagtgacatgtcagagggagcaagagggtgtagagcagtggtgggcagtgaagcaaaccatgaaactaggtaattacattggagtcagctcatggggaactttgaatgccaggctaaggatgccaataatgaacagaattttattttcccacccttaagagctccacaccttaagggtggaatatgacgtatgaaaattacacacaaggcagaaatatagagctgacaatatgtatatccaggacatataggggactactaggagaagagggagggggtgtgagctgaaaaactacctattgggtactgtgctgacacttgggtgatgggaccatttgtacctcaaaccttagcatcacacaatataccagtgtaacaaagctgcccatgtacctcctgaatccaaaataaataataaatgaataaaaatacaatttttatcagtgacttagaagatgatttaagaaaaaagaaaaggacctatgggctaattctcagcctatttttaggatcccatttctaaggaaattccagagaagtaggtacactaccactcctgaaattttccaggtactcacaaacccaccaaggaaacattttcctgtgtccaaccaacactctttcagttacaattagttcactcttaccagagcttgataaattttctgcttttcccagctctccaggtttcccagcaggaaattggcacagctggtttcgagctgataatcctatgaagatggtcacctgcggtggcctgggggcctcttcatctaaatcagctgtggtgatggtttcaaactccttgcttctgggcttaccctagtaatccacacacaagagctggagagccaccactccaaaccctgaaaaatctcatcctaccaccaccgtcctcttaccttcagacaagtaaatcaaggacttattaagagagaggctaaagttttgtgtctgttccttgctggagagctgaaagcagatctctctgtaagagccaggaaggctgataacaaagatgccagcggtgtttcagaactagtgtgttgtcagttgcctctctcctttgttgtaatcagatcataaggaaagcttcagaagcctcatgaggggatggaacacattcactttttgttcttcacctggttgctctggcaaaagctgtagtattctgccatattccaggttcagattctgctgagatgggatcagccttgtcagtcttccagggtagatcagatgctatgtatcactctctgtacctaaaggacaaggcacagagcttcatctctgtgggacaatcagtttcaactactattcattaagtgaaccaggtattaggttgggcattgaagatacaaagcagaaaaaaacagtgccaaccctcatggtgtttacagtctagtgtcaggacagggccatatatggatgattacagtttcatacaaaactaatagacaaaggtttacctacattgaagctttgtcatctggggcaattactgaaaacatttcagggtctattttatctgctgaattagaatctctatggattctgcattttttaataagcaccccaggcgattgctgtatatccttaaacattgactttgggcagccctagagtttgttacaatggatatgaataacagtttgcagaagtggtcggttaaagagcgctgggcagcctgggctgtcaaagtattgtgactcctgggctgctggtggtctttgcccctggttatccccttgctattgcttgggaatgtctttgtccacctgcagtgagccagtgactgttcataaggtgccagtagactggactggcagtggctgataagggatggtaaagccttcaggtgcaacggtgggtcagggtcaaattaggcctcctctttttcctttttgtgcccataacctggatagtccaggcttcacacatagtataaatacatgggataggtcaggagaccatgctkcccagggcatttaacttaatggtttctgattcctgctcatcttcagtaaatgcyacacaccccatctccaaggcctgatcctctgggtcacattggatcaccctatagaaaactgggcacctaggtatgaaaatttggagtctgagtttattgcacctgagcactttgaacgtcaaagctcaggttaaatctaattctatagtgatcttgtacatctgcagtattgttaagagacaaccctagttttcaaccctaggagtactggtatgttttaacttctatgcgactgaccattataaaaacctagaatgtgaagatgagcttaaattttttttttacaatttaattttaggaagagaattaataattaaacattcttttgcatctcatgccattttgtggcatttatgcagattcctagctcttcacagaggcacagagaagcgtggttaagagtgtaactgttgggacagacctgaagtgagcttgacccctatttcctcccagatatatgacctctcttatgcctccattttcttatttgtgtaatgaggataatgtttctatctagcttacagtgttacagtgaggattatgtaagtttttaaaaatataaatccttagtgcctggaacaaaaagattgcataataaacattggggtatgtgaaaatccgttaactgctgggcgtgaggtgacagcagaaaatttaacaatggctgcctttgctctccatcctctgaaacaacagggccacctggatgcaggagctaagagtgtggtattcctccctttggtaaatatcgacagctgttactcaggcctgcgcttcttgccttggcggcctgaataatatgggggttagtagaagatttcagaagagtatgggaagctacaagataagcctctatttcacctgaaaattttgggagtgaggtagaaggacttcatttgtaggcttgtgcaaaactctcatggtttttaaagataaaacagaagactcaaagcactgatacttgagatctgcaccgtgtaatgttatcagttcaaaggcacttgggtggaaagccttgaaatgatgtagcataggttaaagtccctgcatgtggcttctcccaggggacactgcaggactctgctccatgatatgaatatccatctgagcagagtgggagaagcttcgtgagggaaagccgcaagggccgacacagaggaactgcctgtgcagcagaaaccctctttgtaattaataatctgtttgctattttcaccccaccatttgtagctatggggtccattttgttcatatcctgatttgtatatattgacttgatctcatacagtataaagggaatgtcaatgaaattcatgtttatttcagaataaatggtctctgagaaagctgaaatcacttcacatttgtgtgctcatgaagtaagggtctctgattcatatcggtggagagagctaaatgttattgattagaatatgaagctgttacggccaagtgtgaatgcacaccaagtggatactgaatcagaaataatttccaaatctggaatttccttaagagtcattcataatgttttatcctgaaatattattagttctgttttatacatacacatgattactttttttaaaaatactgatttttttccaagkgcatccttttctgctgctgaactcagcytacgaatcaaaaggtgactttcastttgtttactttattctactccgtatacccagcacctgtgccagtgcccggcacctactaggtgctcagtaaatacttgcaaatgaatccaatagaacccattgtttttatctggtcaaagcctgagctcctaatttggaagctacttagagcaggttctgttcttctaccaaactttgagctgtgggtagggacccattcacaggattgtgaaatcagtttagtatatggagagcagcattttaaacaaattgaatagcacaggatagaaagaaaatatcggtgtatatcacatagttagggtaaatattgttttttgccgtgtgtttgtgcatatgttgggttaacaggattgatatatttcttaccaccggtgaaacctctgctgtaacccagtagagtctcccaaagaacattgaccagcaaaatgagagcaatctctgttgcctcttgctattttccataggcctggtgagaagaagaatctttaggccaaaagagagaaatgtttactactctcagaactccaggcagggtctggctcaggcgtgctgatagggagaagtggggaggtaggcattttcctagggactgttggttaaacctaccaatcaggtgatttcctccagggcagytgcattgtcggggaccagagcttgggccccattatggagagttttcatggaggaaaaaaagccagcagcctttcttgtggctaaggagatgagcaggtggtagccaggtatgcacaagctaggctgctaccagccctcttctgtttatcaccaaatattaatcacactcacaattcaaaggtactatttgtgcctgaatctaacttgcactatattagcagaagtctatcaggttgttcacagcttaaggcctataggcttcaactaatttaaagaacactccaaggaccaaagaaagaaaacaaggtagcatttgtttggagagcttccatcccacagggtaactttcccagggatcatatcattcagatacctactgaaaatatcttccaacacataaattcaggaacccaatgagccaaaatatgacccccaaaactagatttatacatacttaaagcctgctatacaatgatgagcctggggcgagatgttgggtccatctccaaacattctaagccccaaaactcccagctggatagagggtgtttcgcagcctcttcagactcaccctggggactgatccttgctccacaacyctgacttgagcctgctgttgttaagcatgcctcagattcactctccttcacagtgcagctctgtctttccagcagacagtttccatccaaaggcaaagtgaatcttagaaaccgggaaaaaaagactctaaaagatgacatttaaaatataatagtaagatctaaccaaacatcagactcttcttgtgttgccttaaaggacacacacacacacacacacacacacacacacacacgctttctctctctttcatgtagtgaggggggaagagctggctgcctgctgtaaggccgcttgaaggttcagaaagcagcctccatttactgagcactgtggttagacttggggcctgattcctttggaaatacagatggctggcagaaaaaaaggaagcaygaggtggttgccaatcctgcattgctttttgcaggaaggtctcaggagagtgggtgtggggagaggggagtcaagggagagcctctgtggattccagaattgcttaactgggrtcatgccaagctcttaaaagccacaagtagcatttgggctccaggcttatgtctgttcctgtccagccaggcctgggtggtgtttcatccyaggcctcctgagatttaagctactgctgagattttgttatagraaggcaagaagggggaccgaagatgtttctgtgctccggcctcctcccaaacccaaccagcccctgtggaatgtgcctctgccgggctaggacttggtttytaatgagaagaaaacaaggctgcctgtggctttctcctccctcctggaggggcactgagctcccagctaaggaaaaaaaaaaaaaaaaagggctccttttatgactatttcaatctaacccagctataccttctttagattattatctctgaggcatccttctgagtatctgagtcctcattttagaggagaacaatggactgttctggataaagttgcacgggtatgctccttcatgcttacagtagaaaaagtatgaattaggtggcttgattgctcagcaggaagtggtttttcytacggggatgtgctgtgtcttcctgcttacggttgcctgttagctctacatctgcatggaagaaagaatgaggctccgaagaccttaatagccacaactgatggccaaatagcacyttatccttcacaaaggatgttcccagacatgtttgccyttaatccttgcaaccatcctatgaagtgtccagttgaagaggcagattcagtgaggtctgagggattttcccaggttcatacagccagttcacatgacgattgagatgtgacttcagaacctctgaccccaagcctggtgtgctttaataccacagtgggctctgccaggagggaagagagactccaggaaggaagatccccaggggagaagaggcagccaaggcaatgtctagagattagtggaagaatgtgactcactggtgtgtgtcattggagctgcacaagtgaattgttgagattatgctgtccccgaagggagcataatagggtcccctgttataccccccggaggggatcacgttcctctcgttcctcttaaatgactttgaagtcttgctaagggaattaagacttagggaaacaagtggtatttctctctctctctctctctctctctctctctctctcyctgtagctcaaggtcatgacttagaagagaagggagatcgtgggaagtgatttatgttgatgatgccaaagtgtgaactctaggttcctggcccatgggttaagcaatcagagtaggggctcttcctggaaatggaggaatccagcaaagactaggaagaactttaaaggaggaacttgcctttaaaccaagttagaaaattgtcttggtaacaccatatacactggtgaatagctgtggcaaaaaaactgccattctgacgtggtactaaggaactgagaaaggaatagacgagagaatcataaatgttattttttatgattttataactatttgtatatatactaataataaaggggaacttgaaattttaatataagtaggtaaacatatgtcagaggtatcaccaatgggaacccagccatgaatattagccatagaaaagctagctattaaggcagagtgaatgggggatatctttagagggaaactgacatgctaagggagagataccagcctttgttcattcattcatccatttagcttgtgtctactttatgtctaccatgtgcttgcacaattgtagatacaaagatagacaggtaaataggaagaaagtctgtgcctttatggagttaatgtgcaggatgttgggacagaaggtaaacaaattaataagagcatttcagattgtgcttgaagcactgaagcaggatgagcaggagcagagaacgccagacttgtagatgagtggtcaggggaggcctttccaagtgatgtccaggagccagcatggcaggatcaaagggaagaatggcccagacagaaggaatgaccaggccccctggtgtgtcaaaaaaaaaaaacaaacaaacaagaaagccattgttacaaggcgtagcagagtgatcgacgatgtcagagtgcaaaggccagatcatggagggcctcatcattggattgtattttaagatgacgggaattcagtggagaactttaaggtggagagtgatgcttgtggattaaaagagaaatgtgggagatttgctagcaggcctcccagctatgaggacagtgtgagcaaagctttactgaagggatgtataaaattgccacaaagacaaagtatgtttatggtggagaagtcctataactgctgctcattagggtaaaagggcttcggtgtggctgcatgggcatctcaaattcagatgttcatagagaatgtctgagcctgtaaggacagcacctagcccactagggcaaaggtgggaaaggggtgcttgtgagtgagcatcagccggaacagcatagtcagacatagaaagcagccgaacaaggagactctttgcttttgttttgcaaatatattatggaacaagaaaatacgaataaagcctctgcatagggaaggtagtattaatttgcttgcttaaccaaatatttattgggtacccattatatgttgagcactcttgtaggtataggagatgccataggtagcaaaacaaaaatctatccccatagaacttaaagggcatgaagaagcagtagaaaaaataaccatagtaaggaagtaaaattctttaactgttaggtggtggtggatgctatggaaaaaaaataaagcaggaaaggggactaggaaatttgggggacaggaacaatgttaaagaagaccatctggttacttggcttttatttagatcgcaatagaaaacctttgatgggtttcagtagggtaatgacatgacctgacattctaaaataattactccagttgctctgagaacaggagtaagggaaaatcagaacagttttcaacactctcactgccatccacctggtgacatcatcctagcaccatcgcctcttgcctagatcattgcacagaggcctgatggatccgtcccaataatgtaggcaagaaactatggtgctagggctctgacagcagggaaggtgttgaaatctgaggattctggatttgtttgaaaggtagagatgacagtatttgrcataatgttaatagacaaaatactcaatccttgttgtgttactggaaaattgagaaggtgacaagttctagcaaagaaaagtatcaaaaagctttgccacaggtggagacaggatcaggaacatgtttagccataaggtaggaagaatagcaggaccaaggagagaaactggcctgagagcttcaacaagggagtgagagaggaaaaatgattcagaattggaatctcagaggtggggggtgttcttgctgcaggccacatgaccagggtgatgatggggaacagagaagaaggtcagcaggaagtgagctaggagttttaaagsgaggaatccaaaagcaccaccaaattctaagaaaatgctgagaatgacatcctgggaaagagtgaaaaagcaatctgaacctaggctgaagtcatcggggcaggtgggagaatgtcctgaaaggctggtgggtaagggagggggatatgaggcagatggagggactgacagaagggcagtgagagagcctcagcctagaaggatggggttgatgtaggaactataagcatcactcatgtgccttaggagcaagagggatttgaaggaatgtcgtccactggaggtggtatgatcaggagagccagcttaggttcaataaggcaggctcaattagtratctgttcttgttgggtaaggttcctagattgggtgaatactgtatgcatagatatattctgagtttgtaagaaatcggattgtttcttctctcagccttttggacaagatggagaaatactgagtggataatggttcagttaagttgcttcatagatagcccaagagctattccaggagagttgaaatccatgaggacagtgtccatctggatcagtgttgacagcctttttaaatcctaaacacctcctctttaaacattaatatctcattgtccaccctctactgttgagtctgtcttctgtgcttctccaccagacaagattctgccgagctttataccatctgttttttgtattgaaaaggaaattgcccggtgtagtggcttacgcctgtaatcccagctctttgggaggccaaggcaggcgtatgacctgaggtcaggagtttaataccagcctggctaacatggtgaaatcccgtttctactaaaaatacaaaaaattagctgggggtagtggcgcacgcctgtaatcccagctactcgggatgctgaggcaggagaatcacttgaacccaggaggtagaggttgcagtgagccaagatcgcaccattgcacctaagcttgggcgacaagagtgaaactccatctcaaaaaaataaataaataaaaataaaaaataaaaaggaaattgataggttcttcattttcatgaaaaaggatactgctgaatttgatgtttttgaattgctttccttcacatgcctgaaatgttgccaccccccttgtgtggttagcttggccagtaggaaggtctctaatgattccacttagcaattttttcagtgatstggatgaagatggcagggctgcttatcaaatttaacatgatatagcatagacagctgatattttggatggaaggatctgagttcaggaagttgtcagtgagttggaacaatggactaaaactaacaagataaaattaataagggcaatggagtcctcccttcagggtaaaatatctattgtgtgtgtcattataaactagaggagaccatgagccaaaaaaaacattctcaggtcttttttcttgtggactagggtttttcatttgttttcattcagagtctccatatgtaaccctaaaaaaaaatacacataatggaaatagctttgttaatttttwaaaaatgcaaggcccaaatcaaaagaagtaataattttttttcttatttggaccacatcttaagtgttttcagttccgggtaccattttttgaggacactggccaaccagaaagaccctagagggccacyaccacagtattcagtgctcagttactgtttgttggatgcatggggactagagtggttaggatcctccaggtcctgtgaagaacagttgaaagaactaaggaaaaggaaactttgagatagttctctttaaacaattgaagagctctcaagcagaaaatagtctggatttatttcatgtttttccagatgggccarcgggtttgggtcagtttaagaaagaatttcccagagctgttctccaatggaatgggctgacattaagtaccgttaaactcctaggacagtgactttytgtggcagtccattcaggagaggccaggaaccaaggttaggtgtattgtagaagggattcctacacttggggtacagctgtcttggtggcatttcagtcttattgctgaactgctccttccaggaagtccaaaccaacagtggcttttttttttacagctttgcacaatcaacattacaaaggaaactattactttaaaaaagtatttaatggaaacttctgagaataatgcctctcagtttgggaaagccaagaatttagcaacccttttaagccttgcattttttttctcatctaaaaaaatgattcagttggcctcataaatactcattaaggaattggcccaaaatattaataagagtttgtctagaaaatctttcctaagcctttcagttttgctatctcgtaacaaataatataatctctggtcagtcatattattgtaaaactagcgagtgatttgtttggggcgctagttcttaaaaatttaattaggatttcaaaaatcttaggatgtggtgtagaagaattggttctatgactagacactctctattcatctcaaatccaaagtaccttcatgtcttggagctctcaagcttcactctcctatcttcccccaaatgagaaagaaggaagccaaggacaagctggaagcataaattcaagcctatagccttgacatggactataatataaaacagacaggccttccaagtgggccagaacttagatggcctccttaaactgagagcagtttgaggaaagtctgttctctgtgggagggggcttggttgactctgtggtcactcattgctggcgagatggccagaaaagcagctgcaggtctaagaacatggatcaatcccagcattttgggaggccgaggtgggcagatcacctgaggtcaggagttcaggaccagcctggtcaacatggtgaaaccgtatctctacaaaaattagctgggcacggtggcactcacctgtaatcccagctacttgggaggctaaggcaggagaatcgcttggacctgggaggcagaagttgcagtgagccgagatcgcaccattgtactccagcctggtcaacagagcgagactcygtctcaaaaaaaaaaagaacacagaccatcacttctgctgactttcctctcttcttctctgtagacccagtaccgtagtagccactagttttgtacaaacatgaccccttttgttcttttgccactcacacagaaaattccccttcctcttttgccaaaagtcttcttttcttcatcagatatcagctggtcacccgaagagagtggacaataatggtctcatttcagactcggactagaatgagaaattcccaaagctaagtcctgatatcacatttctttgtcatgttttccggaaaagtccaagtccggttttaaggccactccacctttttggtctgggaggagtaacttaacctctctgggctcagttctctcctctgtaagacaggacattataaggccattgagagattttagatactataagtcagcacagagcctggtgtctggcatgtagaagatgctcagtaaatcatagctgctgtgattactattagctattattaatttatacagactctaatcaagttgccagttttaactcttgagtactatattttatactttattactcaaggctttgtaactatggatggaagtccacttaactttatatgatgatctgtgcttaggattcagaaagatggagggggagaaggtgttgtacttttcctcctcattggtgctattcccccttgtcgttagttgctgggggagagggagtgctcatagttgattgaaaaccaacactggcggggcagaataaaccttccttttccaccattgtttctatttctaatgttttgttgttcctgaagataagcagaagctaacatataatattaaaatttgcatttggtttggtcctgtgggtaacaactctaagtgtgtgtctttcagagttgtgggacatggacttcgtgctcctgcaacactctgccatgtgagaattcaatgacccggcttgtgatagagcagttttcttactacttctctaagcctgttaagagtgctcttcgcctgtctctattaagctctaggtaatacccagtcattggttctagagctgcagccttctgcctctatttaattctagccttctasctctatttaattcctgtgaatgtctagtcatagacccaactcttctacaccagatccaggctcctcctgtgcctggatctcaaggcccagcccctttctacatctggtctccactgctgcatccyctctgtgcgggcctgtctcctcactctccacatggggtcytcaatccctgttcacgctcatctcagggcctttctcaggccattttcctcctctcccttgagccatgtagtctgttgtcttaagggtcaagctgataaggggctaattgctgaatcattttgaatggtagttaattgatgcttgrtgtatagtagtggatctcaaccttggctgcacattggaatcacctggaaagctttaaaaaacccaaattcttctaataatagctttatttgttccccccccaaactcatataccacagtgtttaaaatagctcatgtgagtatgtaaaaacatcaaagtggttatttccactttgtgttagtttggtagatttggggsaaggaaacagtatatttccttttttgaaaattcaattcctagaatacctctcagctcactcaacagcagcagcatttgttttgccaggcacagtgctaagtacctcctaagctctccacattcatttccctattttaatctttgcaataatctcacgaatgagccccagattttgccctaattgattaatgaggatcctgagggmctgagagcacatctacttgtgcagggctataccaaaggcattgctgaactccagctcaggcacatctggtgccaaaacctcactgattctccaccccatgggaaggacaccttaccatgtaactttctgaggatggacctgctttaactttggggttgcatgctttttaaatttagttacattcttttgtacctcaagagcttccataaatttgatttcagactcactcccaagcagcctagatatgtccaggaatggcaggccatttaataaattaggatttttaatgcactcaggagatgttgttgtagaaaagcatctacttatagcacctaattcagcagaacctaccctatcttttacttagtcttttaaataactttgaagttatgagcagtgttatccccattttgcagaaaggggaaccggtatgccacgtaagtgttaattatctactaagtattagtaataactgccactaagtgggctcttactaagtgcaggctctgtactgagctctttgtatcctgtgtattagcctcattgtacagatgaggaaactgagactgaaaaaggtgaagctacatgctcaaggtgataaacagctgtaactgggctaacagttgtttgttcgcttgtttgttttttaacttgkttataagcaaaattgcaagacatggtcttcatcagctctgtccctttcatcttacccgcctccgctgtgcaggctgtggcactggagaaccctatctggaataaaccattgaggcataaactgaaggttctttctgtgtattgagtggctatttaaaagctattgtgaaacaaagaatgttttaccaaccttgcatattatatagaggacaaacaggctcgaaagatttcttccctagccatcccaatacaaggctgttttggtataaacaacccctgaaggtgagaactggctctcraagcagtttcacactccattcatctctgagctctgctgtttctcacagttttggattcgtgatgagaatactgttgctgggtcacttcattattacacagaccctaaggccagaaacccatctcccctttttgctaattatscatatgccaacttatttcctccctcttcaagcatataaagacagtattttctggtttggtaaaagacacacacacacaattctgtagggagaacaactccctataaaggaagangtagtcagtgtggtgagtggatggggtctcagggaaaatgaaatccctagcagtcggtgtcagggcagcaggtcactaaytgagtgcaaaccttttttaaaatgttgtttatcccctacagggcatacaaaaccattgaggatgaggacttgaagttcccccttatatatggagaaggcaagaaggtaggcacgtgtgcttcccctgggtagagaggacagggctctgtcccgccttcgctccacatagcccgtggcagtccgtgtgttccactcagcagcttgtgattttatagccttgacagcttgaaagcatatcccatccatcatccttcaggcctcctgtcttcagggtccaaggagtagtgggggtgggaggtgggcggtgagcacaagggactcaagccaattttgtgaaaataaagtcccccttcccaatccatttgaataactttttacagtgtttaaacatgaaccactttcacacacatcatctcatttatatctgacaacgagcaaggaggcaggtcaagctggctgtgttatatcmatctggcagasgaggcagctgggactgtgaggttaaaacagctcaggcagatcacgcagccaagcgaggggcagctgcggatgtggtgccttggctttctgtctgcttcgcgcgtctcagactccaccatggaagtccagactttgcaagtctgtttgccacttgccccatggaagagagtccaaagcgtcactgtaattagactataaggtcacagcaaccagagtccagactaagataacaaagaccatcatcagctcccagggttccagtcagaatccagcactgaacagcacgttgtcgaaccaaagaaaagctgtggatcctaaagtggtctctgagcagaggcctggaggaggttgaaatcctggagtggagagcaagaagcttggaatctatttcctagtaagaacaaacaccttctgaatcattgcattcttcctcggaacactaatacatttcaactcggtgtgaagcattccaagtgaaaaatgtggtcacattgagaagagtcttcaactgataatttttccagcattcgatacgatagtttttatcaagaagaaatgactcagaagaaaaccaaaggatgccttccatgggcagagtgtgtgtgtgtgtgtgtgtgtgtgtgtgtgtcagagcaaaagcaagagaacaaacatggttaggttttgggctccgtgtagaccagcagtgatttcaatgcaaaaagacatctcaacagaaggaggaataccaaacacaaatatctgatccaygtaggaatcattttttaaacgaacataccccattcatgaaaatgaacacctttcagatcacagtctctggttaagaatcgtgtcagggctaataggcactgttctgatataaatatttgtgccttttggtacaatgggcaccattaatgagtatcattcagcccaatgacctatgcctgcagctccatttctttgtggggctgagattctctgtattaccctttaatatccagtgagttccagtaaactcaggaacacattctgttacccctgtatctctagttcctgtctagcctggtacctgacataaatgcataagtattaaataagctgttcagttatgttcagtatactttccttagtacaataggaaaatggaatgatgtattcttggaagtttatagcagtaagatttgaaggagcaagagttttctaattttagtataaagttcaattcaccaaaacatcatgttcctcaagcatttcaggtaatttaagcttgatggtcttgcgatgggcaggtggcaagttctgtccgtgtacctgttggcctatttaaaagccaccatgtctccattttgcttttgttggtagataccacccctttctgaggactccatgagttcttggagctccttctagatcctggactgggattttctctttcttctccgcrtacccctacgcagaaatttcagagtacttctgtggccattacttctcattttctttcttcagatgcttttaaagactggtgtgggtaacacctggatacttcgtaaacaaggtcagtcactagcagaaacatcagatttctttggctggaaagagcacacagagaagccgccatttcagggaggagagcaggagagccacaagggactcagaatttttcacatttagagttgagcacttcttggctagaagggagccagtccagcctcccagcagggcagagggccccaggctttgctttgcatcactttttttttttttttttgagacatggcatcaggctggagtacggtggcacaatctcggctcacttcaggctcgacatcccaggatcaggtgatcctcccacttcagcctcctgagtagctgggactacaggcgcatgccaccacactggctaatttttgtattttttgtagtcaggaggttttaccacattgccctggctagtctcaaactcctgggctcaagtgatcctcctgccttggcctcccaaagtgctgggattacacatgtgagctactgtgtctggctgtgtctcgtgtctttatcccctctgacccttgccctcaaaaaggtgtcatggtttcatttctgcttaatgtgaactctgcctaccttccgaaccaaggctggcttcaaaattcacagccctgttgacagtctaggatgaagatgaagacaatatattaaattgcagtgtttcttagcatttatttacttcatccccactcataggaggtaattactcttatcacccaggtaatagagtgaggattcaagctcaggtctttgaaccatttcactacaccggatatattttttatgattaagggttaggacactgctttcttccacccaggatgactttcactccatccctctgtgtcgcctgtcttgatgcaatccacctttctgtgctaagtgccacctcctccgtggagccttctcagtagaatttttacctcctctaaacttgcataacccattgtctatgtgtttttcagtacttaaccatattttatgtgttattaattacacatctccctcttatctcccttaccaagtttctttttggtttttttatttgtttgtttgttggtttgagactgagtctcactgtgtcacccaggctagactgcagtggcatgatctcaattcactgcaacctccaccttccaggttcaagtgattctcatgcctcagcctccaagcagctgggattacaggtgcccaccaccatgcctagctaaattttgtatttttcgtagagatggggtttcaccatgtcagccaggctggtctcaaactcctgacctcaagtgatccacctgcctcagcctcccaaagtgctgggattacaggcaagagccaccgcacgtggccccaagtttctttgtagtagggacgaggccttagacatttgtgtccccaacatatgatgtaagtacatagtaggcacccartaaatgtttgggtaaatcagatcttcagcataacaggagatatttaagctgactgtgtaggcattggtgtaatagtgytacttccttacaccattcaaaaacagttcaggatgaggtctcagccctgaggcctctgtgtagctatgtcacagcactggtgacattttgttcctttccacccagagggaatttgtggagatcttagcaggataggttatagagttgataagtttcttttctccagccataaaacataataggtgaactctgggagggcaagagctatttctgattttttacaccttttactagtacatatcacaggactaaggacatagctggtgttgagcaaatacttgtacagtggatatgtaacagaaagattggtgggtgtgtggatgggtgggtggatggatggatggatggatggatggatcgatcaatcctattgggtttgatatgaactgatttctgcagctgtagacgtcacgcatgcattggagttagtttattggacatccttccttccagtctccaaaaaaagaaagctgaaaagaaacagcagcaacctgtcaagcttaagataatggatagaaaaagcactcctcaaatacagaagtgattttggtgagccctttcttggtaagagctatccacgtatgttagcagcaaggggcctggaaacatatctgggcaggaggaactggaaaattgtttggttgttcctagcccaggcagctgcactggaatgggatgctttcactgtgtgcgtgtttctgatgaccctctgcttatactcctaggcccgggtaatggcaactattggagtgaccaggggacttggggaccatgacctgaaggtgcatgaytccaacatctacattaaaccattcctgtcttcagctccagaggtaccgcatgaggtttttgtttatattttgtgcaataaaacattttcggcgttattcctcctgtgactcacaccccatatccagacagtagccaacttgtattatatgtacttccactgtatctctcacgtctgtgtctttttcccactccattctcactttgactcttctggttcacaccttcatcacctcttacccagatggctgcacagcctcctcctgacattttctaagtctgccaatccatgctacttattgcagtcaggtaaattttccttaaaaactgactcctaattgctcagaaaccttcaatggcagcccaggcatggagagtaaagctcagactcccattcacttggtgttcaaggcttattataatttggtctggacttctctgatctttgttctcctgcaccagccagaatgaacttgctgtttcccttacatgaycttaggtttcccatatttgcttaaactattccttttgccaagaatgccctttctccccaactccaaacatccaaattctttttttctctggagtttagcttagatgcttttttatggagagttccctgatttcttccttgcccaaccagaagtaatgtctctccctacttgggatatacatagagcaccttccacgtrcagtgttttcactgtctgccttcggtcacagttgttttgttttgttttgtattttgagacaaagtctcgctctgtcgcccaggctggagtgtagtggcatgatatcggctaactgcaacttctgtctcctgggctcaagtgattctcctgtctcagcctcccgagtagctgggactacaggcacacaccaccatacccagctaatttttgtatttttagtagagacagggtttctctatgttggttaggctkgtgttgaactcctgacctcaagtgatccacccgtctcagcctccctaagtgctgagattataggcrtgagctaccacaccyggcctgatcatagttatttatgtataccttatcccctcgttagactaattacctgaagagcttctgtcattcagctgatgtttagagaagttaatttacaaacaagttggtcatatatttkgtttaaaaaaaatcatgtgtcttaccatataggaaacagtatcgatttctatgttgactttctggatatatcatttagaaatttttttgcttccaaatttggaaaagtctaaccgatagtattaggttggtgcaaaagtaattacagtttttgccattttttttttttaattacttttgcaacagcctaagagtttaaaggtaaatttttctcacccagtaagaaggctgaaatctggtggctgctggcgttggttcagcacctccattgtgtcagggctgtagcgtctctgcatttctttgactttcccttcatggttacaaggtggtggcagtaggtccaagcctgacatttctatgcaaagatggaaaggaggggcagcctctgtcccaacagatattcacttgcctctcattggccagaactgtgttacatgaccttctagctgcaagggagtttgggagagcaagagttttaactctcccaatttcgatagtagaaggaaatcaggaaggcataagtcaggaaccaatagcatttactacaatgtgtaattaaggttttttgtttctttttttttttttttttgagatggagtctcactctgttgcccaggctggagtgcagtggtgcaatgttggctcactgcaccctccacctcccagattcaagtgatgctcctgcctcagcctcccaagtagctgggattacaggtgggcaccaccatgcctggctaatttttgtatttttagtggagacagggtttcaccatgttggccaggctggtgttgaattcctgagctatagtgatccacctgcctcggcctcccaaagtgctgggattgcaggcatcagccactgcggcttgcctgtaattaagcattaaaataattccttggactggaaatgctcagaacatttagacataactctatttgcatgtacttcccaagagcaggtgctgttttaacaaagactattttggtcagaggaaacagaaacttactagagctaactcaaaaaaaaaaaaaaaagtactgcaagaaggccggctatggtggctcatacctgtaatcccagcactttgggcggctaaggcaggaggatygcttgagaccagcatgggcaacatagcaggacccttgttcttacaaaaagtaaaaaattagtttgatgtggtggcacatgcctgccccagctactcagaaggctgaggtgagaggattgcttgagcccaggagctcgaagttgcagtgagccatgattgtgccatgacactccagcctgggtggcagagtgagacgctgactcaaaaaaacaatagtaataatattagaagagatatttatggtgtccatgagcagaatgattgaacagccaggctttatgggaaagtggttttgaaatcaaggcagccctgcaaagcctccacagcggaaagctctcagccctcacatggagttctgccactgatgtggccaaccacattctttatggctctgctaccaatcagcccagtttctcactctcccaattccacatttccggagaggagtctggttggcccagttcaccttttatatcagactaaagtgacttcccagcctgtgtatttgtcccttcagattatatgtccacttcagtaccctttatgggcacaaacagtcacctagacccaccactttggcggagctgtgagccagggagtggtttccttagggttttttagagctgggctggcatccatagtacatgtagataaaagggactaagaagccactgaaagagaaaactctagtaaatgttgggcatggaagatacacacatttcctggtatcacccaggatttcaagtgaggtcagctcggtagaaataataattaccatttgtcaaaattctgcaagtgttctctcttgagtcctcatagcaattctgcataatgaagaccatgactacattaggtgtccaaagttccccctagaagctggtggattccttcccaacatcaggatccgtgaattactgctaaaactacttctcaccagagaagagcaataaatgtcggacctccaactctctttttgaatgccattgagcacagggcttgtaactggactcgtggacttttctattctcccccttacargagaggcatttgtcagataacttaaatgttgccttcacctttctactttccaaaaagcatccgtaaaggtcttgattttgctccttaaagcaaagtaaaaacctccttctccacctccctttctcacatttactttttatataaaatgagaagcagcagctccacttggcttgaaggagagtgctctgtatgcattagattttagatcttccaatctctctgctactgcagatctcaggaagggactgtaggtttaaaacttgggcctgcatggaagagtccctgagaactcggtaagaatcccaggtggttggtgagaaaccttatgtcacctcgctgaatgatactggtttgtaggacactgagttggtcacttcagcattcgtgggagtggagaggatttagaatgaaactgtcaacctctgcaaaaatttaaatgctcttagaaaagttctagagttgaataaagtgtggcagtttcaataataataaaactaattgttattaactacttagtctgggtgagacaacataccaagtttatttttaattgacaaataattatgtatatcgatgggatatagtgtaacgttttgatatatgtttacattatggaatgactaagctaattaacatattcatcacttcatatacttatcattttttgtggtgagaacttttaaaatctactcttaacaatttaaaaatacacattattattaactgtggtcatgctgccatgcaatagatctctaaaacttattcctcctgtttaactgaaacttggtatcccttgaccaacacctccctatctccatgcaacaaattaaggtttttacaggacacatctcatttaatcttcacaacaacactgtgaggtaagtatagttattatacccaatttacagattgggaaattggaaccaaggaaagtaaaataacccccaaagttatacagttaataagtagcaagctggtacttgtacccaggtctatttaattagatcaggttctgtaggggagagaagccaaattcaaggaaatttatttggtcagtgtttagggacgtaccaagtactggttcaaggggctctgatgagggtgcatttgtcttaaacctaagagagcaactttgtcttgggaccttgggggccagagtttcccagagaaatactattggcctcagattgaagttgtggaaaatgatggtatagtagaaagggtaattgggaaagacagtaatggcctttgttgtgtgtgcaaaccgagaccagacagaattgtgcaaagtaacactgtgcacctataatttagcttaatgggtatgtagtgcgtctaagattctcttgcacaagattaaaattgttgtacatgttaaatgtttccagatggagaggcctccaccagagccaggaaggggtggcggggggagggggtggaactgttagaagggaagcggaagagcagcttgaattggctactatggaggagaacacaagggaaaaaaataggtacaaggaaccccctgtccacaatttttggagcaggaaccccctttccctgggtggtagtgacaaaagcattcccatgagaagtggcctctgttgggagcctagaaagctcgattaacatactgaaaccacctaaggaagaataactgacccacttcctctctcattatcccatcctgggcccaccttctttctgtgactccctaagaacattcccctgctatgttctgtctttgccaggcgtggatctttatttcacatttgggttctaaatttcaaacccagctcagtctggtagttttaacagttgtagggggctgggggtggaatgtgtttgaattctgagaaaaagtgcgcaaaaatcttcttggaaatcagcattgttcccattcatcattgtggctcctaatttgatttgatgagttaaatagaaataaatcaaaaacatgtggatcaaatttatgttaaaaaaaaagaaactcacaggagtttaaaaattagtgaagggtttctagccaaacacattttcagtttcgctgaacacaaggcgctggaaaaatctcgagtttgccaaacccaaagagcagccgccaggtttgctgagcttctctcaaaccttccccagtctaaggcagggatttctggccaagaamtgaattccaagagaggccctcaccaccagtcgagcacaggcctgttgtctggaggtgtgggttgagtgtaggggatgttttgactcccctctagcctacagtgcctggttttttctgcctaacagcatagagtgcagcctctcccccagcataaggaaaakgttcccagccaggtcccccatcctcttgcttagtgaagtttgccattaaacttttttatactgtcctgaaagagttcagtggagaaggataggatttgttaactcaaacgcactggagcccrggctctcctcacattcttctttctcagcaattctcccagtcccagtccagcacacatctcctgttctgtaactcagacagcccagcacaggctggcagcccaaaactccagatgttctctgtgccacaccccttcttggccagtgacaggccctccgtagagctaggattcttcttaatttcacccttctttccagcctccactcaaagactgtgctgttgcctttagccccattttgggctcttggagaaacaaggccctctctatttggggccagtttgcggagccagctctctcctcagctcagcaagccccctttccgcccctgctagactgaaccacaggggcccaattttatttctgcttcatttttcctttccttggttatcaagattcctatcaggtattttttataactccagatcacttatttagctcactctccattttctaaaatctagattttctttttcttttatctgaaacagccttctttaaaagaacaaagaccttagactgtagtatctgaattccaacccagcaccagtgttaccagaggactgcacaagcaatcacagcctgtcttttctcttccttaaggtggggtaaaaatccctatgttgacmagttgttaggaaaagcaaatgagaacatcagtgaaatgagagcatcagtgagaacaagatgtggkacgtggtcagagatagtaaatattagkcttccttccccacyggcttctggaggtcttcacacttaaagattccttgtattcactttcatattaatagagaatgggccaggcacagtggatcacacctgtaatcccagcactttgggaggccaaggcgagaagatcatttgaacccaggagttcaagaccaacctgggcaacatggagaaaaccttgtctctacaaaaataataataataataataataataataataataataataataataataataaataataaactctcccaaatgtagtatctataaataataaatttataaataataaattagtggtacctgcctgtagtctcagctactggggatactgaggtgggaggatcacttgagcctggaaggttgaggctgcagtgagccatgattgtgccactgcaccccagcctgggcgacagagaaagaccctgtttcccaccacccctccccatgaaaaagagagagaatgaaggccaggcacagtgactcacgcctatcatctcaatgctttgggaggctgaagtgggaggatcacctgagcctaggagttcaagaccagcttggacaatataatgaaaccctgtctctacaaaaagtttaaaaattatccgggcatagtggtgcacacctgtaatctcagctactcaggagactgagaggccagagaatcacttgagcccaggagttcaaggctgccttgagctatgatcacaccactgctctcsagccttggtgacagagtgagaccttgtctcttagaattcctactttttttgggattcccccattttctcccatgaaaacatgaataatatttaacatgtttacatcttarcatttataatcttctgattctgggtgactttttgttcccaagccaaaatcccatttggagaaagaacatattttgttgtattttgtgctttctacagtctggcccattcataagaaacaatattggtgcatactgacatgggaaaatggctgtgccatctgaagtgaagcagaacatgattgttcatacaaagagagtgatgatatgcagaaaaaagcatatatgcatggccgaaagtcttgaagttttaaaaaatggtaacagtaattctatttggaagaggaagaaaaatttgttttaaagaatttcctggacacctcaaaaaaacctggaggccatataatatggtggttaaaaaacttagactggtaatcagtcttgacttcaagctctatcgttgcacttgctaagtgaccttgaaaaagtacttccctggatctcaggttcctgtttggtgaaaaagaggacaatagagttgttatactaaggaaaccaaggaaaaaactgaatgacatatgaagtacttaacaaaaaacctggcataataaatattagttcctagctcttcttcctactccattacaaccacaaaatttcagtggttctttccataggtatcatgagtccggtggtgtttactgagtagagcactggggaacatatcttcaaggaattcaaatttgtggctagttagatggttagccaaagaaggatgagccataaagcatgtgtttcctgctttctaagggactaggggatttggatataggagggagaagtatatcatctaaagaaaaagagataggacaatttctttttttaaagaaaggaagaaatcgtctagtgtgaaataaaatttgccttatggggtcatttgagtttgaaagattagcttgaagggctgttagctctaataaagctaactgccccagaggtccttgaactggacctaaggcagtagataaggtcttcagcaagaggaatatcttagccgtaaccatgggagatgggggagctgcagacagggcagtcattgcaggactgagactgtggcagtgaggagccgaactggggaagggaccgtggaaactaaaaggtggcataatgaggcagactggatttagaggatgaagccaagtaaaatttaaaaaacaagacttcgctttccagactatgtgaaaggaagaatggtggtacttgttgaggtctaaagaggaaaaaatatgcttttttgccgtaagttttctgaaccaattaaaaaaatagacactggagtctggggtcaaaataactttataactaataactagtataaagttagattggtttggttaaggtttggatttgagaccaaaatggagttctcattcctctcctctagcccccacatcaaacccatggaatagctgtgggctctcatctcccaatcccagagcgggagggtcttcctagtatttacctgctggargacaggagcagagggaacaagcaccacttacagacaaatagggaccagagaaataactccagggagttcagtgtcccatgtttcatctttccagtcttattgggatagagggcatwcaagagttatatcccaacacaattcctctatgccttttttggttacaaaacaaacctcctccaaaacttagaggctttgcagaacaatttctgattctctttcatagttctgttggttgactgggttcagctgggtggctcttccttaggacctctcacatggccaaagtcagatgtgagttggggctggggttgtctgaagacctgtctgggctggaagtccaagatggctttctcacatgttaatgttggctgtcaactgggagtttagctgaggcagcactacatgcctctccaggtggttttgacttcccagaacatagcagctggattctgagaggaaatattctaagagtgggtggtttaagaatcccagataggcatggtggcacgtagctatagtcccagctacttggaggctaaggtaggaggattgcctgagcccaggagctcaaggccagcctgagcaacataggtgataccccatcttgaaagaaagaaaggaagaaagaaagaaacagaaagaaagagagagagagaaagcaagagagagaggaaggaagtaaaggaaggaagggagggaggggagggggaaagaggaaagagggaaagagaaagagagagagagagaaagggagaaagagagaaaaggagaaatgaaaatagtcccaggcagmatcagcaaggcttcttaaaacctagcctaagaagtcccagaacatcatcactgtcacattctgttggtcaaggaaatctctaaggccagtccatgtttgaagttaggggaattggatccacctcttgatgtgaagaataacatgcttgtacagggagggaaggaattgatggcagtcatcctggagacagacactgtatcacagccttcctgtagaattgccctccctgctgtgcaatcttgagggtgaaagtaataatcatctgtctttccaggactaagtaatataagttgatgagttagctgtttagctaattaagaaaggaaatctactttgcagtgtaaaggcatatttacaaagaagctaattaaacttaagtactggggacctgcgctcagatcagaccctgtgagttctgattgttgccggaaaatgtagacaggctgttccagatgaagaggaggagccgggttgcaatcaggaaacatttatgtaaacatttctcaaaggaaagggacctcagcttccagggttccagtaatatgttgtaatttttttctcattaataaacattcacattagtatctaaatttgtattcataattacttttgcattcttgrgagcccccaaaatttcataaacctcagacctcacaaaacatgtatccccctgcaaaaagggaaaatggggagttctaaggatactttgttaggctaaagcattcatatttgacagctttcttgatccactctccagtcctgcatatctgtaatatctcatacttctgtgttctcaattagcatggcacacccttgggggcgatttgcctcccccaaccaccaccaccactttgaatatttttggggatgaaatcacattaagaatatacaggtggccaggcatggtggctcatgcctgtaatcccagcactttgggaggctgaggcgggcagatcacgaggtcaagagatcaagaccatcctggccaacatggtgaaaccccatctttactaaaaatacaaamattagctgggcacggtggcatgtgcctgtagtcccagctactcgggaggctgaggcaggagaatcacttgaacccacaaggcagaggttgcagtgagccgagatctcaccgctgcattccagcctggcgacagagcgagactctgtctcaaaaaacaaagagtatacgggctgggtgtggtagctgctgcctgtaatcacagaactttgggaggctgaggcaggcagatcacttgaggccaggagttcaagaccagcctggscaacatggtgaaaccctgtctctactaaaaatacaaaaattaggcatggtggtgcatgcctgtaatcccagctgcttgggaggctaaggcacgagaatgtcttgaacccaggagatagaggctgcagtgagctgagatcacrccattgcactacagcctgagcaacagagtaagactctgtctcaaaaagaaaaaaaaaaagtatgcagaagctactttctttgaatctggtatattctcaccttacatgggagagacttcatgatgtggcctgtccatctccatctctaactctcaggtctggctataaaaatcagttgtgtgcatctgtgtgtcatttacatggcttgttctcatttggccaatgacttgagatttgccaaccagctatttgaataaaacttgagatttactctgacacacaccaaaaaactaacttagcaactcacaataattcatggtcacacaacagaaaccaacctgtatgtgtcaaacatttcctctcattggagattgttgccctctgatcccctcctgaaaaataataatttcatttggatgtttcagctaaatatgctatatcttttttatatttattgcattaatgcatataagaatgtttagaagttggtttcaaaaatgcaaatcctgggcatggtgactcatgcctgtaattctagcactttgggagaccaaggcaggaggttggcttgagctcaggagtttgaggccagcataggcaacatagtgagaccctgtctctaaaaacaacacaaaacttagccaggcatggtagtgtgcacctgtggtaccagcttcttgggaggctgaggtgggaggatcgattgcttgagcctgggaggtgaaggctgtggtgagaaattgcaccagtgcacaattgtcaccacagcctgggcaacagagcaagaccctgtctttgaaaaagaaaaactgcaaatccctggaatccacttcctgaaaatctgaatcactagatctgggatgagttctgagcatttttacattttggataattctgaagtaagtgatccaaagaccactgtttgagaaacagataatgtcacaggatccttaccgtgttgcttcaccagccggaaaccactgtggctggtggcatctttgcccaagttttgctygggcccgctgggcctgttctgcccactcagcctggcaggctgcgctcagcttttgctactggcccagaccccatgcctgccaagagtgagccaggcacagagcagtgaggggtgtgtgagcgagtaagcaagtacagggttcggccactacacacatccagacataccacctttggcaccccagcacggctgaaccaggcacaccacaagcggcttccactgtgggcactggggaacatggtggtgcctgaaagcttggaggtaccaggaactgtagagccccaaagagggcatcacaaccctggctcrgggagctcctaagtctgggttccccaaagggccatggctctttcctcctctcttctctcctcctcattgcctgcagtgtggcaagagggaggcgtgtttcagcactgtttgtgttacaattctttcagtcccgccattcagtgggtcctgagttcttgtcccacatccaggaagaatgaggtacatgggcaactggagggtgagcaaggtgaagaggtgctttactgagtgatagtacagtgctcaggagacctgaagtgggtagcttctttccacaggcaggtcatcctgatgagtgcagccctcagtggagakgagacccaaaatgggtagctcctatctgcaggcaggttgtcccattgtctctgtgagtctggctgagtctggggtttttacaggcttcagaagggaggaagtgcaagctgattggttcaggggtggccatgagtgggccagaaaagcaccataagctctcactccaggctgtggactccacctggaactgacagcctggctcccatgcttcaagtcatccttggcttgaagatgctgctttaccgcggacctgcccctttccccccaggaacctgtgtgcttcctgctgccatcgacatgtcatccacgacaccctggctgtctacatcaagaggtgcctgcaggcccaccttgagccaccctcagcccttcccctcggcctccctcccatgctyggtggcgaccaaagtccagaggtggctgagatggcagggagctggcatgtcagtgctgccccaagcccccacacacccagccgggtcacgacagtgaccaggctcagcgacaactttgctccacactggagtaggcactgggagctgagagaggccaggcagcaggaacagacacttccaagcctgcaggggcagggggacttccaagacacccaagagcatagggatgcctgggtctgcagccatggttgggtggctgcacctgcacccaggaggacagggctcctgtcccaccaacttgggagctcccacctgttcccagctcccaccagctccatggagcacacaacastggctgtgccacccctgctacagccagcatctttgcagcagctggtccagacaggctgctactgccatcaataagctgttcttcactgtgctgcaggaacttgctttacaatcctaaaatgggtttgtgatgcgtccatattgtagtctcaggttgtgtgaagcagcaccttcaagccagggatgacttgaagcatggaagccaggctgtcagttccaggtggagtccacggcctggagtgagagcttatggtgcttttctggcccactcatggccacccatgaaccaatcagcatgcacttcctcccttctgaagccygtaaaaaccccagacccacaatgcatgtggctcatgccaggctggtgggttaaggatatgatatacctcattctgcacttgaacagctatgttctgggcttcttgctaccagaacaactgcaatcagcgggattgactttgtcacacagcaaatatcccacagtttacccatggtgattgtatctccccttctaaggcagcatgcataatagcttgctcacttgctcttgagatctctgaaaacctgctgtggtgaagagtcctgtgaagtagtgacactgattttttcagtcccaatggccagaagtagcagtcattttattatttgtcaggtgaccatcttaacccctcaaccaggaattttcaagaatcaaaggggacactattaataattatgctggaaaaacagrcgcaaatcaaaactattggagtaaacagggatgtatggtcactctctgcctcacctgccttctgggtggacttgaggcaacttggttcatctgttctgcaccctcatgtttgcattcacaggctgggatttcttctgatgcttatctttgcaaatgggcatttttgtgaagatagacttattcttcaaataattattgagctatgttgaagcccattcattcactaattcattcaatggtcctttggatctagtggtgaacaaaccattggaaacccagagaattgtaacgtgccaggccttgtgtgttaaaaaatggaatgtttatgcaatagcagctaggcattggttataccttcaggctctctgcacaatacctcatattttagctggtttagaaagaaactttttgatctgttatatcgtatctaccctccaaagtcaaatgtttggtctgtagactccaaaaaacaaactctcaagagtatctgtggcatatttcaagtataaatttatacctgcagccaaaacagctccttttgcaatagtatgagcagccaacatatttctaacacttcagtgtcactggattcacttgcagcccaatgttctgaagtcctgtgatcagttacatcaaggcctgatgctgtgaggagagtcagaggatgttggagccatgagcagccccattggccacctaggcctaacctctcatttcacaaacagagacaggggagattggagaagtccagcctcaccctccccactccccaggggacatccagtaccacagccaaaccaagcaaggtaaagctgcccaaacacaccagccctttctcacatccccaggctttagcccctgcagcttcctcttcgtgtaaggcatacgatgtccagctcgtccatccaaggaatcagtaycccatttacctttggtgttcccagcagatggtctgtaagctttgaaactgaatgaataaagtgattttgcctaatgcagaggtgggtttcaaacccaagtcttctgcctccaaattcagtgtttgtttcatgacatcaagtaaagtagatagactactacagagaatttgggtatagtcttggtggcctgctggaatgccaatcttgaaatgatctacttggtttatagggctgcaggaagtgtgttggtgttttattttcttcttgtcataagtgtcatattcaaagatccataggttgagctgttgggttggacacatgaaatagaggggacaagatttcatctctttatttcccaccaactaytggcagcctttaccttgggaaccaccttggctatttctgccaggaaacactattgagagctccagtcactgctgttttaaatgagactttgggaattgaatcccagtttccctgagcccactcttaatcctttccttctaccaactagacgatattcagatgtggttgccctgagatcagtgccataaaagaattaaaattggcagttcccttccacattatttgatcttaattacagctttgtgagagaagtagagcagttgttatatttcctttttcttgtgtttttcagtttttgaaaaatgatttcagagataggaaaattgagcgctaggccaggtgcagtggtgtgtacgtgtaattccagcactttggacggccaaggtgggcagatctcttgagctcaggagtttgagatcagcctgagaaacatgatgaaactcgtctctacaaaaagtaaaaaagtataggtggtgtgcacctgtagtcccagctacttgaaaggctgagatgggagggttgcttgagtgtggcaggttgaggctgcagtgagccaraattgtgccacagcactccagcctgcgcgacacagcaagaccctgtctcaaaaaaaaaaaaaaaaaaaaaaaaaaaagagtggctcttctcaagtcacaaagcttgttagaagcagagacctgaagcaaggcttctgataacaagggcaagcctctttctcttccacaaagccagtcctgagctgcaggagctcattgtcctacattgagtacttaaaagggaaaamccagtttggagaatctgctgaactgatcaagacacaaaagctgtgagggcatcctagagaagcggcagagatttggcaaatggaagaattgatggattctttttaaaagtagctttaagaagccagagtcagcttataggtgtatgagccctcctaacatgccaccaaaatatcatcagtaataaggcaaagatgggagcaagtattacacaaacgctgaaacagcagcctgcagccgagcactaagtggaggtgctgtattaaagagttgcttgtcacaggctcctgtgtaaaataagtgcccaatgttgacattaaggacatctctaagtgctctgaagctgagggctctgtgagagcagtcagcacttggctcattcagagcacattagtcaaggttcttgtttgcccccagacttattcctgctcccccacactgaatgtttattggcagctccactgaaaasaaaggaagaaaaggaaagagtttgccacttctgttatatatcagcacattacatttgtttgacgatttggaagtgtctcagttaacaaactaaatctgttggatcaccgtgaaatgagggggtcttctgaaagtatcttgtatgtttaatttgtttcttccactctccttcccctgtttatgctttgcctcagcaagkatgtcctgaagacctactgtggtttacactatagaagatgctgctagacccacagaggaaatacaaattgggatttctgggccttcagaagttgaattttggtgggacaataagatgaccaaccccctgggtgttcattgtaagctggacaggggtaaaatacccaataaggaaatgctttcttcggttgtgaattgagtgctaggcacagtgctctgttctgggtacaaaaacagataggataagatggaccttatccctaaaggagttgatcgtctgttacagtttttcaaggtgagattccccccaccacttgcatcagaattccctggggtcctgttgaagtatgcagctcagatctgtacaatcaagactcttacaggtaggatctttgaatcttaacttggttaaggtagcactccaagtgattctaaacacatttaggtttgagaatatctagtcttttagaagagacagaaaagtgggccctgaaaggctgataacaaagatgccagcggtgtttcagggccagtgtgctgtttgtcagttgcctgtctcctttgttgtgatcagatcataaggaaagcttcagaagcctcatgaggggatggaacacattcactttttgttcttcacctggttgctctcgcaaaagcaatagtattctgccatattccaggttcagattctgctgagacaggatcagccttgagagtcttccagggtagatcagatgctgtgtatcactctctgtacctaaaggacaaggcacaaagcttcatctctgtggaacaatcagtttcgacgattattcattcagtgaaccaggtgttaagttgggcattgaagatacaaagcagaaaaaaacaatgccaaccctcatggtgtttacagtctagtgtcaggacagggccataaatckatgattacagtttcacacaaaactgacagacaaagatttacccacagtaaagcatataggtaaatcttatattagtgggtgtgaaaggattgtgcctgcagaggaccagggaaaagaaagatggcttctctttggtcctccttagggttgctttggcaggagagagtgacacccacctttctcagccctcccttcttcaccaccagtctaacactgagtaacaggaatccaaaagaaggttggggaggtgcaagaagggacccatgggaaattgactcgctcagatggtaccttcccagagaggtccaccatgacctcatcttctaaratgactctattgttctccttaccatgctggatttttcttcagagcatctttcatcttctgacattgtaatttatttgggtgtctatctcatctactagtttagaagttgtgagaggctttgtcagttttagtcactgtgtccccagtgcctggaaaacgagttggcacacagcaagtatgcaataaaagcgtactgaaggcagcagaaaggcaggtccacacaggtcccattttttagctgctcagattatattgttctgaaaaactgcaagaatctcaaggattygtctggcttttttctccctttcttggtggatgggaacccgggaaggagccattagaaggtctgaccatgtcccccagtcccacttcaaagccgtttctgtagcacacctgtcccctccagggctgcaaagactcttccagatgtctgagtcctggggagcttcagagcccattagtttgatgtgaggcttccaggaacattaagaagctatttaaggaattgaacaggggaactttgaggatgtgggtatggttcgattgagtaaggccaacaacagcttcagggagggaaggtcaggactccggagcccagtggaatcctttgaagcctttgctgctggggaggrtaagcacacagtgggatgacttgcgcggcagtccaattcttctgaaaacatttttgcaaaatgttctgcatcacaggttaatgtataggacacgagttgtaagtggaaagttagcaaagatttttggaaattggctaaagggcaggaaacagagggtggttgtaaaaacctcaaaagatgttaattggggagtgcttcacagaccagggttgtgaccagctttttattattttcatacaaattacatgaagaacggtcttgagaaggattttcatgttggctaattaaactacattagggagccgagcatagaaatgggaacggtagaattagggaaagattacatttattgatggaattgaagagtagcattttataacgtgtgtatgtatcaacccacacccattctgttggccagatttccatttgagtgtggacaagacaacttcagcttgaataacacaacctgtcacatttcttgggtcagcaggaagcactttaaagagggtttggcaccctactcatagggcagactctgaaattaaatggatgttatctgcagacctgaaccctctcttttagaagaagctgcaaggcaaatggaatctcctgtttaactgcaagcataagattgagacatccacatctcaccacctcttatgactcaatattgtctatcataaagagttcaaattatcccaaaaatttattgtaggtataacccaataagaagctaggaatcggccaggcgcggtggctcatgcctgtaatcccagtactttgggaggccgaggtgggtggatcacctgaggtcgggagttcgagaccagcctgaccagcatggagaatccctgtctctactaaaaatacaaaattagccgggcgtggtggcacaygcctgtaatcccagctactagggaggctgaagcaggagaatcgcttcaacctgggaggcagaggttgcagtgagctgagatcatgccattgcactccagcctgggcaacaagagcaaaactccgtctcaaaaaaaaaaaaaaaaaaaaaaaaaggaatcaatcctctaaacactattttttttttaaagactgggtctcactgtcacccaggctggagtgtaatggcacagtcatggctcaccacagcctcaaaatcctgggttcaagcaattctcctgcctcagcctcccaagtagctgggatgacaggcatgcactgccatgcccagggtctcattgttttctttaatttttgtagagataggatctcactatgttgcccaggctggtcacgaactcctggcctcaagtgatccccctgccttggcctcctattagcagtgtctctcaaagttattgtatactgaaagtaacaacacagtgaaccagtacttgaagctaggagcccaggggtgacatttacagtctgtcaacagcccactctaaggaacagtctccacagtcatcataaagtccactgagacgttgattcccttgtgtacaaatctggcccagtaggaatcctctctggccttgctactcggggcccggtctgtgaacctgcagcattggcatcacctgggaggaagttgaaccacagctctcaagcccacccggaactgaattgtaatctggattttagcaggatccctagctgacttctgtgcacattaatatttgagaagctctgctctaacacaccgaagaaccatggaaaataaagcataggagggttgcttgtttctgatacagtgaaaattggaccacattcgtcagtgacctgaggacagaattctgacatttgggactttctggtctgccggaaactgaggctttcatgttttctttaatttggcttaaaaggctgagtgccctctccggaacataagtttagccttaagtgagcatgccttttggaaagaagatgttaaacaccagtgcagtgtactcctgagtgttcctcccttgagcgcagctcatgtgctgggccattagctaattgttaccttcttgttcacaggccacaaaggcctggcgcctggtggctgcttttcatttgagctcattcacccagggccctgtgggtaaacattttgttgtgttctgctgctgggaatagactgtcagcccacaggaccagccccatgccagggcatcactagcctggacaaacctttctaaaacataggaggcttggctttcaaagacctaaacagatttagtctctaggctgaggtgatatgattgtctctagatctgaggtgacataacaatggctgtgccataggacatgtgccctgacccatcgctttcactcagacttgcatttagaaaataacaggaatgggctgggcatggtggctcatgcctgtaaccccagcactttgggaggctgaagcaggcggatcccttgaagccaggggttccagaccagctgggacccagctggtaaaaccccatctctactaaagatacaaaaattagctgggtgtagtggcatgcacctgtaatcccagctacttgggaggctgaagcgggagaatcgcttgaaccctggaggcgaaggttgcagtgagctgagatcacgccactgtactccagcctgggcaacacagtgagagactccgtctcaattagaaagacagaaaatagagtaataagggaggctgaaggggattgattaawttgacttgcttttcttctcagttcatgagatggtataataggcagggattgattctgccaaattaggagggaagagcagtgaaaccccaaatccctctccacacctccctatccctccccwcccacattgaagtaggatggacatagaattgtggcctagcccaagagaggcttgatttttattcttactagttttgcctaggctgcctcattctctttccagagcttaggtgggtgttgaaatatccaagtcatttaaggtactagacatgaggaaagacttaagtctgtcaagacaaagacatactttggaggttcagagtgagcgtgtatcttctgtgagcctcagttgaggctcctgaaacatgaaggtagtgtcagagcccccatccttatgtgagaggagttggctgcttgggcctcagagcaggtaatgcaagaaaggtttcaagtgagtgcattaaatagaatgtctcgttactcctagacaaatacatgtagagcagctactaagaatcctgaattggttttatctcccccacagactgagacctcctctgaagcagaaaaatcagatatttaactttgcatttatagcacttggcacagggtaggcccttaataaatgtttgctgaatgaatacgcaaaggaagacagcaaacaagctcactgctgatcttctggctagcataaaatccacttataaatcatcattctgactatacctcagacattacattttcaattaatttcttctatgtcaattactaagcccaccgcttaggctcattcacaaatgtgtattaggccccatgtgtctatatagcaagtctccaagggagactatccctggccacacagctcgctgtataatcaagtaccctacaatgcatatctgaaaaccactaggstgggcaggaaaagggaaggggaatcagaagtcagtttgttagggagaataatatgcttccaatttcttaagtggtagtattcttgttttttttcaggtaagaatctacgatctttcaaaatatgatcatggatcagatgatgtgctgatcttggccactgatggactctgggacgttttatcaaatgaagaagtagcagaagcaatcactcagtttcttcctaactgtgatccagatgatcctcacaggtttgtgcatttctacaattgtagggttgttcctcaagcattcttccatgacatgcctgaaattaataatcatgcaattttcataattcatgacttagaggctgatatggacggtacagtaaccaaactgcagaagggattacctttcttgtaagaggtactttccagccaggtgtggcgtctcatgcctataatcccagcactttggggggccaaggcgggtgaatcatgaggtcaggagttctagaccagcctggccaacatggtgaaaccctgtctctactaaaaatacaaaaattagctgggcatggtggtgggcacctgtaatcccagttactcgggaggcagaggcaggagaattgcttgaacctgggaggtagaggttgcagtgagctgagactgcaccactgcactctagcctgggtgacagagcgaccctctgtcacaaaacaaaaaaaaagaggtactttctctgccaaataaaaatcccccttaagttgaacgtagatacaagtggtaaagaatttgagtgtttgtttaggcatttcagcggcatacctttctcacatttttacttcctctaagctatcctctaaagtagaaataatcccatttytgatcctgttgatgagastgatggcaaatgcaccccagcactgatagtcatccattggagaattgtttcttttgagaaatacttggtaagaagagaaagatccaagttaagtatttcttacagtctagcagcagtgtaaataacctaaatatccttagaagactctcagaaataaacagaaactacctctcgagaaaggcagctttatctagaacacaagtcaccatgagtaaaagccagcaggaataacagaggcatcagaattggacctgtaaatacttctttattggatttagcagtcaaaaatataaatatttttagctgggcatagtgatgcatacctgtagtctcagctgcttgagaggctaaggcatgagaatcgcttgaaccccggagacagaggttgcagtgagccaagatcgcgccactgcactccagcctgggtgacagaggaagactcggtctcaaaacacaaacaaaagaaagccaacaataatataaaatattttaacatgcttcagaaatttttttttagccaagcatggtggctcacacctgtaatcccaacactttgggagataacgcaggaggatcacttgagccacaggagtttaagacaagcctgggaaacatggtgaaaccccatctttacaaaaattagctgagcatggtggtgcatgcctgtggttccaactactcagggggctgaggtgggattgcttgagcccaggaggcagtggttgcagtgagccaagatcgatcacaccactgcactccagcctgggcagcagagcwwgactccgtctcaaaacaaacaaaaaaatttaaagcatttaaaataggagtcttaaaagagactaaaaaaatgactaaacaatttttaagaaaatggaattctagagatgataaatttaaaaataggaattaaaaattcactgaattaaacagattagagctagttgaagagaacactggtgaactagaaaattgatctaataaataatccagtagatggcttagacaaagagaaaagacaatgtgaaatgagattaagagactaaaaagatggcctaaggtgctctaaaagaattccaaaaggataaactatagaagatgggaagaagttccagaattttttgtcaatactaaacctaagattcagaaagcctgacaaatctctggaaggagaaataaaatagtgaaaccgaagaaaagccgagtgctgtggctcatccctgtaatcccagcactttgggaggtggaggcgggcagatcacctgaggtcaggagttcaagaccagcctagccaacatggcgaaactcccatctctactaaaaatacaaaaattagccaggcatggtgatgcatgtgtgtaattccagcyactcaagaggctgaggcatgagaattgtttgaacctgggaggcggaagttgcagtgagttgagatcacgccactgcactccagcctgggtgaaagagtgagactctgtcccaaaaaaaagagaaagaaactgaagaactttaacccctttgccttccaaaaatatattaaaagcagccaggaaaaaaaaaaaaaaagaagacattcagactgacagccaactttcaaaagtaaacggtgccaatggtgggattatatcttcagctggctaagaaaaaaataactgtcaatctaggaattttagatgtagcaaaactatcaataacaaggatgaagtaaacaaattttcaggcaaaacataaactgatacatattaccgccaactaacctcttctgaagaaatttctacagggtgtgctcaggtaagaaaaggaaatgatcccacaggaaatatctgagaagtaaaatggattattaagctaaggtattagtaaacakgtggtcatatttaaatataccttgactatataaaacagtaataagaatgtctaatgtgtgggttaaaaatgatagaactaaaatattgcataaaaatagcgtacaaattgtcaagggaggggtgttagctcacatgctatgcttcttttgagaagttaatggtgtttaactttaggctttaagtaaacaagttgaaatagctaagaaaactgttaaaataatagaaagggtaacttctaaactagtaaaggagaggaaactcacatggaatagaaamcaaacttctaaacaacttatgaatcaaaggaaaaaattataatgaaaattagaaagtacctgggcctgaataataatacatatcaaaactgtaaaggctgaaattttagcctttttttctaatttaataaactaagcatagatgaagactccattcacctctgacctgccagaaatgactattatccctctatgccatgagctaactttatccaaatgtccccctgtgtcacagggaacctctggccacaagatcctgatttctggaaacagagaagaaaagaaagatacccttaaccacagagaaagatatttctcagagtgaggccctaagggctgacttgtgttacttggctagttcggtctatattcttygcataaatgtacacagaataattttttttttttttttgagatggagtttcgctcttgttgcccaggctggagtgcaatggcgcaaatctcagctcaccgcaacctccgcctgccaggttcaagcaattctcctgcctcagcctccctagtagctgggattacaggcatgtgccaccacgcccagctaattttgtatttttagtagagatggggtttctccatgttggtcaggctggtctcgagctcccaacctcaggtgatgcgcccacctcggcctcccaaagtgctgggattacaggcatgagccactgcgcccggcaagaattcttacaacttaaaggctctaaggagccaaagtgaagctgcctacctaaattgatccatagaatcagtacaattataaccataataccaatggtgtttttatggagcccagcagttctactcttaggtctgtaccctggagtggtggttctgaaaagcacggtcctttgagctacatggcatcagcagcacctgggaacttgttagaaatgcaaattttggctggcatggtgggtcatgcctataatcctaaccctttgggaggctgaagcaggaggatcacctgaacctgggagttcaagaccagcctgggcaacatagtgagaccctgtctctacctttacatatatattttataaatttttttttttaaaagagaattgcagattttcaggccccacctgaaataaaaacyccaatggtaggaccaaccatttgtgttttaacaaaccatgcaggtgattctgatgctgctaaaattcaagaaccgactctcctagaagaactcttgcatcgtcgttcatgcaagaagatattcacagaattgtttttattacagaaactggaagtaacttgcgtgtccagtggtgggacgggtaaacaaatattgggatactttatagcacctcccccacccccaaaatgagccaaagctgtgctcattaacagggaagaatctcaaaaacataatgttgagtttaataagccatagaggaatacatacattagaattctatgtacatgaagtgaaaactaccaatatattgtttagggatatagacattaaaactataacaaaaaccaagaaaattggcccaaaattcaagataatggttactttgagaggagaagaggcagataccaaggggaatatatgcttgaggcctgttgggtttctaagatatttactgataatattctgttccttcaagtagatggcaggtacattgttgtttgtgttatttttaaactataaatggtatatgagaggcagggtagtctcgtggttaagagcctgtaatctataattacttcccgagttgaattttggctcttccccttctagatttaggatcttgggaaaatttcttaactcttctctgattgttcatatgtaaaatggagattccaacagtattaacctcatgcatatatattattaggtgaagtgcctaatagataataagcactaatagatgtgtgtgttgttatgtctcacatatttcacaacagaaattcaggaaacgtgaaggtagaccatctgtctcctcctcgaattgtctgatataattcagctcaggtgtggaggaattgatggcactataattaaatattcttttatttgaatttgaatgtgtttttcgcctttcaagtttcatgttatgtatcccacttgttagcaacattctcatgttgatttttctctactatgattatttttataaagctttgcaaagccacctgccagttatgcattaaaaggcactcagcactttttttctgtgtctaagctggcttggtcttgcttaccagcctttctccagagtgataaatctgtacgccaaggagtggtaacctgtgggcagcgtgcacatgccaggtcagagcaggctcctggggtccacgagaactgctgcctacggaggcagggttcacaaggatctctttggaacaaacaggatgggaaagaaaaaatgttttctgtatgcctttyggggaagatggcaaaccaaagcaatagaaagaatcctatatcagatggatgaatgaatgaaagggaaaattgcaaggggaacacagtttatcagcaagaaatagactatcagtctgcagattagacaattatggttgtaaagacaggtgcartggcatgtgcctataatctgagcgactccataggctgaagcaggaagatggcttaagcttgagttcaagaccagcctggacaacacagcaagacttcctctctaaaaataaggaaaaaaaagtgttttaacagacagaactggcctaggtgcagtggcccacacctgtaatcccagcattttgggaagccaaggcaggcggatcccttgaggccaagagttcaagaccagcctggccaatatggcgaaaccccgtctatactaaaaatacaaaaattagctgggcatggtggcacctgtaatcccagctattcgggaggctgaggcacgagaatctcttgaagctggcaagtcgaggttgcagtgagccgagatggtgccactgcactccagcctgggcaacagagcgagaccctgtctcaaaaaataaaaaagaaaaggaactgaagagtcaaggttttcttcttaacaaataactcccattctgatttgttcatttgggaaataccactaaggacctattattttgtgagccaaggcctgctagatactcgtgaagaacacacacctcagctctgccctctttgagtttacagtctggagggattacagcagcattaacctaaagcaaaggatgtctacacttaaacctgaagaataaacaggagcgaggcaagggtcaggggagttggggagaaaaaacatggcacattctgggacccaacagtcagtgtggctgactggtcttggaggtggggagcagaatgtcaacagatgaggtgtgaggggtcagcaggggcccatgatctcatgagatcatgaacgtgaaaattatttgtgttaaaggaagtctgtggtaacgatatggaatttatgtaatttgttcattatgattcacaaccaggaagcattctgcaaaatctgatggtgagaaacaagatgaggattgttttcctaccyctgtgtgttcctttaagtaattacacaatattgggacatcagagaaacttaatttgtttcagactgacaatttaggtcttagccaagaaacctttgctcagaccaatgtcctaaagcatttctccagtgttttcttctagtagtttcgtagtttcaggtcttatatttaagtctttaatttgtttttattatttgatttttgtatatggtgagagacagggctctggttycctttttctgcatgtggatatccaattttcccagcaccatttattgaagagactgtcctttccccaatgtatgttcttggcacctttgttgaacatgagttggctgtaaatgcatggatttacttccaggttctctattctgtcccattggtctatgtgtctgtttttatgccagtaccatgctatttgggttaatatagctttgtagtatattttaaagtcaggaagtgtgatgtctccagctttgttctttctgttcaggtttgctatggctgttctgggtcttttgtagtttcatacaaattttagggttgttttttctatttctgttgtcaaactcataatttaggaatatgtgaaacagtgttctctttcatgtgtttgccatctttgtacatacctgtgtgtaatttggtaggagggcaccacactcacacaccagtttaggatgtctccttgggaggctcatggacaaagagagctcagtcccaagagccagtgccctcccagctgggagctgttctaatcttgtcatgccaaatggaaatatgagtagaagttgccaagtcataatttctgtgatgaggaaaggcccactataattccagaggctctattagcccttccttggccagagagttcctatttctccatatgtagcctgggactacacgtttgcctgtttaattttcagtggagagttgctgggttcaagcctgagggaactgaccaaaggaggtcagcctattgttggacacaaaatgagaagggaaaagttctccccagggtgggaagcctgagggaaggggaatggaacaaagccggtgagaagggtaaggtgcttctgcatctgaggttttgagtgggcctgttttactttgagtcttaccaggatctcccagttttgtctagaaaggaagcaggacaaaaagaggcagggaatgaggcctgagacaggcaagactaggggcttttgtcgtttgattgttgggcttttgtttatgttgcctgtaggttccttttctttttgtttttcttttacctcctagtgacagccattctaaacaaattgccagyattgtcttcctctgttgacatccttcccagcaaggaatttaaaatagcatctccccctccagaatgtgctgtgagggaagaggtgattagcataaagatgtgttctgaccctcacaccatcctctcaggcagagatgggagtaaaaatgagctgtatgatctttctgaccctggtgtatcttaagtccttttgctcttttgaactgtctcaacaaaggaaccagaaaattaaaaggcggctttatggatgagccagaatatgagtgcagtaagtttttctctttttttttttttttttttttgcagtttttacggttttttagaacacaatgtgcacatgagctgtctacccattttcttcgctgcacagcctggcattggggttggtgactctgatggccagctgggcagctctttccacaacggctttgcagttcttggaggaaacattgtgaatgatctcagcacagtaagatttgttgcatggcagcagcacttccggctccttgacgctgtggatcaggaacttccggaagccactgggcagcatgtgctgtttttctgttgctcccataaccaatgttgggcatcaagatctagcctttgaaccttctatgagccctgttgtcagtacctctgggtttctgccagttacgcttaattttgacatattggtcagactggtgctggatgaacttcttggttctttttttgacaatcttgggctccacaaggagtctgaagttggccctgatgccaaggaggagatggcccctctttctttctttcttttctatcacagtttgccctgaattgtagggaagctggcagttcttttactcttgtggggtcacgaaatgaactgttcctaggaaatgcattgcgctaacatcctggagtggggttgctgcaggtaatggaggttgggctgcacagtcctctggttccttataattccagtaaggttctcttttaagccctaaagatcctacatgatttggagaaggcactcaaacctggaaagggttttctgatgcaaaatatctgcaactgactgtcccctctgtaaggctggaggttcagtgggggggtctcctgggaagaatattcaaaacggaggcaaatatgtaaacactcagagaagaagacgcttaccattttgtcagaaaggaataaattgttactattactgaaggggaagggagtgggcaaagccaagaggaactagggccagggaatagctaaccaaacttggaaatgcacatggattcacattcccagtgcccaggcaaaactgtgcaggctttgctctagagcttcatttccccaaaactgtctgtggaaacttcttttttacttaaaaaaaaaaaaaaaaaaaaaaaaaaaaaattcmccgtgttacccaggctggtctcaagcaatcctcctgcctctgccttggcctcccaaagtgctgggattgcaggtgtgagccatcatgcctggccccacctcattttttttttttttttttttgwaacctggatttaatgaccctctgtctccctgccatgacccttgaggggctttttatgcagtatttatgcagtattaaatctgtaagaaccagtataccataaaccctacagagtatgtytctaatgagagaagccttcctgatgtccacacttgtcagtcttcacatccatgctctccttggctcagawagctgkgtgccttggaaggaagagattaatcagtgaaaggttaatagtaaaacaccaacactgacaacaggcgttaattcaagtattaaatgctagtttgcattaccctaatatgaaatttatttttgcaaaatacaaaggttctttttatgaaacctttccatgagttagctgaactaatttcttgcatgccataaggttttcaaaaactatgccttaaatgcaaaaaggaagggtttcctccacttttcaccataccaattactggttttaagaacaaattcatgagtgtttgatctggtgtctgaagactagataaaaatctgcagttttctctcttttgcaatgtttagcacactcagatctgtgggaattcagaaatcagcctgaggtcctggctgtggcagcctctaacagcacacagccaaccaccgtcccatcctgtttagggtgtttatgtggcagagctgtgtggccccttagctgtgtggccacatcaggatgttttacagggcttcccagggaggattgagaaggaaatagtctattatgccccctcgtattgaaatgttactgtttggaatttgaactaaaaacctaccacctaagaaaccagggaaccagggccagggtgcatagaggtggatgaggcctggcagggcgtctcaccctctctcatgggggtggggaactccctccagtctgcagctttgtgtctgctggcagcacacaaactcccaatgagcccagtgacagcactgcagacaacagttgtcgttattctggtgtctcagggtattctgcctgagtggagtccccataacctgacaggggacagaagctggcatgagcagcttcacctgcttaagaactcggttccagagctacacaaggggcatctgtggaccagctctcagcagtgaatctaagatgtgtgcctcttcccaggatgagttgcctagttctgggcacaacaaaggccattccctattctaagccacccctgaccctccacccaccaagacgccactgccatagacccctgccaacattccaaagctgggagagcttttctacctcttaaatttctgaggcctgctcagaatgcaaaggggattcctcctcctgttcccctcacactgtattactgcgggtgtcagcagatggagcctgccttttatatgcaaatatttggaagccattaattccccagttcctgccactactcaccctcttataagaccctgtctgtaccatccaaatkgcaaattgaagttcccacccaacaagaactattaagaactttaagatayggtgatagcctgcagcctgaaattgacttatttttgacactgttgtgctgattcagatgctaaagattcagaaaacagactataagacgtagatgacttatgacaaaactcctggggaggagaaaggcatttaatatctaataaggaacataactaacacttattgacctccgattgtgtgccaggcactgtgctgaatgctttatggaaagatcacatggctgttacaggagccttggaggtctgcactattattgagtaaggaaagaggggctccaagaggctaaaaacttcttccagagccacccatctggatggtgggaaagccaggattggaacctgggcaagccacgcttacacccagagcccttttctggtccattaggaaggaaaagaactaaggacagcaacagaatctgcaaggacaagaggacaatcgaggatttatggcctccttccgcctgactttaagagtcagtggttatgaaaagagctttggccttcccatcgctyttcagcccctcttcctttttgttttccatgcctcccctgctgtcctttctctgctccctcccgctcagagcctgagccctgtggagtttgccaagtctgatccctgcccagcagccattgctttcagcagagctttgctgataaatattgaaagcttcagctagagaagaaaaatgttctcaaaattcaaaacatgtctcctggggagactcttcattaggagtgggcatttcaaactcctccrcagttgtctaatgcagsctggcccagcattcagtgacggcactagggctgctccacacacagcttccagaagcatcgggctccggctgccacacagtcccagttggtgtgtaacagaatccactacccattggctgtctccagctgtaccatattcttcttggctgctctcttggatattttatgcttatacagtatgtatgttttgactcaaattttcttctactactttctacagttctcctttgatggcacctaaatgcccttgtgttcagcctcaataacaaaaccaataaagccttcctgttttaataccaccttaagcactttcactgtcaccaacccagggatccctgatgtaaggtagaaattggagaatacaatgggggcaggagaagcagttcttttccttcagagaaagttgtttgtttgttcttgccccagtcttgacataaagcagcctagcaaaggatttcatgcatttcatatggcaaggtggctccgaagatggatgcaaatgagctctgaaatggccaccagcctggcccaatatggtagctagctgacacaaaaggccttctcccaagagctgagtccccggggttgtgttgagttaatgaatctatgaggaaagctcctgcgagtgacttcatcttcccctaatgctgttgctgagtttcactgcaatgctggtctcctgtggcatgaagggaatgtcaggaagctggtcctagagcattcgtactgtcacctatggagtgcagcatctaacggctcagttgtccacgcacactgctcttggacaaggagggatagacatgcactggagaagccggcggagagaagccgtgtgaaggaatccgacctcctgggaacagggtaggaagaacaggtcctaggaatcttccctaaacttctccctcaggcggggctgtccttacgcttctgaagcacatgggtacatggatcagggcagctgcctgacaagactgaggttttatgaggaggaggaaatggctgggtaggtttaccacacaggaaaagtgtgaagttaaacctcatatggttagcagcggcgaatccatacaggtctgcagcaactcagttcttgctgccttggaggaaagaattcagcccagggacaaaaggcagagtgagagaccgaggcaagttttagaggaggaacgaagggaagtaaagtacatttggaagaggaccaagcggccaagcggccaacttgagagatccaagtgccttgtccggccttgacttggggttttatacattggcatgatttgcgtttcttctcccctgattcttcccttggggtgggctgtctgcatgcacagtggcctgccaacagttgggaggggcygcatatgcagtgtgcttactgaagtacgcatgctcatttgtttttcccttatctgttgagtgtttctggaggaaggccatatgatagttaaactcggccattttgcctcctagtgcgtgtgcccactcgcctatcycctgagaccttatcaggaggctgatcacctgcttcaggtgttgctttttttttttttttttttttttgagaaagagtctctctctgtcacccagattggagtgcagtggcacagcctcgcttcccaggctctagagatcttcccacctcagcctcccgagtagctgggacgacaggcatgtgcccagctaatttttgtatttttttgtagagacaggattcaccacattgcctaggctggtgtctaactcctgggcccgagttaatccacccgccttgacctcccagagtgctaggattacaagcgtaagccactgcacctggccaggtgttttctattgggagactgcatttccctggtgccagctgtgaccaattgttattttaragggtttaacaatggcctgactatcacctgatggtcgccagacattcctgggggagggccctcccctrccctgatcatgtctacctaactgcctactctaacaatactactcctgtggtatggggatcctaagccaaaaagctgaaatgaacatgttctagcactacagaaatccatactgcccctcagtaaaggcaaattttaaatctctttggataacccagggcacatgtgaacaaccccttctgaagaagcacttattcttcttcacactcaccatgaaaaagaataaccaaatacaatagagccttccctccgggccctcaaagaaaacctgggtgtaacagaacaagtttagaagagagttaaacttgtgcaaatagaatcataaggtcagaagaggtcaatttggttctttggacaagaaccaaagagaaattcacaacggtgaaacactgtcattgaaacaaagtaattcactaaatggatagtaaactgctaaagggagttagtgaattgaaagatatcgcagagaagttgaaatctgcaaggtaaaataagatctaataakagtttatggagaatatctasaaaatagaggagaggcaatatccaaaaagttgatggctgagaatttttcagaagttttcagtttgaaagagtaaaactaatttcttaccatgataagtaaaaagctcctttttgttatgtcttagtggtacttcatatcagcaacraaaacacaaaaacttgaaaagctatcaatgacaaaagccatttacctataaaggaatgataaaagacagacttctcaaaaagagtagaagtcagaagtaagcagaataatgtcttcaaactgctgagggaaaataacagacaatctagaattgcataacaataaagctatcagccaaaatcaaaggtwaaaataaagattttcttaatccaaagactaggtgagcttaccactcacagaccattgttaaaaaaattactaaaaatgtaattcaatggaaggaaattaaatccagaagcaaggagtagtttcataaaaagcaaagaagttagtatgttggtttatttatgtaagtgtagattgtaaatgataatgattaaggcaggctcaaaaaaaggtgaattaaaataataggcagtaacatggaaaatgaaagaaggcattctaaggtccttttattttcaggaggacagaaatacgattaacttatatactaaaaatttaacataactgataatagaaataacacttccaawccagttgggggaggggaatattaaagctatccacctgacagaaaacaagaaagaaggaaagaagcacataataaattaaaaacacaaaataagttttcatatgtgtgtgtatatatgactgcaaaatataggtacaggtctaccagtttttgcaataaacaaaattatcatcttagtgactatatrgattttgttttaattagccatgtgctactaataaaatacacttaaaataatgcaaagtttattagctgggcatggtggaatatgccttagtcctagctacttgggaagctgaggtgagaggatcacttgaccccaagacttcaaggttacagtgagctatgattatgccactgcactccagcctggatgacagagcgaggccctgtctctgaataataatratgcaaagtttagaagtcctacactgccctgtggatttcataattgaacaatatcagggtgtgaaagtggcattgaaaaacactatgatttcttgcctaagagaccaggataccattaactaaggatgatagctggggatgttccactttggaagtaaaaagaaattaatgatcattgagttcttcctaagtcttagttagggcctacaaaggaaattaagaaggagcatcagagagaaggacttgtgctgtgtgtcatggaagcccagtcacaggagaacttggagtgggttatggcatgggagccccagaaagaaaggagaattcaagaacagagatttttaaggataaaataatcagcagtatttgtgctgaacacaaagggttaagcagaataagtattgagaagccacccttggatcaagctttaagaggacagattagtagagtattgggcctactggtaagagacaaaggaagaaaatgggaagtaataaattgagaaagcaagagtggattttccctcaggaagttaagcacctaagggaaaacagagtggatggtgaagagagaascaatctcaaaggaagttatcttggaataggaaataaccatattgaagaatgaaaccttaattacctacagccctcagggaaatgagtttcctgggtagccatcttttctaggtgacctaatccttgctttttaaaaataccaagctaattttgaccatttaaaaaatatgcaaagtcactagtaatagcagcatcagggtggtctcttgttcatctttcatgactctaataaagccagtcatttctccatgactgcaggacctgttgaggcctgtttggagcttaaaatagccataaagagttgtgttttgagttcctgtatctgttttttgacatctttgagtgtctgtctatctctttttccatgtctcatgggtaatgtgctgacgtagtaacaaggtttaagggaggcacatttcacacgtaagtgtgaaaactcaaacatcaagcttatgaactacaaaaggattgagtatcttttattgtcaggcatattttctcatagcataccataattttctatgtctagtcagctcatacctgggttaaggtgtgttcaggcctgataggcaaataaacttagccasgtttctgaacctaaaaagctcaggtgcagactgatcaatcaccaggataataaacatcactctggtgtggctggtggcctttccccatgtgtttatgtctcatatacaatttaatataaaactaagagtaagctggggtgatatggtttggctctgtgtccccacccaaatcttatgtcgaattgtaatccctacatgtcaggagagggacctggtgggaggcrattagatcatggggaccgagttcccccatgctgttcttacgatagtgagtgagtgagttcttacgagatctgatggtttaaaagtgtggcatttccccccttcactcactgtctcccgctgccatgtaagacatgcctcgcttcaccttcaccatccggcatgattttaagtttcctaagactttcccagccatacggaactgtgagacaattaaacctcttttgcttataaattacccagtctcaggtagttcttyatagcagtgtgagaatgaggtgagcagctgagaggcttttctgactatagtgtatgagctgcaatatgtcgattttcagatatttacttagctcttcagccaaagatctctttggaggcctttatttcctgatctcaagaggaggagaacctcaggacgaactgtttgcatcttccctcaagaataacttaaagatttctgcctcaaagatgataattctctcaatacagatagaaaaaattattcacctactaccccatcctctagaaggaaaggtatttattttgtattgactataatatcctttctgctgtagtgtatgttacacttctgtctgctatctgggctgtacaaatagacttgatcctcaaagactgaacaacttggaatcttcacaatcctgggatcatttgttagagcacttgttcttaaataatgtaacaatgatgcagttctcaacatgaaagtctgtgaattttagcaaaagaaatggagaggcttctggggttctgaattccataactcacagctctgaaggcgagactactgaaacattccaagtagagaaaggtcactagcaatatcagggtggtcccttgtaaaaggcccacaggctggcttccaagaggacttatacggtgacatttattatcttgatgatttaccagtctggctcttagcttttcaggttcagaaacygatttaatcaagatacagaaaagagattcattatcagagttggtctcaccttaaccaagctcacaagattgatctgtaaagcaaaatgccacttgacatttaagcagagaaatataactgatggatattcttaaagtaaaaacgactagctcattctttcctgcaggcaggcctacacagggaggcagatcataatcaggaggttctttggtgaacacgaaatcagaataaagctgaatcatatgcttaatggtatagactaagaaaatagtccatcccacaccaaatatgaccctgccagtggaactaagttcctttgaaggctgtcaactatgactccctctgctctggtcagtgtttggatagacacctgccaatgttttgtctcatttttttatgcctcagggctaacccaggcccatacccacccaaatcacttcccaagttagtctttctcctagatgttaatactttcccatcagcttacagtgtcattctttctccttaagcttacagtttaaatctcagcaatcttattttcaaattcttaagggatcccttgctgaacttacattggtcaagaggagagggtgacgctgacaagtaagcagctcactcacaccaaggcttatcagtcatttacaaaaaaaaaaattaaataaattaaaaaaaaaaaccaaaaaacttcacattcttgctatatgcttatgccaggttgtattatttttaacatttttccttaactcacttttttaaaaaatttattttaaatgatttttaccataaatagaaaatgactattctttgtcacaaaagcaatataactctaaaactaaatatattgaaaacaaaagttctgatttttcccatgtactttttaagctagataccatttgtcatggaaagctctgagcttgagcagctctttgagctatactagcagcaaactgagactcccctcaatgtaatcaatcaaaaacatcaaaagaggactgagsaggtgaataatgtaagacattatctaatgtatttagtgccttatcccactaccatgtaaacaataatctcacattaggtgtcctacattttgggaaaagatgaccttgtctttttcgtattgtaagtgtatttgaaacttatttatacaactgtagtgatgcctcccccttcccagcctcacttgaccctggcttctgtctgatgctctactgactgtctcgttcctggttctcctgygtaggtacacactggcagctcaggacctggtgatgcgtgcccggggtgtgctgaaggacagaggatggcggatatctaatgaccgactgggctcaggagacgacatttctgtatatgtcattcctttaatacatggaaacaagctgtcatgaaaatggcccaggggattgggaggacagaggggaagaaagctgggatgcctcttggcaggacggaactgggaagtgccccagctgagttccaagtgatgcagtctcttcccagcccaagcggggagttcatggccaaaagactatgcttcaagatgaccctttggtttccatttcttctttagtaacaggtcaactcaacaagagcaaaacacaaaggctgctaccaagtgttgttgtatttcagttcctttcataggcctccgaggtggccattgactatttggggtatayatgtcatatttattttatctagagtagctggggcagccattttcaggtgtaaatggcagaggactcttcagcctgtcaagctgccagcttatctacgggttaaaaagtgctgcattggaaagtagggggtcatgcctcaaaatgtaagtaagtgcccaccttctaggaagcctgaggtttatttcagggattgccgtctgcccccmgccccccttctctttttttcttctctgtttctattcttttatggcagtggtggagtgaggcagggatttttttttttttttttcgtgtttttgacattccttgaatctgttttttattccccttccacagaacaggcctgggactttccaacaccctgctaaggaagttctgtgtccaagtcccacccaggctgggttgtccccacctcctccagcccacacagcccaggcagcatccgggccagtgccctgcatgacagagggtctttgttgtgtaatgtttgttcccaagttgcattttctaaccgaatcagtgtgttttcatgaaactgagtgtttctgtggaccagtagttcctctgttgtcttcagtggtcttcctgtgtggctcaagggttctctgtgagagtctggattttcatttctggaatggctggccccatcccacttttctgtatcatggggacacatataaagcagtgtttaatagagcagtttaagaagttgcttgcatctgttggttcaccatggctcatctggggaccattttggattcatgtttcatggcttgtgactgtccccaagcccactccaaacaaagtgtaaggatcagagttctgtcaaggagcagcagttctgctctccccatcatctttgtgcaaggcccctcggggggcactttaataaaagaatttgaaatgggttgactggccattctcatgctgtgctccctgtctcttctcttctctaaagaatcatgtcccagctcctcaaggtccctctatggttccacatctgagtgttcgccacaagagcagcagcagcaggcacagtgcatgccatatctacctgctgcttctctgctgggaggaatggccaagtagattataaaactcacttctgtctcttaggcagacttgtacggccacaaaattacctagtcttcttcctgctgagctactgaggtattgccaccattttgacaactttgagtaattaaaacactcttctgacccaaaaaggaaaaaaggtcactgacgtgacccccccagcatgctagagagctaattccagttctcatatttgtttgaatttcttcccagaggagaggataggaacctctcctccagggcagtaaatcacctgcatttctggagttgtcggtattgtattcgaaaaggcctggagcccctcctgctcaggaaagaactcattccagggtgtggagacagtgccgtctggcaggtgaaatactgtgggaattcacgccaccaggtgtttgtgcaagtgttggcctgggaagaatgggacttcggccttgtcaggagttgtcttcatctgcagcacgtttcttcctcctgcagtagatcttagctaccccagatatctctatggagagaagtttgtggaaaatgctttgcttcgtggcagagtctgatgctgtaggaaaaccttcgggcatgtgacagcagtgtggtccactccctgttctgccctggcgctcagagtcatgtgtaagtaggaaacctgagcaagtcttccgtggaggaccctgagctgccgtctttgggatccttcctgtgtccccaccgtctttcatttatttgctttcctgggcctctatctgggccctaccttgagcttctccagttttattcaagccaccagagtaagaatttgggtgtagatgtcacaactaccttctactcaattcaccaattcatttactgctatggcacgtctcaggaataactctagaaacctctaaatcgaaatattataaaatcttgagcacttagtcctgctggttttagttagaaaggcatccaggaattgttttcctacgcccccttgagtggaaagatcttagttagaagataaagtcaagtttgtgttcaggggatgggaggaagactataaataagatgaagaaatcaaaagtaggaaacatgatgtaaacgaagcatggcagatctgtccagcactgatattgctctataaattgagcttactcagttttggccttatttttttacccaggccccatgtcacccagtcctaaaacagtaaccgtgtctacataacgggttggcscctggtgcatccctggaaaagtcaaaggacgcacacttcgaaattctgcagaacgtatttatacatggttcagaaatcttgcgtatctgacttatagccaaatctgcttgctcgaatagcctcagaggaagtcttgtttaataaaaaccttttgatttcctagtcaagtctttatggttgtctcgaggggtgtgtggctactttaatgaaaggctttcctgctctaaatctctttgctgggctgggcctcttcagactatctggtgaaactcctttccttagaacaaactcagtccgtccatgctctgtggcattttgctagatgataaccaaagccttattcctgtagccagtgtcagcagtcagagaggtggagggtgtgttctgctgtggttatgcatacctatctgctgttcttgaggtgtaaaaggaaaggtgaaaatcgggccaggccaagtactcagctgtcttaataggatgaagccttaagcagtggaaatttcagttattttccacagtattccattttggaggatttggggtgtttactttttaaattcttgaacaacttaacctccatgaggctttgtgaagtcagctgtgaccaccctcctcttactgtgttctcagtattcattcacttccagggaagaatgacagccacagggagatggtggtgggcaagaatgagagtcccaggatccagatttagcctcagatcttccccattcaggaagggttttccatttaacaagagcactagtatgaaaacattagggacaaatctcccatgtctttgaaattcggattctcctcttgagatccccttcctcacctgccaatcaactttataaggccacaagtggtcactggttttccttccacaggtttgaggttctcagctttccttaagcgacccagcagctccgctgttttcagagtgaatatgttaagctttgatgagattctattttcagtaakttagtgcttctgggacacttggagaaagctgtgagagtcattgtctacgcaaagaacaacgaagctgatcctaaaagtgatccaatctaagaaaatggtaaaacgagctctggccacagcacagaattttatgtgaggaactcagatttttgaagacttaacaattgcagagaaaggttgcagcctgcacaccatagcccacctctctgagcagactttggttttgtgtggtgacgtggcacatgtttgtacactgggatttttcaaaggacgctacgcgagcagactgacttgcctcttctgtgagcactgtggcttttgtcagatggagtgccggtctgcagaggactgctctttcgaatccacagtgttatctgtgtaaatagctttaatttttcttctgtgtcttaggtgaagttttgttcatgtagcaaccaggtagacagtgaccaaataaggctgtaaatgtgctgtagttttctactgtgatgtacttgaaggagaacctgtgtcctctacttttctgatctcccacaagtattttgtgtttgtttcctgagtcctgaggttattattttactcctgttttgcccccagttttctttgttttttttctggagacccagggaggcccatggtggagatcatttgtaaggaatggatcatggtctgggtttccaaaactaccctagtacagtgaatgagagaaatctgcctggaaattgtttcagaaccatgtacctttatgctttgtgattgtgaaacattgacttttttktaaccccaaaatgaaaactgtttagtaaaggggatctattttgtgtgttttgaaacttaggtgcaatgtcccctggaaaaagctaaagaaatgtatatgttcaatgacattttaaaataaaatattatatatatgtatatacgacatattcagcaaaacttttttctgtcttttctatgaattcactgtgaagtttctttgtatcaggtaatggtctgtctggtttctttatatcaggtaatgataatgatacaaagagtatcatggctcaatgtgagattatcaactgtgaacacagactcgaaatccagagggaatggatgccaacactataagccttcacaggaataacagtaaaggctaatacatttcaactatgcctttggataccattattaccatggataccattagtaaacacatgaataattcagagaaaagaattactcccaagaggtattcttaagtgagagggctagagcctaatcttgctgaagacagtaagaatccagacttcccttcatcgcttaagcattttaagtatgtacttacaaagggttagtaaaatgtaccatcttatagaggaaagttactgtgacaggtgggataaggcatcagagcatgctaattctgcttagttctaaaatccaggaagttaaaagtaatctataaaataccaacaaaatattttaaatgaccaggcatggtggctcatgcctgtaatcccagcactttgggaggccaagcggggaggattgcttgagcccaagcgttcaagaccagcatgggcaacataccaagaccccatctctataaaaattagccaggtgtggtgatgactatagctgtgcctatagtcccagctactcaggaggctgaagtggaaggatcacttgcacctaggttggggctgcagtgagctgtgattgtgccactacactccagcctgggggacagagggagaccctgtctcaaaaaaaaaaaaaagaagaaaaagaaaaaactattttgaatgatccacggtcttgattcacaaaagcaagctaaaagtggaagcttgggaagaacagaatggaagacagtcatattagaatgctattattgtgaaacatcctcagctctattcaccttcacttgtaccctaatgctgatgctgcctccttctccccaactcagtagtggaaaacaatggaaaaaatccatccttggattagataccaggagattgggacatttcttctccatggaagatggaggagtcttctaacattctgtcgtgattagctcttgaaaggtgtggcagttgtctcccaaaatggctgccaacaatgcttcctatgtctgtatgcaagtgttccttttcccatcaagaggtggagtttgtttccccaccccttgagtctggtctggcttgtgacttgctttaataaaatgcagaagtgacattctgagacttctgagctgagatctctggaggtctcctagcacctgctttttcactcttggaagccagtcaccctgtaaatgtcagactagattagtgagtgagtagaggccacgtgggagagaaccacagtgcccagacattgggagtgaggccccaaatgagtccctccaggtgataacataaggagagagaggcctagccagctctcagctatttgggtcattccgcttgaggccacaaacattatagagcagagaatcatccccacttagccctgctcaaattcctggcccacagatccatgaacaaataataaggtatagagaacctggctctcggggtttgggagtaaaatggttaaaaatgtaaattttttaaagagaaaatggcattgagaaaatatacttctgacgtgggaaataatcttccatatgcaatgtggtagggtgactgaaatgggagaatcagttttttagcagtaatgcagggacgaactcataatccctacattcacgtgtatgcttttgctgctgcttgcagctggtaatgagccttactaagccaagaaagtgatggccatttggaggctatgagcctagaaggggaaaacaaaggtcgctaatttaaccacaaatttatgataagaccatcctatgttgtactacttatgacctttggtacagtcaaatggctctttgattctaaagaacttcacagtgttagggaaaataagaccattttcaaattgtgtgtgtatatttaaaaattctcatttaaaaatctcagctggacatggtggctcatgcctgtaatcccaatctctgtgaggctaaagtgggcagatcacgtgagctcaggagtttaagaccagcctgggcaacatgatgaaacccagtccctacaaaaaaaaatacaaaacttagccaaatgtggtggtgcacaactatagtccccacaactcaggagactgaggtggaaggatcatttgaacccgaaagatcaagccttcaatgagccacgatcgcatcattgcactccaatctgggtgagagagcgagatcctgtctcaaaaaaaaatccctatctacaaaatacttcacacttattgccatcccagttgtttcctttaaatgacaagccaaagaatgaattacctttcctagcaattagtctgcctttttaattgtgttctctatcattagaaccctgaaaacactgctgctcactcagtatattccctacattttcagtctcttgtctttcacttctgacaagatcctccagctagctaaccctttttgctttactgatttcaattaggctgcctgcgacacattccaagtatgactgagcacaaggtgggggcagtgtgcacctcggttgtcttctggggactgggtcggatcagtttgttggtgcaagtggggccacggacagggctttggaaggtctgaatgcagacctaaaggacagcccttccctgaaagggccatacaaatctgagctttttctttaatcctctttttaaaatttggtatttgcaaatttaatcactataaagtaaaagtaggtgagctcattcagaactgtggatgggggtataggaatggttgacatgaaagtgagagaaatgtgaagttacagcagcaaaatgtcccaagctgagtcacctcacacccttcaaacactacaggaagtgtaggcttagtaaccaaacatctttgatttaaactaaataactgtaaaacctgaaaatagtggtctcagcagttctgaattagwtatttacctccctactgagtttggtcagtgaaaaaaaaagttgggagaaatttctggagaactgtgaagtttccactattactgtcttaggtgaaaaaattaaatttctcattttgggatttttttttttttttcttgagacagggtcttgatcttttgcccaggctagagtacagtggtgcgaacatggctcactgcaaccacaaatccctagactcaagtgatcctcctgcctcagcttcctaagtagctgggactacacgcatgtgccaccatgcctgtagagacagggtcatgctatgttgcccaggctggcctcaaactcctgggcttccacctcagcctcccaaagtgctgggattgtaggtgtaagccaccgcacccagctcattcttatcatttttaaatacaagtcagagaacatttggccaatctaccaattgcaccgtagaatttgaaggaaaattaacagtgtggttgttctcatatttgcaaaaaagataaatgctatcataagtattatatgccttaaaatacaatgcaaatagactccgatatttgtagataaaatattaccaatgtatgtcttggatttgcttcaaagtaataaagggaagggaggggatgggtttacagatgaaacaagattggccatattgaagaaagttatgcaaacttggaaataaaaggatgactgcatgtttttttcagtgtctttcctggaatatcatctgccagcgccacccaaggattatttatttagttcttaggttatggttctgcaaactttttctgtaaagatcccaattgtaaatattttaggctttatgagccatttggactctgtcacagctactcaaaccagctattgttgcacaaaagcagccatagataatctgaactaagatctgttttaagacagtataaggtcaagctttattccttgactagaagaattaactcgtaagaatgtggcctggccgggcacggtggctcacgcctgtaatcccagcactttgcgaggccgaggcgggcggatcacgaggtcaggagatccagaccatcctggctaacacggtgaaaccccgtctctactaaaaatagaaaaaattagccgggcgtggtggcgggcgcctgtagtcccagctaccctggaggctgaggcaggagaatggcgtggacccgggaggcggagcttgcagtgagccgagatagcgccactgcacgccagcctgggcggaagagcgagactccgtctcaaaaaaaaaaaaaaaaaaaaaaaaaaagaatgtggcctgatcttgcctctctggtgtgaaatgaagagagtcaaacatatgaatgaacactcatggcctattgctaaggaaaattcaggtagatccataatcatttatcttgttttataaacacagggcaatttataaatttgccagtttgtattctaaggtagtcctacattcagcttctagtcatattggtggtaagatgcatcggggttgtgatactgtattttctcaaaactataacactatcaattttataatctgccacaaattgaaaatggttaatatttttttctaatttaaaaggaggaagttaacccatcatttgccacactctagtcatgaggcaaaggaaagcatacatgcaatctgttcttacaattaacaaagtatctcataataaaaaagtttattatgccccatgctggctacttggttttaattcttgtatcgcccgctcaggtagatgttatcattttttgcagatgaggaaataatttcattctattgtgatctgagaacatactttgtatgatttcaatccttttaacatattggtttgttttgtggcttaacatacgatctatcctggagaaggtgccatgtgcacatgagaagaatgtgtattctgctgttgttggctgttctgtagatgtctgttagacctagttagttcatcatactgtccaagtcttctattttcttattgatcttctacctaatttttctatcaattattgaaagtagggtatgaaagtctccaactattactgttgagttggctgtttcttccattctgtctgtccttgcttcatgtattttagggtgggggctctgttgttaggtgcatctgtgtttataattgttttcctgatggattggccttttttaattgtaaagtatcccttgtctctgccagcaatttttgtcttaaagtctattttgttacatatttgtacagccactcctgcccttatttggttactttttgcatagtacatcttttcccatcctttcacattcagcctgtatgcatttttgaatctaaagtgtattttatagagaaatatagttgagtctttttttttaattcattatgccaatctctaccttttgattggaattctcagtccatagaaacttaacctgattaatgattaaataggaattacatctgccattttgctatttgttttctatgtgtctgtctttttactcctttatttttccattactgccttattttgtgagaaataatttccagtataccattttaatttcctgttgtttctttattttttattttttgcaactcacttttactgtttctttataaacttcctctcccatggaggaatatattgttatagtcattagcttatttcttttttttaaactatgctaacagcaatggagccaagaggagggaaaacataagttacaatagaaaggcacttagaacctgttaaaatactgatatcctggaacatacaacaacaaaccaacgacaacaatgacaagtatactggcccttccaaacctggtccatcactgaatcacatgctgagctcacttccagtgccctgttcctctgctctgctggagtcacaaacccatagcaccccccccccccgcccc

SEQ ID NO: 6891 - DNA, 24579 bp, Homo sapiens
acagcgatcctgccactgcacttcagcctgggcgacagtgggagattccgtctaaaataaataaataaatataatgtgagagttcctcaaaatagttaacagagttacacatgacccaggaattcyacttgtagatatctactcaacagaaatgaaaacatacgtccacacaaagacttgtacacaaatgtgcacatcagcattatccatgattgccgaaggatggaaacaacccaaagtccatcagctgatgaatggataaacatgtggtatatccgtacaatggagtatttttcagccataaaaagggatgaggatgccgggtgcagtggctcacgcctataatcccagcactttgggaggctgaagtgggtggatcacctgaggtcaggagttcaagaccagcctggccaacatggtgaaacactgtctctaccaaatatacaaaaattagccaggcttggtggcgggtgcctgtagtcccagctactcaggaggctgaggcaggagaattgcttaaatccaggaggcggaggtttcagtgagccaagcttgtgccattgcactccagcctgggtgacaagaggaaaactccatctcaaaaaaaaaaaaaaaaaaaaaaagatgcggtatggatgcatgctgcaactggatgtgccttgaaaacattatgctgagtgaaagaaaaccagtcacaaaaggccacagattttaggattctatttacatgaaatgtctagaataggccaatccccagagacaaaccaaagaagagtgattgtctaaggctttgaggttaggaaaaatgaggagtgactgttaatttgtatggggtttctttttcaggtgataaaaatgttctaaaatcgattgtggtaacggttgcacaattttgtgaatatactaaaaaccattgaatggtatactttatttattttttgagaaaaaataataatcctgggaatacaggtgcacaccaccgtgcccggctaatttttgtatttttgtagagacggggtttcaccatgttggccaggctggttttgaactcctgacctcaggtgatccacccgcctcggactcccacagtgctgggattacaggggtgagtcaccgcgactggccgaatggtacacactttaaatgggtgaattgcatggtatgttgattgtatctcaaaaagtcacaaaaatatacatttatacatatacatacattacaaaatgtaaaaacagcttcatgatactcatctatatgggtcaagggcatggtattcaggcagacttcaaagaggaggtgatggctgagattaacttgaaggacaagggttcccaaaaccctcctggaatggaaaacattgtcaaaaggcccagagaagtgaggccttcttgaagaactgcaggcagctctgtattccagcgcacaggagcccgtggaggggaggaggtaggagggagctggtcttcatctctgtgagacggtgcagtatgacagttatgacacagacccggggccaggctaccccgggttcagtctcagccctggacttgcccagctgcatggccttgagcaagtcgctctacctgtctgtaccttaatcccctcctctgtcacaaggatggaagtgaggattagagtcaatgcacccaaagtccttgaatgtcacctggcacgtcctgagcattgcatacatgttagctaacgcgacacaataatgaaccgtggagtgattttaagcagggaactgacctgaaagttgttcaggaagaccatcctcccagcgacatggagggtctaagcctcagcttagacaaggctgtcaccatcatccgggagagcaatggtgtctgagaaaggcaggagcaaggggaccggcaagagcagagggcatttcaaaagatgtaagcaatagagtcaccagggtctgaggactaaggagctgggctgtgaggggcgaggctgtgcatttccsatgactccggagcttctagtttgagtagctggggatgaacagtgagctcattcacagagatggagaaaacagaaaaaagagaaatctcaaaggatatgtctttggacagattcagtgtacagtacttgtgtgtttttttgcttgtttgtttttgagacggagtctcgctctgtcgcccaggctggagtgcagtggcatgatcttggctcactgcaacctctgcctctcgggttcaagtgattctcctgcctcagcctctcaggtagctaggattacaggcacacgccaccacgcaagctaatttttgtttgtttgtttgtttgtttgttttagtagagacagggtttcaccatgttggccaggatggtctcgatctcctgacctcgtgatccacctgcctcggcctcccaaagtgctgggattacaggcatgagccactgctcctggccacttgtggggtttaaatcaggtcttctgacatcaaatccagcactcttctcttcttcccacagccactagaattatgcctttgccatgaggtgaggtggcatgttgttctttggggtctaatgtcacgaggaggccacttctgcagcacatccagccctggtgggcagcccgagggcaggggcagctgaaggtggaaacatatggaaaatgaatgcccatggtctagacggagagaaagttataaggcactgacaggttgcggaaaccagctatggtcagaacgctgcttggagcagatcagtgtagccactaggaatctcaggtaggctgggcgcggtggctcccgcctgtaatcccagcacttcgggaggccaaggagggggattgcttgaggtcagacatcagattaccctggacaacatggtgaaaccctgtctctacgaattttttttttttttttttttttagatggagtctcactctgtagcccaagctgcagtgcagtggcatgatctcggttcactgcaacttctgcctccggggcccaagcaattctcctgcctcagcctcccaagtagctgggactacaggcatacactaccacgcccagctaattttttgtattttagtagagatggggtttcaccatgtcgcccagggtggtctcaaactcctgagctcaggtgatctgcctgcctcggcctcccaaagtgctgagattataggcatgcgccaccacgcccagctgaaaaaattttaaaaatgatttacccaaggctgactcgccagtgacgggcacaggtgcctggtgcatggcagcaggtgttcaatacaagtttgtggctgaaacaaatagaattaaaaaggcacaagtggacttagggtatggaggatgtcacgggtttgtcacatgtccgctttctcactggacgtcccatcaaaatcgctcagccctgtgtctgtccctcccctctcccagtgacatccagttcatttgatagatgagccctgtggctctgtcctcatgcattcgttcagccatgtagagcccttgctcccatgttcagtgcaggccagccagtatcccaggggagcccacgtagggccagccagcatagccatcaaccccattttcttccactggaaaccaaccctttattttgtttactctgtctcagttatttttctgccttaacattcttttcctggacgacggtaaagtccatgagggatgtaaacatgaaagtctttcttttcttttctttcttttttttttttttagatggagtttcgctcttgttgaccaggctggagtgcaatggtgcgatctcagctcaccgcaacctccgcctcccgggttcaagcaattctcatgtttcagcctcctgaatagctgggattactggtgcccaccaccacgcccagctaattgttgtattttcagtagagacaaggtttcaccatgttggccaggctggtcttaaactcctgacctcaggtgatccacctactttggcctcccaaactgctgggattacaggcatgagccactgcacccggcctttttttatttttttgagacaaagtctcgctctgtcacccaggccggagtgcagttgcgcaatctcggctcactgcaacctctgcctcctgggtccaagcgattctcctgcctcagcctcttgagtaactgggattacaggttcatgccaccacgcctgggtaatttttgtatttttagtagagatggggttttgccatattggccaagctggtctagaactcctggcctcaactgatccacctacctcagcctcccaaagtgctgagattacaggcatgagccactgcgcccgactgaaagtctttctttttttaaatagacatgggggtctcgctatgttgcccaggcttatctccaacccctggcctcaagtgagcctcctgcctcggcctcccaaagggctgggatttcaggcttgagccactttgcctagctaacataaaagtcttgtaagaggggagcttcaggtaggtatgggctgggttctaggtctagtgatggttcccattagacaaacattaaacgatgccagaaggctgacagcaaagagttgatggttcctaacaaaggcaacattaggaacacatctccaaggggactgagctctaatggccatgttggtgctgatttcattagtggtcccatttctgggaacccatttcctcccctacatggagtatgatgtgtgtcttcctagagatgcaggattagctgtggagcttttcagatacctgcccttctccccctccgctgtggaaggtgattgaatttggccttgctgtttttaaatttttttttttttttttttttgagatggagtctcgctctgttacccaggctgtagtgcagtggtgcaatctcggctcactgcaagatctgcctcccgggttcacgccattctcctgcctcagcctctctgagtagctgggactacaggtgcccgccaccacgcccggctaattttttttgtatttttagtagagacgagatttcaccgtggtctcgatctcctgacctcatgatccgcccacctctgcctcccaaagtgctgggattacaagcgtgagccaccgtgcccggccgctgtttttaacttttaaatttttattttattttattttatatgtattttttttttgggactgagtcttgctctgtcaccccagctggagtatagtggcgcggtctcggctcactgcaacctctgcctcccgggttcaagtgattctcctgcctcagcctcctgagtagctgggattacagacgcccgccaccatgcccggctaatttgtttatttttatttttaatagagacagggtttcaccgtgttggccaggctggtctcgaactcctaacctcaggtgatctgcctgcctcggcctcccaaagtgcaggggttccaggcatgagccaccgcgggaaggcaattgactttaaagggctctgggacccgcggccccaggagtttgtgtttggcttggcagtgagcatcagctggaagcagtgcatcaggtaaggtgttctctggtcgctgtcagcatgacccacacgtctgtgtgtcaccctgatgggtattccagtcattatgagcccttcttgactgacatttagatcaaaactcccccattgatcctctcttcctccttgcccccacccatgcttcaaccctgaggaccggggccctaacgtccctggagcaggtgccaggacctccttgacacaggccttggtcactggaaccctgactgttaggatgagccttcccagcagcagatccccagacacggacattggaaaggccactccaagaccgtcccacccagggccctaactacaagctctgcttctggagacatttgccaggtgycaaaaacatctccgttgctccatctaggagcagccaatggaaagggcagcccagccccctcctcctctcccccagtggtatcccagcctcctgcctctctcttccctccccygccttccttcctctcgcctgggctgcctgcctcagaagtggggacccaaagggtgcaggacgcctggtctgccttgtgggtcctggacggagcccctacctctgcaaagatgacttggagacaggccgtcctgctgtcttgcttctccgccgtggtgctcctgtctagtgagtacaggagggtcaaggyggagggtgttagttacatggtaagggagacttaccatgcacaggtaaggctgctcaggtgatgcaggtagaaaggagtatgcttattgttaacatgtgtgtatgtgtgtgtcgtgtgcatgtaggacacaatgcaatacagaaaaataataataataataaaaaacagtaaagaaagaaacaaaatagaaaaaaaacccaagccagcttgcttggtgggttcctggggagattggctctgcagctggtacgtgagaaaccacgggccccctgccaggccctggcaggacgcttagcctggaaagagagatggggactcagctcagggtctgggctcccctctgatgctgcagcctcactctgtgcccttgtcctgcagtgctgagagagggaaccagtgtatctgtgggcaccatgcagatggcgggagaagaggcgagtgaaggtgagtgcaggggccacccacggggcagggcaggtgcagccagmraagcagcagccccrgcacccccacactgctggtgacaggcctctccygggtttcagatgcaaaacagaagattttcatgcaggaatcagatgcctcgaatttcctcaagaggcgcggcaagcggtcccccaagtccmgagatgaggtcaatggtaaggatgctggagggaccccaycccscgtccatcaccacctctgctcacacccyccggctcctcctctcccacagtcagccgggcagcaggatgcagctgggcacgaagggctcaccccagggtatcaaagggactgcagctctgaatgagaaattacaccctatttcctgactgtaggtcgtatattggattgaatactttgtcagggttaggaggccccacctctgcaaagatgacttggagacaggtcctcttgtcctgcttcttggccatgatgctacattaaacacacctaacagggataagatgcattggatttcagaaaggtgtagggagggaaatctatattctggtctggaggcgacccacacatcagtgtgtgctttgcgggtactggtccagcacaccttctgtataagagcaacagcatcgcacatggggaaggcacaggacactgggtgctgagaaatgtgggtctrgggacagctgtgctgctaagtggccttggctacttcctccctctggtcctaatttccttatttataagcctctgaaagagctgtgttcagccagcagaggtttttttttttttaagttttcattttcaacacattggggtgagcctgtctgttgcacagcctgctgtagggcctgtggagccccggcttcagggtcctcatgcccttcacctgccaacccctgagggcatttgagtttctactcctgaacctgcttcttccaagatgctgagctcagacagtatctcccgagtctctggcttgagtctttcctcctcgtgcctgtgggtgaatgaactctttgtattcttcagggcactcagcaaggtgacttgcttggtaaaaataacaggactgttttcaaatgatgggaagaacagagatagaaatgcttggagatgaaatttctttttttaaaaaaaattgaataagtataaccgtgctaggaaaacctccaggcctcatacaactggagatttaaaagttggccaatgtcaagaagcactgaaaggttgggaggggggctggactgtttttgattaaaatgggagaagcaatcttctggcagacttccaggggaaacaggcatgattttaggccaggcaaatagcttctgtcctyttttttttttttttttttttttgagatggagtctcactctgtcgcccaggctggagtgcagtggcaggatcttggctcattgcaacctccacctcccaggttcaggtaatactcctgcttcagcctcccaagtagctggaattacagatgcctgccaccacgcctgctaatttttgtatttttgtagagacagaattttgccatgatggccaggctggtttcgaactcctgaactcaggtgacccccctgcctcggcctcttagagtgctgagattacaggcatgagccaccgcgcatggcctcttctgtcctcttaagctgactccaaacaatgagctacaccatttagcctgaagtgccttacctcggacagaagctcagtgtgtcarttagtcatgggaggtgcaggacagcctggtgaacacccaggattgtgcatgaatgcatctgctgtcacccagtcaactcctgtggatagcaggagggcagtgcccagcgatgcctcaggttggataaagggcaggtgacagacacttcagccaacttgaatttggaaccaggagacaggcatctgacatctctaagcctctgggataaaggtgaagttactttagggtgaaaagagagtgtgatgaatgcatgttcttgagaagaaacgtatacaatgcacagaatgacacatagtataaaattactatcttgtcctgaggattaaattgttcttattcattacgtcaaagctctaatttgtgacacctctgaaaagaccacttgggaagattgtttgctgtcctgagtacacaggggacagaggaygcttctttaggaataggcagtgacttactaagtacctgcttcctaaaccctaagcccccgcacctcccacaayggctttctggcgcttggagcaacatcaggacccacagtgggtgggaagagggaagctgagccagcagtggcgtgtgggaacctggtaccctagctctgccccaatctgctgtgtgacctctgttaggtcatgcacatctctgagcctgaatcccctctgagaaatgtgtgaatgccgagtgagaggtggggcatgggtatggatgggataaccaaccccttctgccagactcaagtttcctgcaactaagtaggtcacggcagacgtttgggaagaaacattccagacgtctggaatctgcactaagcccagttcacagataacttgatttttaatctgagttaagtaatagaaaagtaacagaaataactagtatttatataattcattaattaaggtaagcgtcttacttccaagaaggatttgagatggtttgtttgtttatttatttatttattttaagacagagtctcgctctgttgcccaggctggagtgcagtggcgtgatctcaacctccacctccccggttcaagcaattctcctgcctcaccctcccaagtagctggaattataggcacctgccaccacgcctggctaattgttgtatttttagtagagatggggttttgccatgttggccaggctgggcttgaactcctgacctcaagtgatccgcccgcctcggcctcccaaagtgctgggattacaggcgtgagccgccacgcccggcctgagatggtttccaatattatcattttgcaaagacttttccttgtttctcccagcacctctgtaatgtgggttgggggtagggaaccatgactttccccagcttctctgcttccttcagcaccccccagcctcctcttgcacatcagagttgatggggcaaaaaaacagtacctccgtctcccccatttggtgtgaggggaatcccactgtgagawcgtgaggcgtgctgagggactggttcttcctgccctagacgtggcctccctggcttcatgggtttctccagttgaagctcgtgttgggggaaataccttgaaagtagagagctttacatcgtttcctccagacaaccgggaatttttattccaacagctgtaatgcttggtaaaacttgtcttatgtctttctccttattgaattataggtctcttaagcagagggaaggattttattttattttgtttttgagacagggtctcgctctgttgcctaaggtggagygcagcagtacaatcatarcttactgcagccttgaactcctggcctcaagcaaccctcctgcttcagactccctagtagctaagctcacaggcgtgagccaccgtatctggctggaaggacggaatctttcttattcggctttttaattccagtgcttagcctacatcctggccgtgataagagctcgaaaatgttgaatggatgtgagattaagttgtattattcctttagggaatttgtttctgattatgggatttctggtttccaagtggcctggtatacttggatatgccaccaactttataatcagagctaaatcactttactctctggggcctctatcttctcatttgcaaatgaggcagctggatcagataatcaccttcaagttttaaagtctgtgtcaggagtaaatcatttcagggaagtctccaatcayaatcccccacaaaccactcatcccccaaccaggtgacttctcagatgaactgtgctcccctaagtgtgtgcccctaagtgtcctcattcttgaggggcaactcttgcttcttttcctttcacagtggaaaacaggcagaagcttcgggttgatgagctgcggagagaatattacgaggaacaaaggaatgaatttgagaacttcgtggaggaacaaaacgatggtaagagctcttcagccagtgtcttcagggaggtggagcgttggggagaaatcacatggtttgctttctcttcttctacccaactttttttttttttctttttttgagacgaagtcttgctctgttgyccaggctggaatgcagtggtgtgatcttggctcactgcaacctccacctcccaagttcaagcgattctcctgcctcaacctccagagtagctgggattacagatgcccctagctaatttttgtatatttagtaaagacagggctttgccatgtcrgccaggctggtactgaacttttaattggaggagggaggaaagggaaggtctactttcaattcatatccaggagagccttgaaaagaagggagggccgggcgcagtcgctcatgcctgtaatcccagcactttgggaggctgaggagggtagatcacctgaggtcaggagtttgagaccaacctggccaacatggcgaaaccccatctctactaaaaatacaaaaattagctgggtgtggtggcgggcacctgtaaccccagctactcaggaggctgaggctggagaatcgcttgaacttgggaggcagaagttgcagtgagtggagattgtgccacttcactccagcctgggcaacaagagtgaaactccatatcaaaaaaataaaataaaataaaataaaaagaagggagaaaaatggctacacagaacttgagaaggtgtggaaggggacagaatacccttattcccattggcttggggctgtggggatggggcaactgtttgctgactgtgtggatattaaactcctttccctccctcctcctatttgggcatcaccgcactggtctgtgttctccgtctaagcaccaacacttaggcttagctctggcaggatcatattggacagagtccacactcactcgcaggtgccttatattcacgtcaatgtcctggctccaggtcctactccatcctggaaaatcaaggccttcattgacctattcagtgtactcagcatctttactgactggcagaagcaaaccaggaaagctgaactcagaaaacagcttgccttctaccctctcaccccacctgcagcatcaacatctacagcctatcttcaggctccaactcatccaaaagcatcagatcacctgaaaatttttatatggttttcttgtggctttatgcttctcctatttgtatcctcttctctaagccttggtcttttccttactagcaaaaaatagagagtaggaaaggcccagggaggccaggagttttgaggggctgaggtgggcggatcacttgaggtcaggagtttgagactagcctagcgaatgtggcgaaaccctgtctctactaaaaataattaaaaattagccaggcgtgatggtgcacacctgtagtctcagctacttgggaggctgaggcaggtgaattgcttgaaacttggaggtggagcttgcagtgagccaagattgcaccaccgcactccagcctgggcaacagagcaagactctgtctcagaaaaaaaaaagaaaagaaaaggcctagaccagagagyccagtgtctctggccaggcattccgcacccctcaaccccttggcagacagggttcctgtctgctcttagaaagtgctggctgtgccagggctcagtggaggatggtgyggctggggacacgggtagaggatgctctgtctttgagccactgccttccacggagtgggatttgattttgctgtgaagtaccctcaagggtcacccacagcaaacatccttaggaccgtttaakggggatcacaccagcataccagagaagtgtgtgtgtgtgtgtgtgtgtgtgtgtgtgtgtgtgtgtgtgtgtatttcctttcctttttttttttttttttttgagacagtctcattctgtcacccaggctggagtgcagtggcatgatctcagctcaccgcaacctcccgctccgagttcaagtgattctcctgtctcagcctcccaagtagctgggattacaggtgtgcaccgctatgcccagctaatttttgtattttgggtagagatggggatttactatgttggccaggctggtcacgaactcctgacctcaagtaatctgcccatgtcagtctcccaaagtgctgggattataggcgtgggccatygcacctagccctgtttatttatttggtctttctccaaatttcaagattgtaatgctcctgaggaaaatcacctggtacctcctgggtgcacgtgaacttggacgtgaggccccagtttaggtcgcctttgtgggagagagtcagctctttcatttctcctggccgtttgctctgatggactggggaggcagcaccctcggaaggcatctcctagtgaaaaggaaaccacccctgggtcaggtgctgcaggctatgcccattgccctgcaggtgcacctggctgaggcctgcaaacaggtgctgggcttggatcctggcaaatcaaactttcttaggaacatactgggaaaacttcaggccatcacagcttggaagcacacacttctgctagagatgtgtttatcttggtgggcagcttggggagaagcacttaaaagttgagaatgtggccttcaaaattccttcagtgtgattttgactcatactattaaaatagcattttattttgagcagttttaaatgttttaggyccaaagctctagcatgtagatgaaaaaacattcactgttttccctttcttgatgaattcargatgcagggttgggcgcctgcaggtcctcttacaggataggaagacaggagaccctaggtctcacccacacagatggagaaaacacaggcctttggggaatgcagttccagaagctgttgtccttgagcccttgctctgccaggyactgtaagtggccacctaatcctcacgaactgcctctgagacaggtcttgtaatttccagctcatgtttcaaaaatagaggctcaggctgggcaccatggcttacacgtgtaatcccagcactttgggaggccaaagtgggagcattgcttgaagccaggagttcaagaccagcttgggcaactaagcgaggccctgtctctacaaaagaaaaaaaatttttcaattaaaaaacataagctgggcatcgtggcatgtgcctgtagtcccagctacactggaggctaaggcagggggatggcttcagcccaggagttcgagaccagcctgagcaacatagaaaatgagaaaattaacttggctggtggcatgtgcctgtagtcccagctacttgggtggttaacagaggatcacttgatcctggggagttcaaggctagagtgactatgatcatgccactgcactccagcctgggcaacagagmaagaccctgtctcaaaaaaaaaaaaaaatccacaacaaaaataaaaaactgaggcttagaaaggatacatgtatactcaaggagacraggctagtagatagccctagcattagaaccccaaggcttatttgccagcaaagctcctgttcttgtaaatcaaggatgagcaaatgcatagaggtcttggagagcttctttgatccaggaattggcccccggatggagtgagtgagaaagataaagcagagtagccctcagggggtctccccagagctccatcaaggcaggggtcacaaggtgaagcaggcctggcctccggaggatgagttttggaaaaggtggaaatcatttcaatcttctttcctctccgttgcctgtggctcacaatgttgcacggggttctgcttgcctgaaaccatccctggggcggtgctcaaggcgtctgacttccaagccctcccctgaggcccctgacatacctgtcagtcaggaccctggtttcagctaactgtcctatctaaccaagtcacctattctttttttttttttttttgagatggaatctcgctctgtcaccaggctggagtgcagtggcgctatctcggctcaatgaaacctcctcctccggggttcaagtgattctcctgcctcagcttcctgagtagctgggattacaggcacccaccaccacgccttgctaatttttgtatttttagtagagacacrgtttcaccatgttggccaggctggtcttgaactcctgacttcaggtgatctgcccacctcggcctcccacagtgctgggattacaggcgtgagcccccgcccccgccccgagtcacctattctaagggttactgatagcagttggatattcgacatctccccaaagtacttacttcataaaaggaatgcccactgggactacaagcctgtagtcccaggacttttggaggccaaggaatttagccctggcaacataacgagaccttgtctctattaaaaattagcccggcatsgtggtgcatgcctgtagtcccagcaacttgggaggctgaggctgaagaatcacttgagtccaggaggctgcagtgagctatgattgtgccrctgcacttctgcttgggcaacaggatgagaacttgtctcaaaaacaaaaacaacaaaaaaagggatgctgaatcaacttctacgtcaaaaccacactctcagggttggcaaagagtagctcgtctactgrgcttgagaaatgcccgaaagagctgaagatgaacacacaaagctccggcctgggcctggctctgtgagctccaggctgcccctgggctatcaagtacctaatgggattttcagcaccaaggggagggccagctctgagcccacataagaaggaaacacttctggcagctgcggtgcctcaacatgccttggtcactgggccctgcacccagctgggccgaggtgagactaggcctgagcacgcggctctcacaggtgctaaggaccaaagcaacatctccattcctcacaccctgaagccaccaggcggtcctgttggccatygccacagaggatgccagtttcactttcgctagtaccaaaatcaggttcatgggcttcttggtgaggtccacatttgagaaaacagaggtaagaaagacatcttggttctttaattcttgacatcatcttctgttaggatttcccatccttccaacatctttgacaaatgcatcttaaaaatgtgataaaacacacacaacataaaacttgccatttaaactcttctttctttcttccttttcctttctttttctttctctttttttctctttctttcttctctttctttactttctctttccctccctccctccccaccgcttcctttctttcttttttagatgggttttgctctgttacccaggttggagtgcagtggtatgatcatagctcactgcagcctcaacctcctgggctcgagcaatcctcccaactcagcctcccaagtagttgggactataggcaagtgctatcacacctggctaatatttttttattttttgtagagacgatgtcttgctaacgctgctcaggctggtctcaaactcctggcttcaagcgatcctaccagcttggccccccaaagtgctgggattacaggtgtgagccaccatgcccagcataaactatttttaagcatacgattcagcagcatttactacattcactgtgcaacagtcactgctatttccaaacccttgcatagcctcatacagaaactgcattcataaagcagtaactcgccattcctccctcctggaagcctctggcaacctctttttttttttgtctctgtaaatttgcccattctaggctaggtgcagtggctcacgcctgtaatactagtgctttggaaggccgaggcagttcgatcacttgaggtcaggagttcaagaccagtctggccatcaggrtgaaaccccatctctactaaaaatataaaaattaggcgggcgtggtggcatgcacctgtaatcccagctactccaggtggaggcaggagaatcgcttgaacctgggaggcggaggttacagtgagcygagatcacgccactgcaccccagcctgggtgacagagcgagagtcaaaacaacaaaaacaaaaacttgcccattctagacatgtcatctaagtggaatcatacattattcatctttttgcgtctgggcttatttcactcagcagaatatttttaaggtttgtccatgttgtagaatgtgccagaacttcattcctttttgtggcgaaattttacacwtacacaccacattttgtttatccatttctttgttgagggacactggggttgtttccacctcttggctgctgtaactgttgcgctacgaacattcacgtagaagtatccatttgtgtgtccctgttttcaattcttttgggcattttctttttttctttcttttgtgttttttttttttttgagataggatctcactctgtcgcccaggctggagtgcagtggcgtgatctcagctcactgcatcctccacctcccaggttcaagtgattctcatacttcagcctcctgagtagctgggattacaggtgtgtgtcaccatgcctggctaatttttgtattttttagtagagacagggtttcaccatgttggccaagttagtctagaattcctgactttgggtgatcygccagcctcagcctcccaaagtgctgggattataggcatgagccatcccgcctggccaatcacagcactttgggaggctgagacaggaggattgcttgagactrggagttggagaccagcctggacaacacactgaaattccacctccataaaaaaattaaaaaattagccaggcatggtgaaaggaggctgaagtgggaggatcgcctgagccctgggaggttgaagccgcggtgagtcatgatcacgccactgcactccagcctgggtgacagactgagaccccgtctcaaaacaaaacaaaacaagaaagaaagaaaaaaaaagaaaattaattcagaacagtatggaggaaaaaaaactccaagtcgacaatgatttccttcatgttttcaaggcatggtttgtagtcccttatttttcttgcatgtccttccagtagtccattcctgctactgtgttgttactttttcgtcttgtgtcttggttgttaagtctttgaaacagggctgcataagcctcygccctcctacactggctgggcaggcagaagagcctgagatgcccggccctggtctacacctgcctgtgaccttcgcccatctgggcctgacttatacacaaggcttgtcagctcacatactctggatcctcaccagtcctggccttctctcaccagggctcacaaacactctcagtgcaggtcaccacagggcaggkgttcggctgatggctgctgggctcagtggcaggtcagagtccccctgtcctaacaggtggctttgtctttcctccccagagcaggaagagaggagccgggaggctgtggagcagtggcgccagtggcactatgacggcctgcacccatcctrtctctacaaccgccaccacacctgatcccatcctgaagccggccaagaagacaaagcttgtagcaccattggcatccccgtgttccagcaatctttcccatgcaaaccggcccttcagagggtctcagcttggggtctgcagtggccagcagctcttgaaaagacgcatgcctttccttccagtgtgtgaaagtgtcctgactttcacctctttgcagaccatcttctgaggtgagcaactgcctgcagggcctcctagtaccaaacctacagtggcttcccctggcttcgttcccaagcaaaagaatcagtcaagaatcacatgtttgcttatggcttacaaataaaaacgctgaatcaaccatgtgtattatcttctcaaatctccaaccgaggggtgtcatgctgtcttccctgagcgatgatgtgattcttgctgacttgggtgtttgaaagcttgaacttgaggagcattgctcactcttctcaatatgtcccatatgccaccgaatatgctagagttgactcacccagtcgtctatcagtgtgatcgatttctggacatgaaacgctgggtcataacatatatatatatatgtgcgtgtgtgtgtatatatatatatatatatatatatatatactttctttttttttttttttttttttgagacagggtctcactttgtcacccaggttgcagtgcagtggcaagatcatggctcactgcagccccgaccttccaggcttaggtgatcctcccacttcattctcccaagtatctgggactacaggcatgtaccaccatgcacagctagtttttgtattttcaggagagacggggtcttgccatgttgtccaggccgatcttgaacacctgagctcaagcaatccactcaccttggccttccaaagtgctggattacaggtgagccactgcacccagccgacttctacatattttaaactggctaaatcgaatttctctttgaagaggtcgcgtgcttcctatcgctgggcatctttgctgatcctttctgaaagcaagtaaacttaagaccagaaaagtcctgggcaggggacaggggtgcttgaaatatacactattcacggtgtcttttcagacggcaaatctcacttctagctccattaaatttaaccaagtcagacttaaccaggttcctagtgcataccctagctatgtgatccatgtacttctaccacccaccccaatgccttcgggcctggctaaacagaaaggctgtttaggaacccgcagctctccacaaacctccttgaaagtgacacacagcttttagtaagcaatgttctagcagtggaagacactggtataacagaaaaactttaaggccaggtgtggtggctcatacctgtaatcccagtgctttgggaagctgaggcaggaggattgtttgaggccaggagtttgagggtgcagtgagctatgatcaggccactacattcccgtctgtcagacagagtgagaccctatctaaaaaaaaaaaaaaaaaaagaaaaagaaaaaatgaaatttgagaacaacatgtgtctatctagatcagttaccgagtggatggtgagcctgccaactggggttggtagttgggcagcagtgaaagcttaaccactgctagctcagatcctgagtcaggggtgcaggctgttcagccagcgataccagggaggttgcactgtatttgcacataactgaccttctggttggatgccaagtcaggccctgaggtaggtagcctctgtttacaaggtttttgtttttgtttttttaattaatgactaaaaaaaaatactcagtgtgcaacagaaaaaaaggcaaagtgttgctctgtcacttccatggggaaacaagagaagccccaatctggttcatattggtcaggataacacaccccagtgctttctggcaagagggcagttcccctttgctgcatggtggtgatcaggaggatgtcaaccgataacttgactcacagccacaccatgcaccacctgccggtcgtgtgtccacaggaaggaatgcagggcttttcagatgtcaaaaaccaagaatggcttgctttaaaaaagcaaaacagcctgttcttgcctcttccctgctcatgcttagcatggtggctctagatacagaactctggcagaaaggagccaaataagaattccattaccttgttctacccccatccttaacaagggctccattatacttcagggttttcaaattcggtccagaattccttcaccaaatgccagctgcggtcatttccttgggcgggagaagcataacagaggtaacgcgatctgggatctggacagccacagttcacatgaaattagaacagggcggtttgtattttggagactggccttgtcaaaagtgtggcctttggggcttcttttgcttgggtttttctgttctttcattactttcccgtagttcttagtgggttctagctaagtggttgaaaacaaatttgtcaaaggatatatctgtcattcatttttattcaccaattttgcatatgttggaatttcattttcccrgtgcaggttaaaggtacaaggaaaaaacaatgtttttgtgtgttccaggagagattttacaatttattatcgtgtgcctttgtttatttagattttttagaaggaggtggtaagttttgtgagccacagaatgattaaaaaaatttttttaacttatgtggtttttatcagttacattgagttgggttattttatttctaattcatttgctgccaattatgttctaattctttgggaagtttttcataatttaaaagtttttcataatttaaaaggctgggcgtggtgagccacacctgtaatcccagcactttcagaggccgaggtgggagcatcgcttgagcccaggagtttgagactgacctgggcaacatagtgagattccatctctacaaaaaaaattaaaaattagttgggcatggtgacacatgcctgtagttccagctactcgggagactgaggtgggaggattgcttgagcccaggaggttgagggtatagtgaactatgtgacaccactgcactccagactgggcaagagagtaagaccctgtctctaaaaaaaagttgtctctagccttgaagggatttctctgaaaacaaattggttaaatataaatgttctagtctacaattgagaactctgatatactctgtgatcttataatgtttaaaattataaatgtttaaaaatgttttattcactttccacattatcttggctttttaaaattaaaaatagtctaacaggtacacgagactccatctcaaaaaaaaaatagtctaacaggtaatacacacccatggtttaacatttttttttttttttttatcttttcttttttttttctttttttattattattattatactttaagttttagggtacatgtgcacattgtgcaggttagttacatatgtatacatgtgccatgctggtgcgctgcacccactaacgtgtcatctagcattaggtatatctcccaatgctatccctcccccctcccccgaccccaccacagtccccagagtgtgatattccccttcctgtgtccatgtgatctcattgttcaattcccacctatgagtgagaatatgcggtgtttggttttttgttcttgcgatagtttactgagaatgatggtttccaatttcatccatgtccctacaaaggacatgaactcatcattttttatggctgcatagtattccatggtgtatatgtgccacattttcttaatccagtctatcattgttggacatttgggttggttccaagtctttgctattgtgaataatgccgcaataaacatacgtgtgcatgtgtctttatagcagcatgatttatagtcatttgggtatatacccagtaatgggatggctgggtcaaatggtatttctagttctagatccctgaggaatcgccacactgacttccacaatggttgaactagtttacagtcccaccaacagtgtaaaagtgttcctatttctccacatcctctccagcacctgttgtttcctgactttttaatgattgccattctaactggtgtgagatgatatctcatagtggttttgatttgcatttctctgatggccagtgatgatgagcattttttcatgtgttttttggctgcataaatgtcttcttttgagaagtgtctgttcatgtccttcgcccactttttgatggggttgtttgtttttttcttgtaaatttgtttgagttcattgtagattctggatattagccctttgtcagatgagtaggttgtgaaaattttctcccatgttgtaggttgcctgttcactctgatggtagtttcttttgctgtgcagaagctctttagtttaattagatcccatttgtcaattttggcttttgttgccattgcttttggtgttttggacatgaagtccttgcccacgcctatgtcctgaatggtaatgcctaggttttcttctagggtttttatggttttaggtctaacgtttaaatctttaatccatcttgaattgatttttgtataaggtgtaaggaagggatccagtttcagctttctacatatggctagccagttttcccagcaccatttattaaatagggaatcctttccccattgcttgtttttctcaggtttgtcaaagatcagatagttgtagatatgcggcataaaaatatggaacgcttcacgaatttgcgtgtcatccttgcgcaggggccatgctaatcttctctgtatcgttccaattttagtatatgtgctgccgaagcgagcaccccatggtttaacatttttaaagaacagaaaggaatacgcagaaaggtagtccctcctgggtctcctgaaagaaaccattatcaccattgtcttgagtttcctttgagtgatctgtatacatctaagtatataaacttttttctatttattatttatttatttttccgccaggaacactgtgctgaccatttttattttttttaaaaaactttagaatttatttttgaccagtgatatgtttttgggcaggagtgcaagctcagcctgctgctagctcagatcctgcgtcagccctgaaggctgttcagccagcgacaccaggaaggttgcgctgtattcacacaaaactgtcctcctggttggatgccatgctttgtttaataccagttggtttacctattaaaccaactttctaccacgaataaaaatctgtatagttaatttacagttaagcagtttttgtaaaactttccaaaaaaaaaaaaaaaaaaacttcctacaggaatggcagtgtttgaagagatgtgtttgaaaagaaccctgatttcacatgcaaacaaaggtgaacatttttctagataatgtctcattagtttagacactctaataatacttttgagtctcaaataacacactagtgagtctggatcatttagtgtgtaaacccccaagttaaagacttgcagaattaaaaatgatgatcccattcctccgaggcaccgaggtctggagtactaacttacgattttattaggtcatgttctaaattgtaatttttcatgcactcagtacggaacagaagggcactgaggggcaagatactctatatttatgttttgtgttatattcctctgtcctttaaacattttaaaccatgtgtattcaaactatttttaattacaaaagccacgataatatggaaagtgccaaaactttttaaaaagtgttagtacaggccgggcgcggtggctcacgcctgtaatcccagcactttgggaggccgaggcgggtggatcatgaggtcaggagatcgagaccatcctggctaacaaggtgaaaccccgtctctactaaaaatacaaaaaactagccgggcacagtggcgggcgcctgtagtcccagctactcgggaggctgaggcaggagaatggcgtgaacccgggaagcggagcttgcagtgagccgagattgcgccactgcagtccgcagtccggcctgggcgacagagcgagactccgtctcaaaaaaaaaaaaagtgttagtacattgtaagatcacagagtatatcaaaaccatcagttgtagactagaatattcatatttaacaaatttgcttatggacaaatccctcaactgctagagacagaacttttaaactaaagtgatttacacaattagaatggtatcctgaaatcattactgaaaaaatagtgtagcatgtcctttagaaagtcactacagatgtggccggggtgtggtggctcacacctgtaatcccaa

SEQ ID NO: 6892 - DNA, 51806 bp, Homo sapiens
gggagacaacctctgagcccgtggagtatcctgtctgataaaaacgttttcgtgtacctaaggccctgagctactgctgtatcagtttgatctctaggggactagagactgagtacctaaggtcagtcatggaggcactgtgtctacatgactgatccccaataaaaactctggacgtcaaggctcaggtgagcttccctaattggcagcacttcatacacctttgtcacacttcagtgctgggagaattaagcactgtgcatgtgtcagttgagagaggataactggccttcatcccatgtgctttgccttttgctgattttaatttgtatccgttcactataagaagctataaccatgagtatcacagcttttctgaatccttgagtttttctagtgcagccagcctgagattggtcttgggaactcctgacatatccacttactctatgctagcaatgtgtccttggtcatattatctaatcttatttagtttcagtttcttcacctataatatggggataataataataacatctcccttgtagtgaagttccagcacccagcctacactttattttctccacaagtataacttgagaattgctatagaaattataagaaagtgctatgtcagcacatagtggatgcttagcaaaagtctgtttccctaagcaatcccttttgtaagttctcatatttcccctctcccccaaccctaagatataattgttgagaccaggagatgtcatctcagctagtccaaggagatgtcctcttccaatcttttcacccttatggacaccattctctttttatcaattgtttgctttttccatttccatccaaaaattgttctctctgatgaagaagacaggaaaagtcagagctttgtttggcatttgtcttccatcacctttatcttattggccttaagcagtaaatctatctctttttccatcttttttaaaagttcagttttgttttattctactctctctgggatgttttcctattcccagatcaattggatgacagcttttctggccttactcctacacgtttgtgatggttcctggtattagttttttttttttaatctacccttcctttttcaaaaaaataaaaacatattctttacttaattttaagatttattttgttgctattacttttcctaattacaaaaggaatgtatggtcaaaatcaaaacattacagatatttgtactttagaaagtaaaattttctagaagcctacctctaaagatatcatatttcctttagactcttcagttcatagcgagttcttgtgcaaccagccactggtttctttaattaccttaccattttcttccctgttaggagaattttcaattgcataacagaagttatttttaaaagcgttccagctctctcaaatttcattatggaaatcatgaaaagatggatcatgttcatccttttctctggactttaaaactatgtctttctcaagtctacacacaggtttgagcatactcagctttctctccctggttttcaggaataccttttcgtgcttctttttttaaatgaaggacttggactatgcggtctaaaagcactcatcatttgctattttctctgattctaccatccacagaaagctgcacaggtgaacaacatttgaacaagcctttgtgaagaacagctttcccaggcatacatgcctgtgacagggatcagagaagtgccgcaggaatgcagccatgggggagctagtgacaaatttggagtagctaatttttgaatcttattaattaacgaccctttgaggtacatgggtggttgaaggcagcatggaagctggtctagaaaggtagaatcttattatatggctttaggtgatattattctctttgcctcagttccatatatgtaaaatgagataatggaaattgaagcccggtgtggtaagctacactggtgactcacatctattatttgatgtgttcagcactccacttttctgggaacaggcactaactcgctgttttagtcagggttctttcaagggacagaactaatagggtagatgtatatgaaggggagtgtattaaggagtattaactcacaggatcacaagctgaagtcccacaataggctgtctgcttggctgagacgcaaggaagccagtccgagtcccaaaacttcaaaagccgacagtggagccttcagtctgtggccagagatctgagaacacctggaaaaccactggtgtaagcccaagagcccaaaagccaaagaacatagagtctgatatttgagggcaggaggcatccagcacaggagaaagatgaagtctggaagactcagcaagtctgctcttccatcttctcctgcctgctttattctagctgtgctggcagctgattagatggggcccacccggatggaggtgggtcagcttctcccagcccactgactcaaatattaatctcctttggcaacagcctcacagacacacccaggagccatagtttgaatccttcaatccaagcaagttgacactcagtattaaccatcatagccgcctttatagaaatttcattcattcatttattcaacaatatttattggctgggcgctgtggctcatgtctgtaatcccagtactttgggaggctgaggcaggcagatcacctgaggtcaggagttcaagaccagcctggccaacatggtgaaaccccatctgtctctactaaaaataccaaaaaattagccaagtgtggtggcaggcacctgtaattccagctacttgggaggctgaggcaggataattgcttgaactcgggaggtggaggttgcagtgagcagagactgtgccattgcactccagcctgggcaacaagaacaaaactccgtctcaaaaaaacaaaacaaaacaaaacaaaacaacccagtacttattgagtgctatgtctgacactattctaggccctggagatatagcaatgaataaaacattcctgtctgcatgaagctgatattctgatagaaggcatcagacattaaacaaaattagtaaaatatgtggtatgtattagtccatctatgttactataaaagaatatctgagactgggtaatttataaagaaaagaagcttaattggctcacagttctgcaggttgtagaggaagcatggtgtgggcatctaattctggtgaggccctcaggaagcttccaatcatagcaggtgaatgggaagcaggcacgtcatgtggctgagagtaggagcaagagagcaagggcagggaggtcccagactcttaaacaaccagctctcacatgaactaactgagtgagaactcatttgtcaccaaggggttggtgctaaaccattcacgaggggtccactcctgtgacccaatcacctaccaccaggcccaacctccaacactgggagctaaaccattcacgaggggtccactcctgtgacccaatcacctaccaccaggcccaacctccaacactgggagctaaaccattcacgaggggtccactcctgtgacccaatcacctaccaccaggcccaacctccaacactgggagctaaaccattcacgaggggtccactcctgtgacccaatcacctaccaccaggcccaacctccaacactgggagctaaaccattcacgaggggtccactcctgtgacccaatcacctaccaccaggcccaacctccaacactgggagctaaaccattcacgaggggtccactcctgtgatccaatcacctaccaccaggcccaacctccaacactgggagctaaaccattcacgaggggtccactcctgtgatccaatcacctaccaccaggcccaacctccaacactgggagctaaaccattcatgaggggtccactcctgtgatccaatcacctaccaccaggcccaacctccaacactgggaatcacgtttcaacatgagatttggagggaaccaacatccgaatcattttcatggtatgtcaggtgagatgtgccatggaaaaaaataaagccagaaagttagctaggaaagtgccatggtagagggatagaaagagggaggtattatgttctgtaggtggtcaggagtgacttcatccagaagatttttggaattggatcaaaataggatggtttaaaacaaggatgtggaatgaagagttagaataaaaggcctgttagaaacaggaaagaggaataaagacacaagtgggccaggcgtgatggctcgtgcctgtaatcccagcactttgggaggccgaggcaggcggatcacctgaggttgggagttcatgaccagcctgaccaacatggagaaaccccgtccctactaaaaatacaaaattagctgggcatggtgccacatgcctgtaatcccacctactcaggagtctgaggcaggagaatcatttgaacccgggaggcggaggttgcagtgagctgagattgtgccactgcactccagcctgggcaacaagagtgaaactctgtctcaaaaaaaaaaaaaaaaaaagacacaagtgagtagcataaaagaaggatgtgcagctagagacagagaactttctaggttctgaatagtgtgtcagtgtatttctgataaatcttctccccctgtgcccccaagctggtatgaatcagttttctgttgaccaaagagcccaaactcatacatgtattggagcaaaaaaaacctgtgaattcaaggcctgcccaatgtgggagatgttgattaccttagaaaaacaaagcttggtgcttctgatcccaagaatgccgatataatagcagagtagcattaattttgttgtgtcctagcatcccagaaatcaaacatgcaagaaatatacatttcttcattttctttaaatcagattaactctggtcctacactgggctgatggaaaattcaaatataagcatcatatgttacccctagttctgttctccctctgcatccctcacccccagagccacaagagaaatagggaggcttgctgatgtccggacaattgggaaaaggcctctaatctccaagtgccttggagtcatccaagtcatcattgatcaagccttgcaaccttccctgcaagtccctggctctctgcttccatggcacaagaatagagaactctttcctgaggctaatggacaccatgctcctttgggtgcagtcatcccttctgaagtcacaacatctttgtggaaaaattaacatcttgaagcagggccaggtgtccactaatcctgtgatatgccaatcttttcagttagcttaggcttttataatagaccacaagagtaagtgacttccttctaggagtttcagctttccaccctgaaaaaactccctcaaagatttttttttccttttaataaattgttctgccatgtgtctgttgcacgaatgggtgcaagttcaaatgggaccccataactggtgattgtgagcagctaaggggcatcactaaaatactagatattaaagtccaagagtatgatgaggacaaagagtggttgtaaagaaacctaaaaaacaatgagggcaaactttatctgtctcacaatagttatgatagcatttaatgtttctggtgcagaagtaatttttctccactctgccttgtgctggaatcaaaacaatattcctcaatcttgttagggagtgaataacttttagggagaaggtctcaaatgggaagtggtttaaagtttatgaattgcaagaataccttttgatatctaaacaaagtgtactaaggaattcaacccacagaagagctgatattcaaaatcagaattattaaaaattgtagtggggtcagtgggggtttggggagggtgaacaggagtgcatgaagagcatcaaaataagcacaagtgatttaccattggcttggtttcttcggggaatttgaagaattcatacttatttatacgttttcaaatatttatttaagtgcctacaacatgtgaggcatttgggaatgtctcagttaacgtggtacataagttccttgctctaatagagctcacatttggatgtcttctaattctgaacctgaatgtaagagcacaatacaatcaatgaagcagtgagcccaggaagccatggatcttcacaagcctcaggaaaagtcaacatttaaaattttctrtttaaagtccaagggcacagcaagctcttggtctakatgggaaggccatggactacaattcccacaagtccgtgcgacctctccgttctgcgcagcttcgcggtatgaggaagagggtcctgtcaggcgcactcttsttgcatcatcagcgtgcacctccacgatgaaacaggtctgggctacaaaagtatggccgcttctgaggcggcggtggtgtcttcgccgtctttgaaaacagacacatcccctgtccttgaaactgcaggaacggtcgcagcaatggctgcgaccccgtcagcaagggctgcagccgcggtggttgcggccgcggccaggaccggatccgaagccagggtctccaaggccgctttggctaccaagctgctgtccttgagcggcgtgttcgccgtgcacaagcccaaagggcccacttcagccgagctgctgaatcggttgaaggagaagctgctggcaggtactgcagcccgggtggggaccaggctgaggcggtcgctgcgagaggggaagcacattaggctttttgcgacgctcgtgattcaagagacaaaaggaggggaaagggagactgaccattgaattagctctggacaggaatctcgggcatctcgggcttggacttgccctggcacgaactcttgtagcctacttggcagttgtagttctcaacgggaggaaaaaaatcccgtacttacacaataaaaccctgcccttgggcgtgcagacctgttttctgtaatctgatcgatccctcaggaggcttttgttgggttcatgtggatgaaccccaaaaggaagtactggttctgcacccctaaagttgcattcctcaaaatgtattggaaatgcagatatacttcgttaaccaagacttaatatagtcgttttcacattttaatgggcctaacaattacttagagtctcttgtacaaatacagattcctaatccctgccctgtccgagattgtgattcggagagttcggggtatttttaggaaactgcaattctaaatagttgctccaggtgattccagtgtaagtagtttatggaccacatttgaggaacactaaatataacttggccactaagctgagagtgttcattttattgattcgtttattcacgtacactgggaaaatastagaaaagcctaragaatcaccccgttaatcagctcggatgatttcacacataaagcatccaggatccttaagttcattggacatatacaataagccaggtctgtgctagcctatagagacttgaagatgaaagataactctcttaccttaactgagctgatagcctagtaatttctgcaccttgtggtggtaaaactagttagttaggttattcaaggccctccagagtttggccgtattctgtctcgccattaaaccagtaacagggactttcttacattgtttagtgtcccatggaaaactttacactttaaaaaaatgcaaaaacaaattattctgatgggaattataactgacagtacagatttaagtgtttatgggcaaataggtacactcctgcagatgtttaattccagtatcacgactacttattcttttattaaagttttgctttgttgcctgaaagtatgggtcatacagaggacgtcaaagtgaggaattgcatcaaggatatgtattgtggtatcatcatagttttttagttttccttcatagaactgctgctttcctgatttgttagctaaactctgggtttcttttcttttttttttttttttatccttaaggtaatgattaccattctttcagacaagtttctgacaaagccatattctggccttctggctaatctgcctctaagaactgaagtttcttgttgaatcttggttaaaatgtttcaaggctcttgctaggctagaacctttagctagagacattctcattatcctcgatttctatattgcttgtgattggcctattttgtatttatgttagttaggctagggctttccaaatgtcattgtaattggctgtcagaattgcttgggaagtttttgtttttgtttttgtttttgagatggagtttcgctgttgttgcccaggctggagtgcaatggcaagatctcggctcactgcaaccttcccctcctgggttcaagtgattctcctgcctcagcctcccaagtagctgggattacaggcatgcaccaccatgcccagctaattttgtatttttggtagagacggggtttctccatgttggtcaggctgggctcgaactcccgacctcaggtgatctgcccgcctcagcctcccaaaatgctgggattacaggcatgagccaccactcccggccttgggaaggttcttaaagatacctacattctaatgccatgtttgacaaccatgatcagtggttgtgtcctctaataccattccttgtctttctttgcattgattcctattatgctacaatctctactgtttgtctgttgggatccttcaaagccctaagtgtaccagaattttatagctagaaaataataaaaatccacgaatacttagttcagtggggtgaaccaaattccccactttatatagtagaggcagtaygtctgcaagttagaaggaggtatatttgggcacaaagggaagatagtatatttatggggccttcttactccaaggggtgtcaagttgaaaatgtaaagagttccccaaaaggtttctgttaatttatgagtgagagatccatgatggattgcaagtgacagatcaagggtttgaaactgaggtctggccttagaartttatgtcaaagcagacaaccatacccttctaagtatggtgatgtcataattagggaatgacgccagggtgttccagagaccatggttctgactcagtagagtggtaattttgttgggaggccgagccacccagcatatccttttggccatttaatctggcttctgcatttccactgttgctttgttttccctcctcccttctctgtccactcgtttcgttttctttgctttattttctttctgctcagtgtcagtgttgataaggaaggtttgatgggcttgggggcaggtatagatcaatgtagcagttcctgcttttctcttctttctcacttgaagtctaatagccaatactctctcagtatgttatatgccatcatcaaaaacaatttatatttatccagaaggaagcactggctctgtctccccaaagtactttcaagtaacattattttgcattatcttttttttttttttaaacaggacaggatctcactctgttgcccaggctggaatacagtggcacagtcttggcttactgcaacctctgcctcctgagctcaagcagtcctctcacctaagcctccccagtagcaaggactataggtgcacaccaccatgcccacctaatttttgtattttattttgggtagagacagggtttccctgtgttgcctagggtggtctcaaacttccaggttcaagtgatccacccatctcggcctcccaaagtgctgggattacaggcatgagccactgtgcccggctcactttatgtttacaacaggaatatgagataagccgggctggcatcctctttttaaaaatctaaatgyttaggaagttaaggtgcaacttaatcttagctgctttccacataacgttttgttgagattcgcttcctttgtttatttatttwtttttttttgagacggagtcttgctctgtcgcccaggctagagtgcagtggcgtgatcttggctcactgcaaactccgcctcccaggttcacaccattctcctgcctcagcctcctgagtagctgggactacaggcacccgccaccacgtccggctaattttttgtatttttagtagagacggtgtttcaccgtgttagccaggatggtctcaatctcctgacctcgtgatccgcccgcttcggcctctcaaagtgctgggattacaggtgtgagccacagcacccggcctagattcgcttctttaatgaattgaaaattttggttaggagaaggagacagcgaatgcagggagtttgggaatttagtgtatttagaagtagccctgcatgagatgtactcgcaatgttaggtagctggagatagcagcaaagaccatggaagagattcagaaatggaaattgaggacttttaaaagtatctttctatataaaaattaacttcttttcatgattctctatctaacagcccaccactaccaagaatttactagatttttgcgggttagcttggatatttacccaccttttaaaaatgccgtttttctcttagagaatgaattctactgtcttgatagctgattttggaatactctttctttataatttagggaatgtccattttaaaatcttttctttgctagtaatgaggtcatagtctcttaacatgtaaagtttgtataatactttttgtttgttttgaaaatgccatccccttttcctcccaagtttatgaagatcctacttyatttgtcttggtgatcaccttttttcatccccatttctctcatagaagctggaatgccttctccagmatggaccaagaggaaaaagcagactttgaaaattgggcatggagggactctagacagcgcagcccgaggagttctgggtaagagatatgaaaggcagttaagtgtccactgtcacttaatatcagaaagaaacactggttgagaacagatagattgactaaagccttctatttttcagtcattttggaatgtttcagatctactggatatatatagtgccatcttttaaagaagcccttaaatggtasaaggcctacaaggctgttagaaatagctacttttatgtgtggwtgggactttgaaaaaaggtttctctctgtgcagaaaagagttaacatagcaggcctgaaattactatctttagaaaggcttgcttggacagcttgcccttggttggtatctgggaacttggattttgggagtgttcccacccttctctgtctgataaggctggttggctgtgcctcagatgttctgagaacaccagctttccttctaggaatctggaattttgttccactgctaaggcagagggtgcctgagtgatcatcctgtcaaatccccaataaaagctttgggcactggggccgggtgcagtggctcatgcctgtaatcagcactttgggaggctgaggcgcgtggatcacaaggtcaggaattcgagacgagcctgaccaacatggtgaaaccctgtctcttctaaaaatacaaaaattggctgggtgtggtggcatgtgcctgtaatcccagctacttgggaggctgaggcagaagaatcacttgaacctgggaggcagagtgttcagtgagccgagatcgcaccactgcactccagcctgggcgacagagggagactgtctcaaaacaaaacaaaacaaaacaaaacacagctttgggcactgagtttctaatgagcttccctgagagaaacattgcacatgtgttaccgctttttttgttgttggagaaagcagcacgcttgagcatcccctcacaggagggagagaggataaggaagcttgtgcccagatttctctgtgtctttttctcttatggtccagctgtgtattcttactacatcactgtaaaattctgagctatatatcaatcttcgaatgtgggctggtcttggggattcctgacaaggtagaaggctctgtttgtctgcctatctctaatctaatctctgagatcaactctcttgagaaggggaagcttgagagtaagtcattttcggctggagatgtattagttgaccgttttattgcttgtgaaggaaaattggtagaattgatcgaagggaataaaaatattttatccttttttattccatcttttttttttttttttttttttgcacctggtagagattctgaagtccaacttaatggactgctaaagtgtgtatacacaggctagggtatattttactctgtaactgcatccttagtcacagaactacctacatacattgggatccctctcagtgcccccttcccgacatatgagaaacaaacttttatggaacaatacttatctttttacatgctctggtattttatattttattcagtttcatttagagcaaaaattaggtacaaagaaacaacagcaaaccttgatctaagctatccaaagtaaatgagcgcttatttaaaaggataaaatcggtgaagaaaatagtatgcttcaagaacattatatactgtatgattttgtattttctaaaattatagatttatgttggcaataatatttttacttgaggttaaaatagaaaaaatcagttcgagaccaatctggccaacatggtgagaccctgtctctactaaaaatacaaaaattagccgggcatggtggcatgtgcctgtaatgccagctactcgggaggctgaggcaggagaatcacttgaacccaggagacagaggttgcagtgatctgagatcgcgccactgcactccagcctgggtgacaagagtgaaactcttgtctcagtaaataaataaataaacaaacataaaatagaaaaaaatcaggctgggcacagtgactcatgcctataatcccagtactttgggaggccgaggtaggtggattgcttgagcccaagagtccaagaccagcttagacaatgtggcgaaaccccatctctataaaaaattaaaaaattagctgggtgtggtgacacatacctatagtcccagctacttgggaggctgaggtgggaggatcactggagcctgggaagttgaggctgcagtgatctgtgattgcaccactgcaccccaaaaaaacaagcacaacaaaacaaaaaccccagttaataataacaagcatttattgagcatttactgtatataaggtcttcagttttgggtattcataagttctatagtttaattctcattgtaacctataagagaggttattactatccccattttacagaagaagaaaggaagaccctgagagataaagtaacatgttcactgtcatagaattagtgagtgacaaagtcaggatttgagcccagatctgctcagttccaaatcatctgccctattgtggatggcagatacctggtgctcctgcttttgttcctcatgccctgtgctcttggcagaaattagggcttcatgattcttaccagcttagcacttcagtagcctataccagttgattagagttggcctttgagttgaagcctgtgtttctaacccttctgctttactgttttccaggcatggcaccacaaatacaaggaaagagaggatcagatcagttgcttgtttacgaatagatcaattctattaatttcgggtggcggttcttcattggcatgcagaaaatagtgatattcaaggcagtgaatgaaagtttagtttttaccctgaacctaaggctagcttgtccaacctttggcctgtgggctgcacgtggcctagggcagctttgaatgcagccctacacaaatctgtaaactttcttaaaacatcatgagtttttttgtgatttttattttttttaagctcatcagctatcgttagtgtattatgtgtgtggcccaagacaattcttctttcattgtgacccagggaagccaaaagattggacactcttggcctaagggatcttgttgaagcttccattttagtattgtgaaggggctgagatttgtatgcgtggaagaaattgtattggaaacagttttctggttggaggctcaatttatatttgatcacacagggaattttatgatgatataatatgttcatatgtcagatgtattaatttttcttttaatgcatgtgatttccgaggagagagaaagtttaaaaaattgtaggtgtttagtcacagagtaagggatgtttgttgtccaagttagcagttctggaaacttatgagaagtcgatttttgattgtgtgataaaataaacactgaactctaatcatacttcggtttgtacactggctactggctgctttagttactaactgtatacatcctaagaaaatctcgtaacttcactgaacgtgtcttcatctcttaaaagaagataacgtctaccaaaactaagtcaaaaggttttcaaaaatattttacaaaatacctatagtatatagatatatactttatcctgtgaagtgctgtatacaggtcttttttatttttatttatttatttttttgagatgagtcttgctcttgttgtccaggcttgagtgcggtggcgtgatctcagctcactgcaacctccacctcccaaattcaactgattctcctgcttcagcctcctgactagctgggattataggcgactgccaccatgccctgctaatttttgtatttttagtagagtcagggtttcatcatgttgaccagggtggtgttggactcctgatctcaagtgatctgcccacctctgcctcccaaagtgctgggattacaggtgtgagccaccatgcccggccaaaaggtcttttttgaaacaaacaaacaaacaaacaaaactaaaactggacctgtgcaaaaaaaatatacttttactttcaacatttttttttgcartattaatggtgcagattaagaatttagctgacaatttaagattataacctgaaattcaggtttataattctatagcataattgctagagggttcacaagtttctcaaaaatacgtggtaggcaaaataatggccctctaaaggtgtctgtgtcctaatttccataacctgtgaatatattaggttacatcacaaggaacattagggttgtagatggaattgatgttgctaatcagctgactttaagatagattatcctggaatttccaagtggacccaatgtaatcayaatattctttaaaagtggaagaggaggcagaagagagagtcagaggagatgtggcagtggaagcagaggttggagtaatgtggttgctggctttgaagagtgaaggggatcacaagccaaagaatgggggcagcctctaaaagctggaggaggcaaaaaaaaaaaggtcctctacrgaggctctagtgaaggattctcccctagcacctccagagaagaacacggtcaagccaaccctttgattttaagcctagttaaacctgtttcaggcttctcacctccccaactatgtgataaaaagtttgtattgttttaagacagattggtaatttgttaacagtagcaataggaaaggaatacacctatttatcataaatcacttaaaatgtaaataaaatttctatataccatttcaaaaaaatttttttaactttagaggttatagaaacagtgagaaaatttagaaaatacaagaaagttgcaaataaaaaattatccattttccacctttcatcaatagtcagttaacatttttgccatatttccttgtagctttttgtctatgcagatttttaaagttgagatctacttcactgtgtatacttatatatccatttttttaaacttaacattgtaacataaacattgttcatgttgataagctctttgtaaactttatttttaatggctataaaatgttccatcatatggctaaaataccatttattaaccatttccctatttgaggtcactgaggttatcaccagagttttgtcagaactgattttgtgagagatgtctttatagatagaactttttgtttgttttgtttttagtttttacccacacatctgtatcagccagatgtttcagattcttaaaatagattcctacgattggaaagatacaggtcttgtaagatgatcctacagaaagctggaaatacatgtatagagtccatgcctgtcctaaagagactctcatcataaacaaattctatctttttgatttgagaatgggatactaggacattggataagtttggagatagttatttttgtttttgtttttttaacggaaaagacatttgagtgagcayagaacacttgggagatagagtaggagagtagtaattgtgcaacagtgcatggaaaaccccgttattcatctgctctctaaattctccacaccttttcaaatgtggtgcctttgctcatgtttttcttttataagctgctcatctctctcagcacctttggttgtagaagtcctactgacctttccaggttcagctgaaatgccatttcctacctttgaagcctgcctgctgctcttctatactgctaatgtaaaatttcattttgttcttttagtttttgttaatatctgtctccctattatattgttaaatcacagctgaagccaggtcttatttatttctgtacctacacaataagtactggatacaattttgaatgattgaagggaaaaaatgccgagtaaaaattctgtccgggaaactaacctgtgaatgaaaagctgctggttggctaggtcccaactccagataatttttctatatgccaccaccatattagtcttcctaaaattctgctttcactaatcacctcacttcaatggcatttggttattcttaggttaaaatgagaggattaagctgggtaactctaagatggcttcttttaaattttatccttctgggtcactaaactagctcagaaaccatcatgagttcagtatttcagccatgttaaagtcaaacatgtcagtctgcttctaagacaccctgtgttcagttgataaacctactgttctcatccttgtatctgagagtttgtgcaattattttcttttttagaacatgcttctcttctctctgttgtgttccctatacatccttcaaaggcctaatacaaactccgaaatgcttgaatgaagcattctccggcctctttagccgtttaggatgctcccacctttgccctgctttggcagcggttctctctctgttcatttgacacttaatcatatactatcatattgttatttagcattattcactcattaggcaacatttcttgagcactgtgatttttctgtattttattttcctgatgagattataagctgtttcagagttaggaaatgtgtcacaggtttctttgtttttccattggaagtattcctcttgggattatgtgcatagtagttgttcaagaaaaattgattggagatttatttgaatggaatcaagtcgcattgaatctttcctgtttgcctcatcagcagcagtatctacaagttctgtcatttgaagagtattatgctcttcagaggattactgaggacagactgtttttgatcttagaccttgaactatatgacttagaaggacaatacagatgagtgtcatagargttttgaggaggttggaatagactttatgaatgagttggggcttgagctgggcttcaaaggattgactttgaatactttaataaggagttggtgctgtaggcactgggaccctactaaggattgtttggggggctttgtaatgtgaaaaatagggtttcagaaatggttatgaagtggtatgaattggaagaggaagggataggatgtagaaccgtcaggtttgcagggatgtaggctggttgcagtgaggagaaagcctaggtgagttaaggtggcagagggaatggaaaggaaggggggtctgttcttagaccatttggtttgaatcttaactctaccaggtactggttgtgagatgctggacaaagttcttagtctcttattcctgtttcctcatctatcaacaggggtaattatactatcttttaaagtttttttttttttttttttgagacagagttttgctcttgtcacccaggctggagtgcaatggtgtgatcttggctcaccgcaacctctgcctcttgggttcaagcgattctcctgccttagcctcccaagtagctgggattacaggcatgcgccaccatacctggctaattttgtatttttagtagagacggggtttctccatgttggtcaggtgggtcttgaactcgtgacctcaggtgatccgcccgcctcaacctcccaaaatgctgggattacaggcgtgagccaacacacctggccttttaaagttgttataaggattaaatgggataatgaaaggagagcatttagagtagaatctgatacatggtaaactcactgaatggtatttgctgtaaatattggagatattttttctagtttgccaatcagtagtccttgtttactcttataattctgaattgtggtgattgtattgtgttcttatgcacagttatatctgttgatgacaaatatttctatacttacaaaaatgtggcttcttaacaaaaagagaagtgactaaatcctctcaccctcaccaagtgaaatgtgttgacgtatgaataatgtttgaaatttaagagaaaggtaggccattgttgtactttgggctctgtaaatacattcttcagccttcattttaccttgtattctttgtgttagactgatttgttatgtttctcttttcttgattgtatatactgctgggtgctaatcatctttaaatggttcattagctgtgataatggcttttgctttgtttaataatgaattctgtcaaaagactttatcatacccacttgaacatggttaattgtgccgtgtgtttttcactggtgcccatataaaattccagtgcgtcctttgagattgttctaaggcttcattgtctaattggctgggttaaggtttctactgagtttaatactttgagaatggggagaaaggtcttctcttgtcccttctttagaatttcttagttgcatgacaagttcaactgtttggagtartaggagccctaacattttgctaaatatctgttctttcccacttcacattacctaagctgggaaattatgaccaaaaaatatagctattttaaaaacctagttttcagaacagagtgtcataatatttctttctttgatttgtagttgttggaattggaagcggaacaaaaatgttgaccagtatgttgtcagggtccaaggtaagaatactgaaatagttctatttttctttaatgttcytaatgatctacatgtattgggtttttatcaaataaaaaataaactgagtaaactgcatgaatgggtatcattcctgagtattaattatgtctataaacatatctgagattgaaaatatcgagactgaaaattggaaattcttaattgaaaaaccaattagacttaaagaaacaatgctacagtgctcatcatttaacaaaattatatttagacttttaaaacatcatatttcttagatgattgggacttagaggtcataaactctagtgacagacttttttaaaccttggaatttttatagaaacaataccattttgtaaactgtgccctttgagcaaaaatatgctttgttcaatggttataaatgtttattaaagaaaagagtagggcctctttaagatgataaagtatgttcatatatgagagtaaccttgaatagatccaaaagcacttttccaggcacttgatagaagagagaargggttatttggaggcaggagaggctggaaagctgtgaactgctggtagaaggggtctcttccatctctcaaagagagagtaatatctgtatcctaatgagtaattaggtgctggttataagtgctgggactaagggtcaatgaaaatgcacgtggaaggaagcttagtatgccaagaggtagcgaaaaatttcattatgttcctggaataaactttgttttaaaactcttgctctaaatgtgatataaattgttgataaaatgatttttgtttctttaaaaaaatctgttgtcaaagaccatttaaaaaacaatttccagttcattgcagactgattgatgacttttgtaaaatataattaaaatacggcaatgtaaaattgctaaataagtttctacgcaatctcattttctgaacttattatagataactggcctgtggaaaacacttgacgtagtagtggtttaagtattaaaataaaagccctgaccgagcgtggtgtctcatgcctgtaatcctaatactttggaaggccgaggcgggcagatcacttgaggtcaggatttcgagaccagcctggccaacatggtgaaacccatctctgttaaaaataccaaaaaaagtatccaggcgtggtgctatacacctttaataccagctactcggtagactgaggcaggagaatcacttgaacccaggaggcggaggttgcagtgagccaagatcacgccattgcacgccagcgtgggtgacagagtgagatgactccatctcaataaataataagtaaggtaggtaggtaggtaggtagataggtagataggtaggtaggtaggtaggtagatagatacatagatacatagattgattgattgattgatcgattgattttaaaaagccycggagaacatattgcatgtgatgtctcattttggttatcaactggcataaaaatctgtgccattcaattggaaggaatcttagtgcctctgataaatgaaaagcttcagtgtggcttgctctgtaatcttcaaaatattggtgttgaaaaattacagagtataaaaattgcattagaatgaaggtgtttgacagtttctcagtaaatttttatactgtgcttactgacacatagagtttagaatctgtttctgatactggtttttgccagttgtttaatatttgtttctgaactcccaaagatgaacaatgtttactttaatatgggattatggatgatttttttttcacattatttggtattttctaaaatctatacaataaacaagtcacttttatgttaataataaaaaagatatatttacgttaaggaatttgtttgggtttttttaccaagataaaatatgttgagttcattgagatattcgttgttcacccctcctcccccaaaccacaaacacagcacactatatattactgaaagattttacttgtaaatttcaggcatattttcagaaatattatgactgaaaatgtaaatacatcattgactctggtataaattttgtaacagccaatttgctgttcagctacgaaagctgaatgtcatacagtgaaatcactgatcctcaaaatgactgtaacataaatagaataccacaggcacgtcttgttacagaaacctagttcttaggtatttcaaaaataggcatcgttgtcttgttagctatttatatttcttatccttttaattttatgtacatgttaaaagaactaaatcattaagagtttaatgttgaagattattttttaataaaaagtagttaaaaactgttaataaatattttttctttttttaaaagcactagaaggaatcttagagatcatcttatctagtgactttcaaaatttttttgactaagacccatagtaagaaacatattttatgtaatgaccatatagatacatacatttaygaaaaggaaaaattttatcaaacaactttgtgttagtctgtttgtgttgctgtaaaggagtagtcgaggctgggtaatttataaagaaaagaggttcatttggctcatggttctgaagtctgtacaagaaacaaggtactggtatctgcttctggtgagggcctctggaagcttacacttgtggccatgtcgcatggtgagagagggagtgacagagagagaggcggaggtgccaggctcttttaaacagccagatctcgcgtgaactcattgcagggagggcaccaagcaattaatgcaggatccgccctcataacccagacaattcccaccatgccccacctccaacactggggattatatttcaacatgagatttggagggggcagacatccaaactttatccaactctaaccctatgtatgatgtattcttgatacttttccttctatttcattaaaaaaaaaaatgtggctgcagccccctaacttggcccagatctaatgtccactttttcttcacttcctattttgacagatgaatttttatttgcatcacagtgcaactagaaaaattagacttctggtatgtgtaggatggagttacgtcaagagtagaaatatttagttctaggatggcaaatattcagtgttcttgttacagccatattacagaacagccttctctccctagccagtcgtaattggagatattgctaattgaacatggcctaacatttcttcttgctgaatcaagaaacacccttagaatcttcttcaacatggtgccacttcatacaactactgtcacttactagatgaaattctggcttttaagtaaaatctttaggccatcacattattttgcttccatctatgaagactagacactaatcagaccacccaaatcatttcttgcatttcctcccattcagatcagggtaaaagttaagaaaagagccactgctctgtgttcctcattgtcttcctctcctgccttggagtgagctttgttctgccagtgatcatatttctcaagtctttttttttttccctgtgcctgatcatttaggattatgtgtataatgtgtgtgaaaagcatgtgaactttttgtacagtgccttgtgtatggaaattgctcattaaatactgttattactattcccaagtattttacttatccccaagtctctctcttgaggtccaggcctgttggagctttctagccacatgttctgtagacacctgaaattaattttactcaggcaagttctgttggaactcttgaatacagttaatttctttttttttttttcatggctatctgtgattgctggtgatgtaggcaaaatattgcactcatcagaaagagaaagcatgccagttctttaagggagagacagactttccttggacattaaagccagaaagaagtttctgacaataagagatattaaatgacagatagatggtgattttcaaaaatagttttacaacagatgtagaaatggagctacataaaatacagtttaggtaaaattctgagaggttaggctgatgtgttcctttggcctaagttgatctaagtataaaatgttgcttacctagaggagggcaaatagcccctcttatatcttccctaaattacactttctttgagccagtcattcagcaaaagctggatagcagatgtcgtactttgaaggaacagacagaaggaacagaagaaaacagatgaggttttggagtgctgtctttattagttttctatattgttgatcaaagttggttactttataaatgctttagaaaccagatggaaaggttatgaaaacctgaataatctaactagcatgtccagatataaaggtacctccatatctctgtgcaggtaaaccatagtggcacctgcaggcaaagccagcatctcctcagaaggcaactttgtatccccctccagtagttaaacaagtgtcatcattggagtgaatgaagtttccccttcttggtgtggtcaaaggatagtaactttccccaagaacacagtaacatttttaggttaaccagttatgagaactctaaagtgtggcttgagtaatgctcctatgaaacttagccaactcttgaagatttcagcatttctaatcagttttctccagaggctagtccagtttgtaccttttctatatacgctattaattttcatatatttcataaatactgtattgaaaattttaaagggcttatacttatgaactataaaaaaggactgttccttcttaatgaagacattcaaagccacatgtttttggtttgataggttttttaaaaagtgwtctttctcatcctcagtaatatccctattttgtttgtgaaggtttaaatcacaagctttcaaaatcacacctcagttgagatccaaggaaatgattgtgtgtatactttctgtagtagaaacatttttctttctcctaaacagaacagaagctgatttgctgctagagatgtctagctaatacctgctgtggggtttagggagcttgacgatgagtaaagtagagagtagaataataccagtgagaaactgtgagtcccagagagtacacaggtcaatggaatgttcttcaggacctctcttttgttgcagtagaattacattgtaatgaatacagtagtagaattcacggttcccaggtatacgtcttggagaattaacaactccaaagcacagactctacgtagaatttaagccagtgaaaagaaatattttagactccataagataaaatgttagggttgaatgtgtgtatctccatgtcttttttcttctatcccaatatctttttggtcgtgaggctttgtttcagctgaaggcttaactgtgtgggtgaatttttctaaatggtttgtggataattgaataaaattgaaggataattataactagatgccaggacaagggaaagctaggagacagctgatttcaatcatcggttcgcagggtgtggtctaaggactcctgagactctttcagggtgtctgttgaaattgaaactattttcatagttttgcctttttaacttgcaatcccacaaatacatggtagagtttttcagagattactagatgtgcaatgacatcattgctctgatggctaatggaagttttaaacatttttcagctttaatttctaatacaataaatctaggcagatataacatgtttttaaaaaatgtgtgccagggtttctcaataagttttaagtgtgtataggagttctgaaagcaaaatgtttgagaacattttgatttgatttgatttgagaatgttgatttagatattgtctcccctaaaaagaatccagcacgtagctacatacaatataattgcagaccctggagtgggttgagacttagcagatgaaatctagatattcaaaactatggtgaaatgtgaagaattgcacacataggcacttctctagcatgtgtatcattctgtcagcaactttttattaagctgctactgtgtttctatctaggaaagaacacaatagatgagcaatgggaaactctagctgagagttcatacttgcagaaagtaaggatcaataaagtatacttggaaaacagtgaatatctctgtaggtcatcatgtgctaagatgtgtgatatgtgtgatatgagagctcagtgagataaaccagacatgtctgttgttgccattatatccagtcctctctgcagtagttgtgtttattgaagttttcctgttacactgtaacctcttagagggagagcaatctatcttatgtatctgtgtatccttccctagcacttaggagaatactttggacattcatagtccttaagaaacatgatcgaatttgtggatttgatatatgccttccttctttctatgtatggaatttgtatcgagcacctactcttagtcatgctgtggaggtgggtaaatggaagttgggatggattaaggggtggctttgaaagctgaataaggtttgatccttagagaagagtgggagttcaaggccagggaagtggcatatgtgccccaggtgcacaaaacaccaagagtccagagactagaatgggcattgcatacttgggaaacatgttaaggttcctagttcaaactcgttgcagagcagaatactgcagatacattcaaggcatagtctgcaagattgcaccatggttttcttatgcaactaaacagactctaaagacaaaaaaatcataaagcattttgatgctttgctttccttatgggagctgacygtaaccagatgagtcaactctagccactgttaactgcgaatcattctgtattttctttcttagaaaataaagatgatgatggtattattatctgttatttaccagggctagatattgttactctaaactctttgcttcttctcatgaggcattattgttttccacattttaagataaggaaattaagctccagccggaaagactaacttggtctacaaattgtggtacagtcagaattcaaatccagccagttgaccctgagcctgtgctgttaccattgttgtacttctctcatacttccccctgtggtatgcttagtcgaggttgattgtcccaaaatatagaagcaggaatgggtgtctcaggtgatgagactgtgtttagttacaaaaaactaatttttgtcaatacctatgaaactttaaaaaaattaattgaaatgcgttggaatattcccttctgtattatatttatttttaaaaaatctgagctagataatattaaggtgatttcatcgaagggccttaagctgttataaaatgtctgcatacttacaaggttttgaagttttaatatttttctcatttttgtcttgggtcccttcactagcctcataaatttgtcatgaataagcttatatttctgcaaagtactttgagttttcttttataaaattgctcacataaatacagattattttcagtgggaaataaagttcttgcacttttttcactacttcatgtgatgccccaaataaaatttgcgtttgaccaaagtgaaaagagtacstactacaagtgtgtcctaagatgagaaataagacaatcctcacgtaactaagaatgatctaattcttcacttgtgaataaagatcagttcttagaaacgattcttgttcctgagatcttaagtagtaatttatctttattaagaaaacacatggccgggcgtggtggctcacgcctgtaatcctagcactttggctttgggaggccgaggtgggtggatcacctgaggtcagaagttcgagaccagcctgacaacatggtgaaaccccatctctactaaaaatacaaaaaattagccgggcgtggtggcgggtgcctgtaatcccagctactccacagggtgaggcaggagaatcgcttgaacccgggggacggaggttgcagtgagccgagatcgcaccactgcactgcagcctgggcagcgagcaaaactccatctcaaacaaacaaacaaacaaaaaacacatttaatagttaagtcactaattctgtgactatactggttttgctctttttctacagatttagcttttgtttaatacatgacctagttactaagaattgtcttagtatttcatgtaagaagtactaagttggcttatttaaaattaattttaattgtatatgtgggaagattattgaatcttatgatgaccatggagtcaaggctattgtaccattctctctactcatggatagacttgaacattttccttaaacaaacttctcagtataaaggtggtttgagaaatttgcttacaataataatggtcataattattaagccataattatcaataaaatcaggtttatctttctcatattggctagtgtgagacgtttgttaatgttcttcagtttacacaattgctttccacatattaaaaacaaaacaattgcagtctgttgttttagcctgtattttgtatcaggttggtagtagtagtgaaattctgtgtaaacttcaagacatgcataacagtttttgtttgcctcacggcccattttctctcttgtttcccttcctctagagatatactgccaytggagaactggggaaagctactgatacactagattctacggggarggtaacagaagaaaaaccttacggtatgaagctcatctaatgtaggcctcttttctaacatttaggaaaagtttctgtgcaggtagcattttaaaacaaatctctgatattatcagccattttaattctcagtgtgtttctttgggctaagaagattggaaattgtttatcgcattgttgcttacttgataggagtttttgaataaagatttattgtgattgcctctttttctatagtgatgttttaagtgttcagaattattcttccaaataacctccttgcaaaagcatgtatggctaggatttaggttattttccctagtaaacgagaaacaaagcagagatactctgttagatttcatctgtcttgccattaaaaaaaaatatattacctgtcagctgttgaaataaatgtaccaggtttagtactttaaaacttgtcatgtttttgtgctttcggactatgtaaaaagaggacagagggcaagctatttctctggaagtaaaccagaactcactggggcccaccttaagtttcctactatcccttctttcactaccgtaaggaagaatagataaattaaatggtctcctagcaactctcacagtgcttatgctgtttataatgcagcaattgcagttttctaagtcagttcacctgcatcattatgtcaccaatttgtggactgtttttttgtttagtgttatctcttagtcataggcaagccagcatttggcccccttatatttttgtgttgattatccttattacgtactgcatattgccccagtagtgaggccaacctttttattgttcataatagcttcattttttctgttaacatttatatgtagcttagtatcttgctcaattaatcaagcaacataatgaaaagaaaaattactgattgatttcaaggcttttcaaaaacagatgttgaaatattcttggaattattattattaataaataatagcagaccctcacttaactgaaagccagctataaccttcaaccagaagactttaagattaaggaggcatagggcaataggaggacgtcagagacttccagaggatactaaagtatttataagtacttatgtaattaagtctcctgtatctctgactccatttaccaaaccataataaggagaatgattattattcagaacagtagtcctggggtaatataattaaggctggggggtgtgggtaccacgtggtgaaaaatataaggcgcactagagtagacaaatctgggtttaatttctagctctgcccttatctagctgcgcaaatttgaaattttcttagtctctttatgttgtagtttttccatctccaaaatgacaataatgatagcaacctcatagtgtgattatgaggattgattggaggagaatgaatttggaggtctcatagacaagtcatgaggctcttatagtagtccaagcagagatgatggtaagttggaccagggtgccagtggtagagacagagttttcctattagaaaaatttcccatgattaggaagtaaaattagcaagacttgatttttagttgattggacaggatagcgaggaagttgtcaaccatgacctaggttttggggttttaaaattggttacatgatagtgtaattcattgaggatgctggaaggggcccagggtgacaaaaatacttaaacatatcctttcttcctattcttaagcattttagtattttaaaaagctctatgctgtattaggtaatttgtaaccttatttacttaccttaaagaaagctcagtttgttaaatcatctcattgtaatgatgcagtaaatcatagagaaactaagaacgtttttcaggctgtgaagagaagagcttcctacagtttattgaatagtatttatagtcccggaaaatgagagctcagagaattttgctgattggcatgatttttctgtgtgctttcagtaaatcaacaaatattttttatttgttgaagctgctatagcaggtaccaagggaaagatagataaatgtaagacctagcttgtgtccttaaggaacttactgtctaatggagaactctgaccaatattctcagccttctgagacctaatacagagacctatgaccaatatcttataatgccttctttactatcctgaaataaaattcagagatacttgaatttacttatacattgagaaaaatcaatatgatgtagtaaatggaatataagtaagaaataaaagtaatttatartaaagtaggtgcattcatatgtaagcacacagatattagcagactaaaagtcttttggctggggtgcagtggtgcactcttggctcactgtaacctctgcttcctgggttcaagtgattcttctgcctcagcctcctgagtagctgggactacaggcatgcaccaccatgcctgactattttttgcatttttagtagaggcagggtttcactttgttggccaggctggtcttgaactcctgatcagcactcaaacatacagcataattgtaaatagtgaaaaatgctatttaggaataatagagtgttatgatagagaacaaagggaaaggccctgttacatgctttgatgtttgagtctaagccagagactcattttcttattcctctgagctagctttcagctgtctgaaataacagttaaaaatagtatttgtctagataggacaaaatgacttaagaacattaatttgccattgactgcatactgagttactttagccaacatcagttgttcttgacaggtcaattaaaaactgtgtttctagttgttacaatgactgggtggggtggtgacaccagctgccttcagtgggtggagaccagggatgacagatgtcctgtaacacagaggatcgtagaacacaatgaagaattgtcctgtgtactgtcagacttcaggatgtctgccagatagtcatgcaggtgtatttcagccatgaggctgaaaccatgtctcttttggtcctcagtagtgtatttttggtgtggtatacggcatacagaatgacatatatgacatayagagtttgaatcaaaaaagataggcagcagaggcattctcagaaaagatgactgcagataagccgggaaaggcaaagcatcttcctgccttctgctgctgtcttctcatccacatctaggtattaagtgtctgctactattgccagtgtctctgaggacacacagcttcagtgtgctcatctgttctccgctgagctaaggacactaagaccatagcttcccaggctakatgtggaccaagcatccgggaaggcctaactgtccctgtactgggagtagttttttctgtccctcccatgagtcaacaaaggtagaaagaaaagtggaatctcatgctaatcttttattctaaacaccaccaccccttagtcctgagatcagatgttaccaaggtcttctcaaatggacgtagctgatgttgtatctaatggtactgtctcctcttggactgtatatggtttggctgctgagacttatcctggagtaagctcaagagttgaatttagtttcaaattgtgatatgaaccaatagggtatatgctataattggactagtgtgtagctgggtataaaaattcttacaaagctgtttgcatttaaacttttcattataaaatgtacaagtaaagaaaactgaacaaaaaataaaggtacagctctatcaatttgcacaagacaaatatctgtagctagctatcacccttagtcaagaaatagaagattgctagaaaccacacttgtgccctatctgtcattaccctgtcctccttttgcaaagataactactgttctaacatccaatgctatggagatggttttaaaactaaggcatagttttgcctgtttttgaatttagtataaatggaattaaacactatgtgtcctttggtgtctaaattcttccacttattatatttttgagatccatgttggtacatgtatgagtattttggacttttttgttgctatgtagtatgccactgtgtgaatatactacacacatactctcccagtttggggctttgtgaataaagtgctgtgtatattttatacctgccttttggtagacacatttctaccgtcatttcttttgggtatatacccaagtggaatataggtcgtgtgtgtgtgtgtgtgtgtgtgtgcgtgtgcacgtgtgtgcctgcatgtgttcctgggttatagagtgggtgtatatttaactgtactggaaattgtcaaacagttgtccaaagtgattgtacttggaaaactttgcatttccactaggagtgcataagcattccacttgccmcacatacttagctattaatagtgtttttaattttggctgttctggtgagtgtgtagtgataattccattgtggttttaatttgattattgatgagattyggcaccttattaagtgtttttggcttattagccatcttcttttttgtattgtctgttcaggtctcttacccattttttgttttttctttcccttttgagttgcctttttcttatacatttgtatgagtttttgttttttattaagcaccttccattcgaggatgcataggttctttatatagtctggatatgttctcttcttttgcctatgtgtgttgcagatattttctcttactttgtggcttgcctttttcctctcttgtcttttgaaaaacacaagttcttagttttaatttagtccagcttatcaggccttctcctttatggttggtccttttggtgtcctgtttaagaaaacttttttgactctaaaagtgtgaagatattttcctatgttctagaagctgttattgctttgcctttcatgttccctctgcaatccaccttttcttcctgcatggatgtccagttgcttcagcactttcccagtactcttgtgttctcttctttattacacatcaagcacccacttaggctattgtttaaaaaaaaatctatttttttacattgatcagtttgtttatacttgtatatacaccagactatattaattgctgtagttttagactatctggatatctggaagaacaagtccttcctgctttatttcttatagatttttttctataggttttttttttttttttttgagacggagtcttgctctgtcgccaggctggagtgcagtagcacaatcttggcttactgcaagctccgcctcccgggttcatgccattctcctgcctcagcctcccaagtagctgggactacaggtgccagccaccacgcctggctaattttttgtatttttagtagagatgaggtttcaccgtgttagccaggatggtctcaatctcctgaccttgtgatctgcctgcctcagcctcccaaagtgctgagattacaggcttgagccaccgtgcccagccttacaggtttttttttaatagctttcttatcaaagtaaagaagttgccttttattcctaatttgctgagttctggttttttaaaatcatgagcagatattaaattgtatcaaattttttttctgtatctattgatttttctccttattcacatattaaagtaactttacatttctggaataaacccaacttagttgtaatgtgttatcctttatataaattgttgcatttgttttgctaatatttagtttaggatttttgcatctgtgtttgagtgagattgccctgtatttttctttcctcttaatgtcctggactggctttgatatcaaagttatgatgacctcatacaatagtttgggtgctgttctcattttttctattctcaggaagaatttctatcagattggtatttttttctaatgtttggaagaatttacaggtagacatctgttcttgagttttctttgttaggaaggttttaaactatgggttggatttttttctactagctattggatatactattttttattgcttatatcaatgtagataattttttctcctaggaatttgtcatctcatctaaaatttcaaaaatattggtataaagctgtttataatagtcccttatgaccttcgttttattttgaaataatatcaaacttacagcaaataacttttgctaaattacccaagagcaagctcagccatgatgtcccaccaccccaaattcattactgcaattcagtttgaagaccctatttattttttaaaaacagctttctgaagtataattggcatacagaaatactgtatttaaaatatataattttaaaaattaatatacattcacctataaaatcatagctataatgaaaacagtgaacatatttatcatcataaaagtgtctttatgcccctctctccattgtgagttaatttttgaatatgatttcagatatggattcaaggtcattttttgcatatgtacatcgttttgtaaccattttttaaaagactatcctttctgtggttgccttgaacctgtgtcaaaaaacagttgtccatatctgcatacttttattttgagacttttaattctattccattgatgtatttatttttaaaccagtaccacactgtcttgattattgtagctttgtaagtctttaaattaagaagtgttagccctccaacttgttctttttcaaagttgcttttgccattcttggtcctttgcatttccatatgaatttttgaatcagcttgtcaatttttatgcacacacacactcaaaatctactggcagtttgagattgttttgaagctatagatcaattttggaagaattgacatctaaacaatatcaagccttctgacccatgaaataagatatctctcttcatttatttaggtcttttatagccatatttttgtagttttcagtatcagatctttacatcctttgtttatgaaatctctgagtacctcaaattctgaagtttcaatttctaatagttcattggtggtatatagaaatggagttgatttttgtatattgatcttgtgtttttcaaccttgctaaactcacttatttgttctagttgtgttttgcatagattttatattaggatggctctaaaatagactttttttccaggtctagattagctctgcttctaaagcatgacttttctggggtgtctatcaaatgacttgtgcattcaacaaagtttcttcattctggatggttgaaattaaaacatcccccagccttgtaagagctttggtagtatttctttagttaattttgtagagaccctgtatgtatgtatgtacagcttagaatttagtcagagtatcaagggtgccttcatagacatttctttgtctgtgtattttcctcaaattccagctgccactacttcctcagattctgatctctgttcagtgagatcactgtgctttgacgttcccctctctgtcccacagttaagaaagcacctccagacaaaaacaagtgatcatgagacttgctttgtttgtttctttttcctcagggtttacagtgcttgctgcctgttgtctgtctaaaaactgttgcttaataattttgtccagtttaacagctgtttatggtggcaagatttgtctagtcacagttactctttcgtagtcaaatatgatttttaactcaatcatattgtttttagctctgtagtccagttaaatctcaactatgatgttgtgagttcactggaagagtaaaattttaagcaaataatgatgtataacatgatcttgtatatattcattttatgaaaatgattttaaaaaattaatttcaaatgaatgctgtcacattgatggcttattaatttactaaacaaaaaataattacccaagtcctatgacacttgtacctcttttaccaaatatgtttattctgcctagttattggatatatttactgtggacattttattctgtttctttttaaatactttggaagtacagtctttatacttatgtcataagaacrattattattaatttgattgaacttatatcatgttttagatatagccagtttgtactacatactcatgtaccacaagcttagattttattataagataacttgctgtgtaggctgcctagtaattcaaacatcagatggatgattggcctaggtgacttttaaatgcccttcagccttgagattctattattcttcagcaaattaaattcagcagatgtcttgagtgccattttaatagtgtatgttatatacgaaaaattgtctttgagaagcttagaatttcattggtgggataatacgtacgtgtgtgtatgtgtgtgtgtgtagaaatcaaatatgtagaaagaagagagaatatagaaagaatagttaaaaaatgtgtatgattaattacagagtgaacagcacaaaccacgaatgcttgacatgttcagtcagagaaagagacaatatggcagaagtagaatgagaaagaacacatcttgtcatcttgtgtgtgatgatatcagcaaaagagggccaccaaagcagcataaaggagwacacagttgcaggagcgtcagtagagagaccagcgtagcagaagtagaaagttgtttggccttgtttttaaaaatatgtggctaagttgttaactattgcaattttatcaacagtgacatttccttcagcaagtgccagcatggtgacagcattggctgtctagatctggaaatcttacatttgtatgactaaggtgcygctagtaataatgtcttaatgttgctgtagactaaaattttttcatagaaaaatcctcatctgtatcatgagatacatctgtttgagaaacagtatgaacagatcagccatctgaggtctgccttgttggagctgctaggtgctagagaaattcttttgagtgttatagctcttctgtctgtttgagtctagtagattctagtcttttgtttgtgtttagcttttaagggtcaaggtcatactgaggttaaaactgtcttgttgggttgatattaaaatctggacatagtattccatgctgacttttaattctggtattggaagaataattcaaagcatacttgtttttatttaatattgttcaaataaattcaaatttaatacacatataccagaataaaaagtttagataaattttctacaaaatggtaaaaccactgaaatttcttaccattggctgtgaactaaacagattatagaatatttctgtgatttagtttattactaaataggaaatatgtatgaagacatctttgagtatgaaaattctaaatttcagtatatcatagattttagtttttaaaattatagaactgtattttttgtctttttttttttttttaaatatggaacacggtcaggtacagtggctcacacctgtaatcccagcactttgggaggctgaggcaggaggatcacctgaggtcaggagtttgagaccagcctgaccaacatggtgaaacccagcctctactaaaaaatacaaaaagtaggcatgtgtggttgtgcacgcctgtaatcccagctgcttgggaggctgagacactagaatcgcttgaacccaggaggcagaggttgcagtgagccaagatcacaccactgcactccagcctgggcaacagattgagacctgtctcaaaaaaaaaaaaaatagataaataaaaataaaatatggaacacttcactaatttgcatgtcaccctcgctcaggggccatgctagaactctactttaatattgcatcattttgtttgaagcaataccaaacaaaagctgaaaacatgattaacagatagtaaaagctttatgtatatgtcttcattcatattttctaaaatcattgtttaaaaaatgcttgtttagtaagcatgctaaaatccttgcttatgtgtgttttttttttttttgcactggcttatttttgaggccggctgggagtgttcatgtaaaacaagagagaaattccaacaacagagaagggggaggctggggcggggggacagataaatgcaattttacttgacaacagagttgaatgtgagtgtgtaaaatttctgccataacataaaacagatttgaaatcttaccaggtaaaatttaaaatgtggataatacttgttaagtgccacattaagttatttacaatatttgatccctagagaaacttagaaaagaacttacggggattattttgctgcttgtattctgatcacttcattattaattactgcaggatcatttctatagctaatgtgggattttcctcagatcttcttaaggccatagtcagaaccaactgaatatatatataagatgattgcattatttttattggagaaaaattgaagcaaatgaaattgttttaataaagaatataagactttctccctcttttatcttgttaatgtatattttattctttttaacaaggtagaattttggctataaaacatatactgtaatatatgcttttggaaaaagttttaaatgaattttcagggctgttggtgctgtgaaaatagtacatgtacttctgtggttgttttagtgtcttttttgttgatttttggcagataaaataacacaagaagatattgaaggcattctacagaaatttactggaaatataatgcaagtgccccccctgtaagttcaattagtaaatttggaaaaatgtttacttttcttttccaatggttaacatcactctagttaaaatacacgagtttcctcttagcatatggcaaggcaggttttaaatctgatgtgccaaatgttaaagtraaggtgagacaggatgtggagcttttgacactctaagaggcagtggaatgtggtcttctttgtttctgagtgtggccccagcctggcatctgtgctattacagtgtttattggcttttctgattctatcaacagacataagggcagttaaggagcccagagatgtctcttttcctagaactgttgtgaagggaccagtcccgtctgggagggaagtcagagctgtgagtcagagtcctaatgtgcactgcatgtcaggtgctgggaccattcctattgggcacaatcttttgcttcactattctctgcagccagcgaaaccgatgagagttacaacttattaaaaatacaagtatattgctttactgcttgtcttagtttgggctgcagtaacaaaataacataaactgggtagcttataaacaacagaaatttatttctcaccattctggaggctgggaagtcaggatcacagtgcagtgggctcagcgtygggtgaaggcctgctttttcacagatggcaccttcttaccgtatcctcctagtagaaggggcaaggcagctctctggagcctcctttataagcgtactaatttctttcatgagggctgcgccctacgacctaattacctcccagaagaccctacctcctaatatcaacaccttgggggttaggatttcagcatataaatttggaggtttggcattcagatcataataccatgtagccatattttcgtgcacattaccatttcaagcaaattgcctcttttgaaaaaaatggctgaattggttataggatatgtcagggtaagtttctgactttttttttagaatttagtatttattttgtatttaaaatcttgagtttttttcaggaacattgaaatatctctgaggagacgctttttaatgattttgcctcaaatgtaaaaatttaaaaattttagcaagatctgcataaacgttattttggatcattgttaaattwatttatatttatgtataagaattgttttaatattttctgtgattattgcaaggattttgttttctagtaaaattttatcacgaaaagctaagatacgctaagtagrttatttgcttattagcttcttagaaatgttttggtaacttatataaaaatgaatattatagtagagattgtttcaaggaaatatagctgagagtattatgaccagagtctactaaattccttgtgccttttaacacagaatgaggactagtaaggacaagacrtgaatacattgtctctagaaagatgattaaagaataaaattggtaacactgcatattgtgtgccagaatgaggttatatcagccttagaaatatttagaaactctatccatgacagcattatggagtagattagaattaaaaattcattcattttttagaaggattttcattgtgaagcactgccagtcatccttcctttccatgctaaatctgaaattatcatctcccaatccttccaaatccctctcaattcttgctctcctttccttccatttctccttctctcatctcacaagctattctgcattaaagaaagatggacaaagactttcgactttgatgaagagaggtgaagtcgtagaagcaaaacctgccaggccagtgactgtatacagtatctcccttcaaaaattccagccaccatttttcacattaggtaagatggagaaatttgaaatcatttgtatttacgtgtatttttaatttgtatttggctacttttgtgtcattttaatagatccgtaggatgttggagattttttaaaatttgaatttaaggaaagttaggatttctttataccttttttggtaacacatttaatgagatacctgtagctatatggaggttcagaaatgcgtttctaactgggctgactttttcatatattgtactatgttatcttactagaaagttgaaagtaacatactttagatctctatagagaagagtaggtaaggagtgtatatactttttaaattttaggtttttattatcttttggatgcttttcctcccattttggctagtacctaatacattccgttttagaactgacattaattttccaatgaaaacaaagcatttttagtttttggacaagaaacccctcactcccttcttcaccacctatcacttactattaaagatcctgcaaatatggaaaaacatgggtaaggcagaaatgtattcctgaatacatggtcacatttttaattcaagttatgaattttaatttctaatatatatttgaaatgtaaagactaaaaagttcatttctgttgtttggaaattttatgatctggctgcagaaagttgtaaacatgtaagatctgtgaagaatccaaagccrtggttcttaatcctcagactcctttaaattgagcctacccttagtttcacagtgcactgaataggattccgtttagaaataatgtccccaaatcttttaatctaaactctattgcttttttattggcattattgttttatctgtgttgtgtttctgcaggatatggttttgtaccattagaaaaaaaaagtcactttgtttcttcatgttcctgcttctaaaatatttgacagataatgaaaaaaacacacttaggaaggttgtgctccattccatggaaatgaagcagctggtttgacacagtagatattctctatgaaagcaagaaaaaactcagatttttcagattgcatttaagtcagaaatattttattgactagggagagtgtaacgggccaaaagagctgtcttttcactcaagtcaaatatcacgcaagagtgctagcgcgcctgcatttcatcccagtgcccactttcaatttcagcagtggcccccaaccatgagctgactaaagaaagcagggggtgattaaaatccccaggtggtgagttttgattaattcccccaaatggctttatttgtaccagtaagactcgaagcagctagaatatagtccttttgtgtggaaatgtggcagctcttttcaggaagtcttgctgatggataaaaataatggagagctctgttcttaaccaataaacttgtgttagattgtgttaagaagatatttagatttacattcagttctgggacattgtgcaattttaagttgttttatgatttcttcaggagtatttccaagagaacatttaaataaactgagttcttcatgtgtagtacggtaccctaaacataattcttgtcactgtgaaaaggggtttttggttggttggttggttggttgtattttttttgaatgtacaagtcagaaaatattttaaaaatctaccgctcatgatggcaaagctgccatttctaaccatttacaacctattaaatgaacaaggcatataaatctgaaaatattttttaaaatctcaagctcatgatagcaaagctgagatttctaactatttaaaacctattaaatgaacaaggctgaagtattaaagtggtatgccttgccagttaatttaaaatgtgttcatgagtttgtgctgtttgctttctccacactctgacttttcagtctcacaaacacatatgctactggatgaataatttatgttttagtgcataaatattttatcactcaattgtttgcatagtgcatttttacatttgtttagggacatcatttctatgtaaagtggatttcataggaggttagcaatttactatstcactgttaacattccagatgttgaatgtggaggaggtttttatatcagaagcttggtcagtgacattggaaaaggtaagcataaaaatgaattatgaattatcatttagagaataatactccttttcaattggaagagggaattttcygtttttcttatttctgagtactggccttaggaactgaactcttgctgccttcagctttaaaagcattgtaggtttctggcttgcaattatcagcctcagcagctgcagtgaaatgtttgtaatgggaaagaagagaaagagagaacagaaaacgaagacaggaataatgaacgtagggccaacatcttttcaagtacaaaagattttaactcaaactagggatcaaaaaaaaaaaaagatttaaccttctaaaagttattttcaaatttttttaaactggaagccgtagtcttataaacagccagaaggtttcggttctggctgtgccatttactggcagttgtcgcactggacaggtcatatgatctcatctgtaaagtgcggctaatctttactccatggggttggctgcatgagttaaataacaaaaatgtgtgcaagttctttgttgattttaaagcagcttataaggtggattattaagtattattttgctacttaatcatttctttatctgaggcctcttggttcttatattggattattatacttttgggtggttttgagagatttcaattgagtayggtcatttgaacaattacagactatgaaatactgaatcgtttatcttctggattttttttctaccttttgttgccatagaactatcttcctgtgccaatgtgctagagctgacccgaaccaaacagggaccatttacgctagaagaacatgcccttcctgaagacaaatggacaattgatgacattgcacagtctcttgagcattgctcatctcttttcccagcagagttggcacttaaaaaatcaaaacctgagtctaatgaacaggttttgagctgtgaatatataactctaaatgagccaaagagagaagatgatgtaattaagacgtgttgagattggcctgggaatatcatcattttctagttgacatttgaatcctgtgtgcagatgcagaatgacaagctgcattcaaaagacaaacaatatgtcttttttttttttgcatgaagaaaaatgtctatcatttacagtttcaatagcacataatttattttctatgcattataaatggccttgcagttggctcagttgtttgytgtgttgtgaaatgttttaggattttttgtattgtgaaaatatgaatatgattggattcagaaaaattaactttctgaatttgatctgtcttcagtcttgtgaaaaagttgaacaaatttcctaatcaaagaaaaaagtatgagctccatgtttctttagtttcacaaaaatgaccataatttagtgttatttttactttatttaggcttcctggtggcttcattttattgaaattctttaaattgtttaaagtggccattattgatctctttcttctgttttggagagtttattattaaaaacatttctttgataaaatggccatcatctagtaatacctgtgtttgtttagatcttggaaatgaataagctttgataatatttgtaaatgaaccaaattattactgctaccactaacaggttgtaaatagaagactaatacttaattaaagtcaccttcctaccattagagcagaagacagctcctatagttttgtattttggcagctatgagatattttcatggtaatgtcaacatggtcaagcactttgtaccaagttattaagtaacataatttttaaaatttaaagaatgtgtcttcaactaaaaactttattctttagcatttatttatatttctctgtagggtgtwccctgtgacattgtctctttagtttgctctttcaagagatacttacagatgttgagatggctgccctgcatttccagctaatctcttctgctctaaatatttaaaaacagttcttctcaaacattttcattcagatagctttctgaaagttccctatccctctttaccataattttttaaatgtagccacattgtaatagtaaacttcatatataatgagtgcttcatatttttgttatgggaaagcaatatattatgcagccagtctgtagaaacattcagatccctcttcctttactcaaatacagtttcaaaaggaagactcatgagaaatttcataaaatacaagtttttagatgtttatgctttgcctttctttttaaaggtgttttcctgctttgtagtctctaactctgaaatttaaaatatgtaaactaaagtggttttatttgtgcttaacccaatttaaactcaatgtaaaatgttatatatgcatcagtacagcattttcaacatattggcaacatattttaaatgaaaacactaaaacaattcttagtatgagacaaaactgtaaggaaaaagagtgttaataccatgatgcattaacataaaatatcaaacacacaaagtcataaaatgaaaatttacagttttacctgttcatatctagtgccccacagtgtgtgtcaaccaaaggtggcagtggctacatctgcctgttggactggtacaggttacaatatgtcctcttccattgcaaattaaagtccaaatagagaaatacttaggttttagaacacatcagaggtatttctgctgtatttttcaccttaaaaattgacacagagtttactaatagaggagtagagattgttgaccatttttaaaaaacgatagccactctttttcttttatgtttaaaactgaagttttgccaaatgggaaaattactgttacctctaccatcttaatgtagtaactttagawtttaaatttttatattactattttcctttttgttgttcacatagtcttaaggcacctatacttttaaattgactttttcatttgatattatctatatgtatgtagttgtgataatgattattttaattatattactttatactcttaatttatttagagtatttctctattgctgaatacttaagtagttttaaattttattatgataaattcctgggagggggattatttagtgaaataatatgaagaactttatgacttatgtttgccttattgcattcccaaagagttgtaacattttacagtgttaccatttgagtaggggttttatatgttgttgctaatttagtaaacataggagagaaatcaaagtttttctgatttgcttttatgtgatttatctgtatactttgttcatttatataaataaatgtcttaatggtttctatacatatttgcatgagttatttgtgttgtaaatacctgatagaaggatttttcacggtctgttgtccttttagttttaattttcatttttgctaactaaatttgctaattctaataactcttccccttttatcattgtcagattaataagtatgaaaaattttaaatttattgagactttaaaatcttactaactctcataagcagttgaaactgagatactctgaaaagttcaagactcattcataaaacaaattagttttccctgatagtctggtatttaaataccaactcagtttttttttcatttttatcaaaatattcaagaaatttctgtgtcttatatttttctaggtctaaaccttcatgacatgataaagttgttttacttgtaagaaaacgataaaagatttaaaaaatcctgaaaatgtttcaacctggaacataccaaatcacttcattttgacactttaagttttttatatttgaaaaataatgtcttaaaagttgttaaaagtcatagaattattttatttatagtcttaaaatccaggacctttatgtaatagaaatttgctctttgcaaattcaaagttttgaaatgtgaataaaggctaaacacagtttcctctacctgtactgactagatatttttttcttaaatacttgaattaaaacaagccattgactcatcatcagaaatgagttactgtattaaataagagtgctttgtatcagatcttcagtacattttatgtcccctgaccagtttgaaatttgtatcagatttacaatgaacattttgaggttcaattagatggtgaattgttctgtttcaaagaaagtaagtaatttaccttatatcatgatgtatacaatagaaagagatgtgattcaaaagcactgtaaaatgccaaaacatttaaatagaggaaacgataatagatatgaggtttatgcactgaaatgagtataatggccttgtagttaaatttaaagagagggattgtcttgaaaccatttctttctctaaggtatgtatgggcagagctctagattgtcctaattcttcattaaatactatttattaagcacatttattaaggtgttgaatcagtagtaccttcatttgttaatgtgtgagctaaattctctttatgaataggaatatcttcagattgctgctataaatactgataccggccggaaagttgaagttcgggaattattttgctcttcttatccttaacccttaaaatgcagcatattaactttatttctgtctttaccgttagtcaactttttgatcctaggtgaatcacttaatctctttaggtctcaagtttccttatccttacaacaaaggagacagactagtccatcttgaagaatctctccaatgctaaaatattaggcttccaagtgtagataatttgtgattattttgcttaggaactcattcctcatgaacttgaacttttatatttatcagttctggggaattcccatccttcatttctttggatatttcatctcttccagctagtaatcctatttaagtctttttgttttattctgtgtctaattactctttcatattttccatctctttatcccactgtgctgcatactggggaatttcctccaatcttttttccagataatgaatgccttttkctatttttatttactgtttaacaatcatatatttattccaatcactcttgtgttttatttttatttatttatttattttgacacagagtctcactctgttgtccaggctggagtgcagtggcgcaatcttggctcactgcaacctccgcctcccaggttcaagtgattctcctgcctcagcctcctgagtagctgggattacagacgtgcatcaccatggccagctaatttttttattttttatttttagtagagacgaggtttcaccatgttggccaggctggtcttaaactcctgacctcaggtgatcctctctcctcggcctcccaaagtgttaggattacagacatgagtcactgtgccccggccttttgtttttatttctacaccaggtttttttcctccaaaatctgcctcttcttttttcatgtgttgtcttagtctttcattaaggttttagtaaaaaaaatattttttttactttggtatttaatatacagaaagtcacacataactgtatagcttagtgaattttcacaaaccaaacatgtctataatcagcaaccaagtcaagaaacagaacatcactaagccctccagaagcccctactgctccatcaagattatagattagtatttcatgtaacaatatagattagtaattttgtctgtttttgtgcttcatataaatagaagtatgtgatatgttttcttttatgtctggcttcttttgcacaaagctacaatcatgaggttcttccatattgtggctgtcttagcttgggctgctatgacaaaatgtcatagactgggtgactttaacatacttgtttctcacagtactggaggctggaagtctgagatcagggtgtcagtgtggttgggttgttgtgagggctgtctcactggcttggagagggctaccttctcattgtgtcctcacgtggctgagagaggaggcttttgtctttcttcctcctcttatagggacgttaaccccatcatagtggctccaatctcatgaccttgtctaaatttaattacctcccaaaggccccacttactgttcattgtcattgtttactattattcagttattaccactgttgatctattttactgaatgatggacacttggttagctttcaattttgactattttgaataatgcctctatgagcaatgtaatacttgtctcctggtaaacatgcacacatttctgttggaatttttttttttttttttttttttttttttttgagacggagtctcgctttgtcacccaggctggagtgcagtggtgccatctcggctcactgcaacctctgcctcccaggttcaagcaattatcatgcctcagtctcctgagtagctggaaatagaggcacacaccactatacccagctaatttttttgtatttttagtagagacagggtttcaccatattggccaggctggtctcaaactcctgacctcaagtgatttgcctgcctcagcctcccgaaatgctgggataacaggcgtgagctactgcgactggcctctgatggatatttctaagactggaatctaggttgtaaagtatacacgttaagctttagtagatagtgcaaggagtttttctaagttgctgtaccagcagcatatgggaattctgatggttccacatccttatcaccacaaagtattttacgttttcttcttaaccatttaggcacatgtttactttatcacaatatggttttaatgaacttttctctgatttcttagggtttttagttatgtgtattttttagtctaattttctatgtagtctactagtctatttagtcttattgtctagtctaacagtctctgttaactcagttatctgaaattcttatggagtatgctctaatattgcttgttgaatctcccaattctcagccaaggtagattgtgtcctaccttgtgttctttgtgttgtaaacttggattatgaggtaattcagtgagactttatgggagtgtgtgtgcttgggttgagagtgtccttccagagagattttgggattgtttctgctaggcacaccagagatatcgctgttccaaaatcctcatcgtaaatgatcattgcagagatgttttattattgttgtgttgtgttttgtttaatttaaagcctaagtcaaagaaaagcttccttgttttcgccctgtgtttatggtaaattgcattgtagtctaccattttattaaatgtatagtcctttaagggtaccagttttatgcctatgtttgtgggtgtcacagttccaaaacctgcctctcaagatccacacttggtttccatccccacttaaaaggcaaacactttggttacagagaggagtaaatcttgcctccctcccccactacctggattgctgtagcatcaagaagtatgtttaccactctgggtttcagatcgttctttgttttggaccctggtgaatttccttagtataagttcaattattttttaaaggaatttttaaaaagtcacatttatatgcaacaaaattcaccattttaagtgtatagttcattgagccagcttgaggtttaacttgctctttttctagttttaaagtagaggcttaggtcacttctttttaaacttaagcattaaatcttatcagtttttctttgagcactgctttagcggcatctcatgagttattataagctgtgattcaatttaaaataatttccattgtgatatttcactttacctattacttagaagtatatcatttactttctggatattagaggattttctatataaaattctctagttgatgtcttgtttaatttcattgtggtgagagaatataaaatacatgaacataaaatgtgtgatttccattcttacaaatttattaagacttgtttagtgactcagaaatggtctaccttggaatttgttccatgtacattggttaagaatgtgctttcatggttgttgggtggatcattctgtaaatatcaattaggtcaagcttgttgcttgtgttattcaggtcttccatagccttaatggggtttgttttgctttgttttgttttctgtttttggtctactttgcctatcagttacagtgagaggagacctgcaatctccaattataatgttggacttgtctgtttcttctttcagttctttttttttttttttttttttttttttttcacaagagggaggctcactgtgttccccagactggaatgtagtggtgtgatctcggctgactgcaacctccacctcctgggttcaaggaattctcctgcctcagcctcccaagtagctgaggttacaggtgccagccaccacgtccagctaatttttgtattttagtagagacggggtttcaccgtgtttgccaggctggtatcaaactcctgacctcaagtgatctgcctgcctcagcctcccaaaatgctaggattacaggtgtgagtcaccgcacccagcccttctttcagttctatcacctctttttgctatatttgtatgagagctttattattaggggcacatacatttaaaattgttatgtcttattgatagattgatctgtcattatgaatgtctgtattcattcctgatagtatttctttttctaaatatttttctgaatgtgtctgctattaacatagccactctggctttttaaaattagtatttttatggtatatatttttccttttttttttttttaagttttagatgttatgtttccttatacttaaagtgggtgtcttataggcagcatatatctgggtcttgatgtattatttaatctgataatctcaacctttttgttggagtgtttaggccatttacatttagtgtaattatagacatggtttgatttgctataccatcttttcatttgttttatatgtgagccatcttttcattgttcttttttcatctttgaccattttctttagtactgaatactttttttgtatttcattatatctattggctttttagttatacctcttaaaatttttttttctgttttatgtaggatttataatatacatctttaacttatcacagattaccttcaaatagtattttaccagctcaagtgtaatgtagaaaccttacaagagtatattttcatttctgtctcctaatttttatgctattgtctataatacattaggtttgttgttgtttgtttttaccttattgctgttggctggggtcagcaaacattttctgtaaagggctagatagtacaggcataccttggagatactgtgggtttggttccataccaccacaat
